United States Patent Application Publication US 2021/0189491 A1 - sequence listing, part 3

SEQ ID NO: 2607 - DNA, 11111 bp, Homo sapiens
gtgaggtcttactgagcactgcgtgccagtggaaagaagcattttgaaaggtaaactggtgggggcgatggggttcagatattctctgagaccgggaacgtcactgctctccccgggaagctgctttaggcacagtgctcctgcctgactcgggaagactgctctcctggcctcctggaagtcatatgggaaacagataggcagcaaggaacaacagagatttagggttcactgtgagccagttccccaacacccaggacagcttcccagggaagacggagtctcgtctgcctgtgctccacttgtacagcagatacccagtttttcagctccattaactgaaagactcttttcctgaatgttgtccttgcatcattgcacaaaatcagcttaccataaagaggatttactgaaatcctgaaacttaggagtcagcaagtttttcatttgtgtttgtcaaatgtcaagaaaagctgaggagttacaagaaactcagtgatccctgacagctctctgcaattgcagcaaaatctgagcaagactgacagaaaccactcggggacaaacatctgacttccacagcagttaaaatcattgaatacagaaccaaaatgtcttcatgtgaaaaactccatcaagacccaagaaaacttctgactcattagtagtttagggtacatcatgtggatgcttttgaaaccccattctttgaagtcttccccacttaacatatatctaaaaaccatacatacattcattagatataatcttagttaccagttttaaaggaaataaaagcatatagaacacaatagttacatctccaaaataaagaagcttgtaagatgtgtaaaagttaagaattcattttcactaacaattattctcaaacttaaatgaggatactgaggacatgaaaattacagagctagtatcatgatgctataaaatactgatatatttaatatcccaacagggactgattagacttatatatttaaaacatatttaagttgcttagaaattttaagtcaataaaattcacatacaataatatacattataaaatatgaatttaaagctttggaatttactgatcagacatttccaatagctctttgaaatgttcccatacatatattttgttgtttgcttgatggcaaagtttaaaaatgttgagtaaaaatattagaacttgtgaaaccctgtttgtatacacccaaacacacttacatatctatctatatctatctatagaaatatatgtatgcatttgtatacacacacacacacacacacacacacacacatatggcaaaatacattgctagaacaaaggaagtggagtcacatagattcttagtatccattcagattcaaaaattctaacaaactaaatatgggattaaggaatggtaaaattttaaatctcatattagcactacgtactgttttaacaagcaatcaactaaacaaaggcattttcttctctttaagagcaattcagtgggcaggtcacgatctctctgtctgtgtgtgtgtgtgtgtgtgtgtgtgtgtgtgtgtgtgtatgtatttgtgtgtatgtgtttctctgtctgtcttagttcatttgagctgctataacacaatgccatagactgggtgggttattaacaatagaaatctatttctcagttctggaggctgggaagtccatgatcaaggcctcagattatgtgtctggtgaggtcttgtttcctgatcctaggtgatgattacttgctgggctttcacatggtggatgtacaaaaaggctcccttgggcctctcttagaaaggcattaatctcattcatcaggctctagcttctggacctaatcaccttggagaggccccatgtcctaacaccatcaccttggattaggattgcaacgtatgaatttcagtgggacacaaacatttaagaccataccagcctccttcttcccttttctacccccaacaccatgcccatccttccaaatttgttagtagttttcactcacagtttattttatttttttcttcatccattttccttagactgaatacatctttatgggtctctcctttatgctaataaatgttggaaatattgaatggaggtattgtacatctcatccgtcttttctgatgagagagaaggaatcaccaagcagagcagacatgttggggcttaataactttcatagtccttatggtgtaaagcctccgtttgaaaatcgacattctattaggctgaatcatgcttgccatttgtcacagttcagtgcactaaacttaggactgaaaatatgcattttggatacttggggtaagagaaagtttttctcacagaaatctgtttatttggagctgaatgcaaggaactgataattttcttctcagaggttctcattacatagtgtcataagagactgtcagaaaaatgccgataagaaaacatactatctgacttctcaggaaatacattaaaataaattcccagcaacaaaaacttgcattaatccatttgataaggagtggtagaattatcgttcatttctactaagtggccttttccttgtgtttgatctgaaatataggaccttaaatgctattgggggagaaaggtaagtttgtgattttctacttttacttttaaaccaatttattttatttaatgatcccttgatatattcaactatagcaattttaataacttacctaaaattctgattaagtggagtaaattcataactttaaaactgcctcattttgattataaccaggaaatatttttttcatttttattcttctttatgttgtaaaggatgtatcaaaaatgataattcataaatatttttaaagtttttaaacaatttttgagttattatatctgtagaaaagcagtacaaattcctgacatgcatatgccacatagacatgcttagaaattactattacctccatttcacacatgttgtttttaagcatacttaaagtaagtagaaacttactggattttaatagatgactgatattagatattgtctgtgatttcccatacactttgctagattattatatgtcatatttaatcactaaagcagcctccacgagggttgtttcatatcattataaagtgagtaattggaaagctaaaaaggccacagagttagcaaatggtagacatggcattttaaactacatgtgtctgacttcaagatacaggattagatttttcagattttatgtcctatatgcagaatctattcatttctttttctttccttttcttttttttttttttttagacatggggtcttgcttattgctcagcctggagtgcagtggcacaatcatcactcactgcaggatcaacccctgggctcaagcgatcctcccacctcagtctctcaagtagcttggaccacatgcgcataccatcatgctcagttaatattttataatttttgtagagatggggcctcacatgttgcccaggctggttttgaactcctgggctcaagtgacccttctcccttggcctcccaaagtgctgggattacagacatgagccaccatgccttgctcttcatttcttaaacagaatattttgattgagtgaagccttatgtacactaataaagtatacttttaagcttctacactgtacttgttagttaggctttgctaacttaaatatgaactatttcatatgaatctgaaacataaaaactgaaaaatgccacactttggcaaactgtgaagccttcatgagaataactatgccctgttgcatagagaccagcttagtcaattctatcagacccctctctttataattttaaaatatttcattgaaagataagaattatatatatttaagaagtatgatgtgataagtggatatacatatatattatataatgattagcacaatcaaattgattgacacatccgtcatcccctatgctgtactgcatgagcttatttgagggttattggcagaggaagaagctgattaatcattttttaatcttttattaaacatggtcacaataccttggtaaaactttcagtaaaatagaagaaaggaatttatcaccctgcctaacttcttgagcacattcattttaagacttttgattgacttttaaactattagttggaccaccataccaaaagggagtgaactaatcaaatgaacaatgctggcttccatttattgattatcttatttatgattttttttctgtgaggcccttcccttcacccttgagaccttgagtcccagagataaatatgacataatccctgctaagaagagtgtagcgacagaaagacttgttcatgtcacttgccttcacaggataagttttctgtaaaatgtcacttcccttatcgaatacagggcactatgcttgttcattgaaaaaggaactaagttttaattgtggtaggtttctgagaagagaagatgtctgtatcaagaacaagtacaagaaaactggacaaaatatgcatgtgtgtaggatctgcagcggatggggacatgaaccaagggcatgaatttaagacaataagcagcatttgaaaaataagaaagggttgtaggatttttcttctcagtcactttgcaagccagggaccctcgatcgatgacgccccgcccgggccttgctctgccacgctgcatgccccagctcgcctgtgtgatagcttgtacccacgttcagtggttcctgagcttttgcaccctgcccaagaagaatgaggatatgctggacattgaaggggtggccttgtttgatgttgctgttttatgaaattacactatccatgtacaacataaggaaaatgtgacccagctgagagcgccaggccagattctggcaacaccgatgtctggatgtcagtgccaaaccagctccctgatttcacaggtaaattgatcaggaatagttctgaaaagtgtactgcagttgaagaaagcactatctagagagacgaagacaatcattcaggtctgaacatttctattgtatgtcattctcactttctcgctttcattttcctcttctgcccataacatcaacttttagccattcatcttctttctttcttgagtaaaaaattatgagaatttatcccttattaacagtgactgtctttcttttttaatttttagtctgtatgagtacatagtacgtgtatatatttatgcggtgaatgagatattgtgatacaggtatacaatgtgtaagaatcacctctgtgtaaatgggttatccatcacctcaaacatttataatttctttgtgttacacacattccaattatattcttttagttatttttaaatgcacaataatatttgactgtagtcaccctgttgtgctatcaaatactaaatcttattcattctatctaactataattttgtacacatttgccatctgcatttcccccacacacaccgctatctttcccagtctctggtaaaccatcattttactctctatattcatgagttcagttgttttaatttttagttcacagaaatgagtgagaacatatgaagtttgtctttctgtgcctggcatatttcatttaacacaatgccctccagttcaatccatggtgttgcaagtcacaggatctcattctttttttatggctgaatagtacttcattgggtaccacattttctttatttgttcatctgttgaaggacacctaagttgcttctaaattttggctatggtgaatagtgctgcaataaacatgggagtgcagatacctccttgatatactaattttcttacttttggttttatacctaacagtgggattacaggatcctacggtagtttgattttccattttcagaggagcctctatactgttctccctagtggctgtactaatttacattcttatcaaaagtgtacgagggtcctcttttcttcacatcctcaccagcatttattattgcctgtcctttggataaaagctattttaactggagtaagacaatatgtcattatagttttgatttgcatttctctgatgatcagtgatgttgagcacgttttcctacatctgtttgccatttctttgtcttttgagaaatgtctctttaggtattttgcccattttttaaattggattattagattttattctatagagttgtttgagctccttatataatctgggcataaagaccttatcagatggagagtctgcaaatattttctctcattctttgattgtctttttacttcgttgtttcctttgctgtgtagctttttaacttgatgtgattccatttgccaatttttgttttggttgcctgtgcttgtgggatattacttaataaatcattacccagactaatgtcttagagaatttcccttatgttttcttttagtagtttcataacttgaggtcttagatttaagtcactagtctatttttatttgatttttgtacatagcaaggatagggatctagttttcttcttccacatatggatagcttttcgtccccaatgtatgctcttgtcaacttcattgaaaatgagttccttgtagaagtatggatttgtttctgggttctctattctgttccattgctctatgtgtctagtgcctggaatgtggcttcaggactctacttggtggtttattttcctatggctgaactggtgtccaaattgcaagacaaagttctctttactatcttctctcctttactcaagaaaaaaaagtctctgctgaagctgcaagctatgttgcctgaagttggggaaaggttgatgcaggcactcccttagccaccgcagctggaattttactggatcatgtgcaccccaagctcactggcctgagcccagcacagcaacaggtcttgcccagcaatttcagtctttgtggcctatgctgcctttcaagtttatttgggactgcagggcactttagcctgcagtggtgggactagccagaatttactttctgactgctgggatagctgagtcccctctggctagagcttgtctaaatgctccctccatgggcgccatttgaattctgccccatatttgtttttcactgtgccggcaacattaggttccaatgcaacgcctcacaatcactgcactgtcaccccccaaagcacacagattctctctttcagccatgaggccactgcagagggaagggagagtggtgatggaggcaattcaggactgtcttttctaccctcttcagtgcctcttcgcttatatgatgtgaaaaccaggtagttatcgtttacctgatttttcgttcttatgaaggtgatttcttgtgtgaatagttgtttaatcggtgtttctgttgggggtgagtggtgggaggggctgatcactgaaggtttctatttagccatcttgctctaactcctccttgactgtttttcttgaaagtgatgctttttttgaaaatcgcatgtggtcattccataacactaaaacagcccaagtgcattatgggtttttttcttagtcttgatcaagcatattttgctacattagcatgagattggtggctgcccttatttataggtgttccctgttttctctgtatttctccatcatggcattctaatctctgaatggaagatttccatctagctggactggacatgagcttttggatgtgtctgtgcaatgcattggctttcattcatgagactaggtactattgtctattgtgtttgggtgtgaatgtgtatgtaggaggtagaatgggaaagtagttgctccaaaaacctggaagtagtataacattatttcattgaccatttgttaatatgtagtaatttccagttgctgtagtgctactgtggttgagatagaaatatatgaggcataatccttagttcaggacactacggttatatatctgcaatttgaaaaaccaagtttaccaggctttatttttgcagaagacttttaatttttcgtgactcaatcaagctttagacattatatttaaaattaatagattttaaatgaaagggcaaaaattaggcagtggaaaatgaaactctcctgagcacttccatgtttttctaaaataagaacagatttttagataaactgtcctttcctgaggccaattcaggattttttttttttttttggcacccaacattacttagtattgcacatcaatggcagtttctctgaaacttttctcaatttcttactgaaatactgctacactttggtgattttaaaactccaatatgtacttcatgtcaaattatatcaatgcaatgaagttagacacattcatcaaaagttttaagaatatcaacacagtaaagataagtcatgaatttaaatttgtgattaaatattatcagaggagccaaatggtatttccagttaataatcctcaggcagaattttcaatagacaagttgtctctactaagaggctgcatgatgaatgaaatgaacagaatatagaacttgagtctgtttgagttcaaggtcttacaattaccaagtatatgaattggcaaaggaatcattaaactctcaaagttacctctagtgttactttaaagttcatgataaaaatgaataaatatttgtgaattactttcagaagtgctaaatattttattgctattttaattgcctcagtataattttcatcgattttaaaatgatgagtcctacgtataaaggtgggcttaaataggagggaggtctgactggtttagttggaataaaattatcattgcttataaaattaacatgtaatataaattgtcattgaatgaaatggtgaataacagtgaatgtgttcttaaagcagtaaaagaagtgattaatttaattgttctctactattcccaaaaagaagtatatcagaaatgattgcaggaagcattaatttttaccttaattagatatattgaggatgcaaaaatttctgagagaagatcttatgttttctcaccacaaaaatgaaaattatgcaaggtaatgcatatattgattagcttgatatagtcagtccacaacggatatgcgtttcaaaacattatggtgtagattatatatataattatattttatccgtacaattatatataattttatatgtcaattaaaaaataaactcaatggtaagaaaacattttttattttacattttcactttctaaattctaaagaaaatttctttggctagtcttacaaaacaacagaagagttaagatttaaaaaccttaaaaattaatgagactcattttattccttaagggtatcgtgtgttttgtgttactgatgacaaggatagggtgcagaaaattcaccttgtatataatttcatttgaaaagcatttctgttgggggctggccataaagagaccagttgtcaccaaaagattatttagttggagaatacaatgatatacaatagatgaatatcgatctttaggtaaagaggataatccaaagccacaaaaaaggaaattaaaagaaattagaaggataaagggcaggttagtggaacagaatttgagcattaaaaacagtggtctattttataactgtgtactacaccatcacttatatgtgaatgaccctataagttagtctagttctctctggagtgttccatatctgtatggaattacttgctaggcatctacaacatgaagccaagggaacttcattcattttcagaactgacatcattatctcactcccataacctactctgcatcctgcattaactagctttgtaaatttcaccagttatttattcaataaatagttattgatcactaaattatgctaggcactctggtaaacttacaaatagtaggttattaagataagtgaatttgcaagttcacttaagagcttaacaggttacatacaccatgctgtacttgggaagtgagaagacagaaagtcattttatttgctttattttcatcatctgcagaattcaattaggctacaggttctttaatatttgttaattaaattaaaaaacacttataatttgataggtacctatctccttctttgtttaccattatttccttcaggtcaccattgactctcacctaggtgactacaacaatctccacactgatcaccctgtttttattattaaaacctccaaatagctctgccttcttattgttaaaataatctttctgtcataaaaatactgttatgccacaacactgcctaaaatcattaaatagctctccattaacaagattaggtcttaaattcttttgttggacaaaaatgatcttgcctatcaaattagtactaatgctcaatctatactttacagaaatatcaagttacttgttcaaaaacacagttgtatttatttctcccatatcttgaattttccatatgtttttgcctcttctcagaattctatcttcaggtcttcatatctgggcaaaatgtcttcaactttcaagtctcagattgaaagtctttggattttgaagccttcctatattctgccagaaaaattattatactgtttcctctactttctctatctcatttactggctcttacgcatttttttttaaaaagattgtttattcttctgtctactaagtagcctgtatcatgattcactcatttattttcttcactttctatacttttccatttgtctgaaatgtatttggagtgatcaactttctcatgtcttgagataaaaaattatacaggcctttgtgtatctccagttcatagcacagtgcttgatatatgtaaggtgcaaataaaacacttttgaaataaaatagaaaaggacagaaagaatgaaaaaatgtaagataaaaccctcagatctagagagtcagtaatactttaaatattaataactcaaaatataacacctactgagggtttattacatatttttggtcactagcaactgatatcatatgactagtaattattagagtgaaaatctgaatatgagcaacctgagctgagaatgatatatgtaatagaaatgaatatacttgttgaatatgtgtgtgtgtgtgtgtgtgtgt

SEQ ID NO: 2608 - DNA, 6805 bp, Homo sapiens
atttgggatcaaataaggcctcactgaaaggtaatgagactgattggttatcttgcatgccctgtaagtagaatctagaaataaatagaaaattttgaaaaaacatctgagatagcaacagaatcatccgagtagtcttcagcttgcagggtaactgtttgaaggggaaaacgtaaggaaagtctgttgtgtacatttacaaagaaatggctttacttttttagacataacatgggcatgtgaatctgcttccttaaagaaaatttagcaacttcaaagatgttaacagggaaaaagactctatgatgtcacagtttaaaatatctggcaaggcctgagaaaacaaataagttttcacgtgtgttttcttgccagattgatctccgtgatgacccaaaaaccttggcccgtttgctgtatatgaaagagaaacctctcacttacgagcatggtgtgaagctcgcaaaagcggtatcctgcatgagaacctctcacaacacctgatcgagatactgaactcttcctacttctatgcacaatcggagcacagtgctacttggaatgttcagctctgactcagaaaggtctcaaagcggtttttgatgaagcaatcctcaccattttccaccccaagaaaaagaagaaacgctgttctgagggtcacagctgctgttcaattatctgaggttgtctgggacctgcctccaccccatccagggatgagaatggcagccaatctctgtggccaagctccagccaaaaaggagggcacgaccagaaaggaactccctttgcacggaggcttgccccatcaccctctgagccctcccaacacagcacactagtcagcccactgccacgacctccctgccagccagaagcatccgtactgcacgctgtctgagaatgctgggcctggattgcagacagtgccgctgctgatcgcatcaaaaacaaagtcaaaggccatctcacattttacaaatccccagctcatgaacgtgaagctgataggaaatcaccccagggaacccgaaaaagaaacttgattcctctattgctggccttacttgatgtcttttataaaacttgggactacaatactaacctttttttctgaatctgctgttctacccatgtgtctcacattcatttgtattatttcaagaaatgtactaatttccagttcactcaggccttactaatccataccaaattagcctaaagacaaggcattttatattcatttctattttcagcatgtttctaccaaagctattagaaccaacacgtacctctgaatgcccgattataagaagacatgagaagactttaaaagttttggaaatttacagagccatgatttttgaacctaattgaaagaaaaccatctgaattgttgcaggtccacatttttgccaaagatacactctatagatgcttagtagtggcctgatttttttccatgtattgccacgacaaactaaaaatgaactgtgtttaagaatgtagtatttctgtttttcatccaagttgattgggggaagaatatggcaggatccatcttttacagtattttgtattcagtaaagtggacattcctgctcctcccttcccccattgcatgccctcttcctcccttgatttcactttctctcatgcccggatccttttattctccccagttataacccagttataaaagaaagatctgagcataaagatacgtgtttaaaaataactaaaagtaaaggaaagtgccttaatttttctatttgcttcaactgaaagtgcttctcagctcgccccatgtaagttctcattccatgtaaatgacattttccagttacaactggtactgagattttgcctctctctttccttactcatcctcccaaatgtctttgtgggagccatatcagtggataccaagctctgtatccatttgtcccctgccctccacaatgtgtgacatagaacagggactttggccctgggaaagcaaaagctcccagtaaggaatcctgtgcccaatgatgtaaaacaattccaaacatccaggaatttttgtatcatagagcgaattacttcctatcttttcattagaggctatgaggacttctaattagtcttagttgcttataagtgccctggaatcacccaggtaggcacttaatttttttttcagttgcatgagcaaagtgcttcttagtagtgtgaaattacaacaactttaagactttccagattcaagctcccactgttggaaaaagccagcctttctaatctcttctgctactggaataagcacttaagaattgcgtgatagccaggcaccgtggctcatgcctgtaatcccaacacttagggaggctgaggtgggtgggccgcttgagctcaggagttcaagaccagcctgggtaatatagtgagatcctgtgtctctataaaaaaattaaaaattagtcagttgtagtgacacatacctgtagtcccagctactcaggaggctgaggtggaaggatcacttgagcccagaaggtaaggctgcagtgagctgtgactgtgccactacactccagcctgagtgacagagaaagaacctgtcaaaaaaaaaaaaaaaacaacctacatttcaagtactatttcccttctctcccatctaattgctaaagattttctttcatacgcacacactccagtgactggaaaaacgggagttttcagtcaaagcttgacatttagagaaaacaaggactttctgcctttataaatggaaatcaactgtgtatgaactataactctgcagaggttatgaattcatcctttacaaacaataatgaacttttagtcctgtaataaatgaaatgttattaggcagctttgttgcatgattgcatagttatatcttgctaacgggccactcatttctcactgatgtggatgaaaaaatgagagcagtatgtttccaggtgtgtgcactcaacaggcaaatagctcccgaggtcaccacttccctaatgggccacaggaagtaagttgatcttgatggggagatcacgtcacccagaaccagcaactggatagagactgttgttagtgtctgggtagagcacaggctcccaggggtcttaagagctaattactgaataaaacaatctagaacaaagcaacctaaataagttgatgtcattctgccaaattaatcagttattccttgtttcacggcaagatccagtttgtttcactaaaaagtgttttctgctataagattaaactgtcttctgaaaccaaagataagaagagacatagaggcccggcgcagtggctcacgcctgtaatcccagcactttgggaggccaaggctggcagatcaccaggtcaggagatcaagaccatcctggctaacacagtgaaaccccatctctactaaaaatacagaaaaaatagctgggcgtggtggcgggcacctgtactcccagctactcgggaggctgaggcaggagaatggcgtgaacccaggaggcggagctttcagtgagccgagaccgcaccactgcactcccgcctgggcgaaacagcgagactctatctccaaaaaaaagaagagacatagaaatttgaagaaggatcctttaatggtctacaccgtcttccaaagtcaagaagtggcagctgatatccatttgaaagtagaatcctagcttttcagagctagacaaggcctcagaaactatagttgaattcctcattgtaccaatgagaaactcaggcctagatgggtaaaaagaggtgtgttgtagcagtgctgggacagatctcggtttttctgcttcctatacaatcctcttcaacccaatactacaatgtatttattatcacatattaagctggagatttgtagccatgttattagagttgcaactgtttatcctatagattccagccacattttaaacacataacttcatgtagttaggccactaaaaataaagtaatccatcaaactagtaatacactagagaatttgacctacatactaagatgcctgaaatccacagtatatggcaatttaacccccatctaatagtggctcaatcaagtagctaaacatatttatttcactcagatggttggttgtttggtagaaggaatggactccttgggctattttgggaacaaaaaaggactaggacacaaatcaaagccacatccacagtaagaaatccgggctgatctctgccaagaaaagttacaaagaataattacttgatcacgtggggaaatttcgacataaaagaagtaatggataaaaagaaagaaaaatgaacaattgctgaagacaataattatagcaaccctaaaccagaaagcactaagccaggaagtcaaaaactaagtcatacacatatgacaaggtgcgggggttggtcctgagacttcagtgagaatatgtccgatcaggatatgcaaagaaccatttggaagatttctagttcataagggaagtaccaaatgaagtggatgggaccatacgcaatttgcataggacccccaaggaggaaatagtatgacatggtagtaaaaaagcaatcacgactacactcacaattttaggagaaaataaaactaaatccagaatttgaagccaacaacaacaaaaaaagtcattatttagggtatacgttcctgtgggcagtaccttgcaaagtagaacatcttcaagaagaaatatttgacttgaggtaaggctttcaagattgccatattacattcataaaggcaaactcatccttgagaccaaagtgacagaagattagaaattaaggctttgttttaaagaaatgttgacatcatactggaaattattatccagctacttacacattcgtttttaaatccatccctatgtttagctgccaaaatgcaaactgcgcattctctctcaacggagagcgccacaggtcaccagctattattctcccaggagtcattgagtaggctgcccaagtacacataaggaaactcaacgaactattttcatttcaaggaccattagaaacagaaaggaaaagagaaggtcagggaaacttagtttctaacaaaggaagtgaggcactttgaaaaagaaaatatttagagaacggagaggaagctaaacccaaacaaccaaaacgcacagctgacaattattccgggaagttggtaacttctgcctggtctctagaagcacaggaagaaaggactgttagcgtgaagaacactccagggttctgggtatctaggcagagtcagtcaacagggctaaccatgtgataatcctgggtaattccacctcacagttcactaaaaaacaagcggaaccctgggcaaagccctttggggctttaatagcaatggaggacatcaccctgtcactttctctgcttctacacagcaggcaatcaaggaaaacttgccaagaaatatgagtgaataaatgattttgaaagtttcattgagcaggaacatgaaaaggatgatttggggatagctggaaggatagttacttgcatgaataatatttattcaccgtcagtgtgatatttctcaatagaaagattgtatttaaaatgtacaactacaataacagaaaaaaaaatacgagataaagcaacagttcacagtgccacaacggtcaacaaagaccagaaaggaaattaaagcacaagttctactcagcagcacttcagccatcagaagctccgccgtgctattttgaagatctctttctgttaggggacgaatgagtcaaagcgggattggctgctctgtgaaatggtgagattcaagttcaacaatagttcttggctttgaaattccactaccggaaattagagtaaaatctgcaccattagtcttggtcacaatctatgtttttgtccttagaggatattatgtcaaaaaactagggttgcttcagtgtgtgcgtgtgttttaaatatgttctactttgatcatttcattttgttctatgagttctgcagtgactcagaagttccatgatactataactggagtaattttgctgtatttttagccatgtcctccaagcctcccagtatatgctgtgatctttgccaaacagaatctgatcagtgttacaggggaaatgatgtgtgaggctctacaaggagagggtctccagggcccacacctgagtcatgccttgaagcaacctcagcacacttagcctcccagtgattctgtgcaagtctgtctcaatcttttgagcttatgttagttctttgggggaaaaaaaatagaaacaacttctgaatagggcagtatgtttggggcagctttgtgaatacatatctaaaattacctccatttgccattttttaaatcaattttttttcaagcaatcagattcttttctcctagaggagctgtgggcaagaaaactaatgaattctacatccttctcatcacctggtttaaattgttttctgctctgagtaaacagtaattactgtttaagtacatctcagcagaattttatcccaattgcaacagttcatgttcctcctaatgtaatctctgcagaggaaatgatcgtcaagggaagcaggctgacctgctcacgggatggcgttcttacaatctgcatcttatgtaatggtgattctgtgtgcctgtgtcataattattggaatattattttatgcttttttttttttgagacggagtctcgctctgtcgcccaggctggagtgcagtggcacgatctcagctcactgcaagctcccctcccaggttcacg

SEQ ID NO: 2609 - DNA, 497 bp, Homo sapiens
attaagagcacagccaactgttccactaaaatgccgaatgaggtaagacagtctcagcagcataaagaaagctgtctagaaatacagaggagggagagattgttctggctgactgtagggctagagaacagaaatagaatcagaaaagaggacgagatctgtggcatgtgagggtgagggcatttacatcagtccaaatggatgaagaggagattccagtctagcacagcatggccagtcagagtagaagggaggccccagcatgtggggaagctgcaattaactttttaccaaaacctacccctggtgaggcagaacagagagaaataataccaaaagccacccaactgaaaaggtcttcttgacttcctggactatgatgaacggtcgtcttgagaagaccccctacaccaaatgcgcgtatcggaacctactcactcagaacagcatggtccattatctccaaatgacagactagactgacatcacagacacac

SEQ ID NO: 2610 - DNA, 3873 bp, Homo sapiens
catagatcgtaaactgtcctttcataatggcgatccatttgttctcaaatgcgctgacattttgtcatatggaacattttcattttggctacaaaataagtggaaattttagtttgcagcaataagcttccatctcccattattaaaaagattattttatagttgcatgcatctttattattttatatatatatagtataggatcaaaattcataaatgatgtgatgaatagtactgttgcctggcttaggtagctatggtactgatgtgataaatgatacagcaaaaataaaaagcaaattcaggattcagttcactttccacatttcttcactaacttaaaaaagttagaacacatggctttcaaataatttttcaatctattgatagtgcaacgatgttatatattattattgatgactaccactacaaacagaaacaaaataccttgattggtagttaagcaaaagaagagtattaaatctcattatattgtaaaagtaatgaataaaattttggagatgctggaaaagaatagatttacctatgttgcactttatttttaaaggtcatatttttaaaagtccattctatgccttcaaatttgaagtcgtcagctaatatgctattatttacaaaagatgtgcaaaacacttttgacaatagaaaggtttaatatagttgttgctcatcagggtctattggtttcaatatctgatattctggataaatcgaatatttctaaaagctctttttcattgtattgtttgcatttctgaagcagctcattatgatatacatcacaggtttttattgtttataattagaaaacaaaactccactaacataattactttattttgcttccaaagtattatttttaaatctcagaaccctattttcctaaaaatattggcacaagtaattagaagtgaagatataaacttaatccctgcaatcggacccattaaccaccacaaatattgtcttatttaagctgatcttggtaaaccggttgcctgttatacccacttgctgtttctttaggctaacctatgtggcaacaagtatatttgggaaacgagttttcatcaaaaacaagaaactgtttatcttggaaataccattctccctaaagttgtaggcatcaagaagaaaacacaactgaattgtttaacgtcattgtgtgggatatggtgaggaaactacttccatttgtctttgaggtcagattgacaagtagcatttcactttcaattagtgaaaaaaggaagtaagacaaagcttccaaaagtcaactaatggccaaatattgagaatgattggagcattacttagcaatatgatgtaaaaaaatatgatgataattataaccgatatttgagtgcctacatgcaccaggcacttcatattaagtgttttatttgattttccatactgatttcttaaatctatgaggtaagtacattactatagtttccacaggaagaaattatggttcaaaatttggatagctatttcaatatccattccttttggatattggacatctttattttttaagcataactttataattatgctcacagtacataagcccacatcaattaatatctattaagtaccacaaacactaagttagtacttaatatgtgctaagaaatgtgctgaatcaattctttaaaatctttaatcagagaagttttgttattgctagatgaagaaaatgcaatcaccacctgttaggaggcttggtttttccagagagttgctaaagtctcagaaagtctgtaattttaccttgacatttactttattaaccagaatacgggtgcttatttggtcaaatattttgtaaataaaaagtgaaatgaataaagattgcctgttttaatataaaatataatacatactttgttcaaaagatatgtaaccggaaaatcactaaaagtaaattgcaaatttggacaaaacagagcatgtactttgttttctagacaccatgttacctgctccctctaataaaaataacacaaaaaataggtggcagaatacaaaacataattttaaaaaagaatcaactaatgaaaaaactctgctttgttaggaaaatttacttctgatacaatttaagcataaaattcaatggcactaaaaattcaagttaagtgtaaagtgtaaacacaaatttgatgctggataaacatcgtgtcaaatcaacttaaaactaggaagggaattattaacatgattttaaatagtcatctaaatggttatttgccaattatattttattcagttttaaatgccttaatgccagatgtgaattaaggaagacttttttttgtgatgttatttgcttgattatttgtttttgacctggtcaagactctcagacctcccaataaactgttagttaaaggttaatttctattgtgccaatagggaaaaatagaaagagaagggatgtaacttctgagtcatgagttactaagctgcagaatgtgatttcagagaaataaaaaattgaagggactccaggaggttcaacctcgtctctaatatatatatgtttgccatgggttgctaatttgcaatagctgtcataatgagaatagccaaagttggataaatgtgacaaaagattaacaaagtgtttcacacccttaaattataccacatcaagaatgaggaaaaagcattgccaaaggaaactactgcaatgctacttgcattcttgcaataaatccagcatagcatccaaattaagagagttaccatctgacttctaactttttccccttaagaacaatttgaatctctggcatccacctcgtcggtactttaaaacctgtatttcccacccaaagtccaattagtctccggttgatgagtactctgatattgctttctcttgtccatatttcttggtttgggattattctagatcaataggagggtaaactatcagtaccaagtttgttctagatgaaacacatcaggataaccttccatccaaatactgtgttgatgtcacagggggaaacagttgagctaattgcgcaccataatctgaagttacattgcaagtgtcaggtgttagactgcagtgaattggttataccacagggaacgttattgcaagagatttggaggacactaaaatagattaatgttacacatctccctcaaaaataagaacacatttaactctttatttaaaaaaaacattatggcaaaataaaatgaaaccatttaatggcatattttctgaagggattactttttacattagtgtagggtgaaaatcacttaatgtacttgatctctagtgtccctttcaccttttcctcccttgagaactctttttcccccttctcccctgcacttctttaatttacaatatcgctgtatgtgcagttcttaagaaatgaagcaagagactgtaacaggggagagaagaaatctaacagctaaacaggtgtacatggaaaataaataaaaaattgaaaaattgggcctcttgggtgttataaaaggaacatttgctgaataactactttggtagcccttgtgccctgtgaattatcattctgatttacccaatcacactgtctagcaaactcaaattgcttaacactctaattattctgtatgcgacatgaaaggagagcaatttcttactggccaattattatagaaaatacgtggttctatttttatttgtttttaatgttgaatgataaaaaagcaatatattagataagatggcaaattaaaaagactttttgtgtaaatactgtattatatttgtttatattgctttggtttccctctataatggaggacatattcaggcttaaagaatacctg

SEQ ID NO: 2611 - DNA, 4825 bp, Homo sapiens
aaactaaatcttttgttcaccagctgctcagcttttcagtctgggtctgagctgaaacctgctgcaagtctgacggtaccaaattacatatatatctgtcaaaatgatgtaggacctaaagtctctctgtaagttgatccttttgaccccatgattaggagcttcacaatgtggtaccacacctggaaacctccagaacaagatctcaaggaaacacaggaaattcctgaaacagcaaaaccccctatgtgaagacgtctgttattcctttgtgtatcaggagcatcactgttaattaactgttgatacacttaaaacagcttggttggcaatgtcctttttgaataaagaagagccaggtgtgtttttcaggatgaactagacaatgctgtcacaagtttacctctacatcttattgccttggaaaaatttcctgcatatcgtggcacaagatggttggctctccaggcagcagttggcgttgtgaatcagtcatctcagcatgtgtctccaagatcccacagcagggggaaaaagaggtggagggtcacatgcctggtgttacatactttgaggcagaggtggtaggtgccatttctgctcacagctcatggaccagaacaaagccatgcatacctgagagaggaccagaaaatattctgaagcagatggctatttggtgagcagtaaatgtttctgttacaacaggtcttgacaaacttcaaatgtactcctactaggcctacttcacaccactaaactctgtacttcctgttgcttgatggcatcttatgctgatgttttctatcatagtgtccggcacaaaacaagagctcaatacatatacttaatagcgcatttagatctaagagtttcactttatcaaaagattttagtacctacgtagctattgggccacatcaggaaaatgtaactgcttctacaactgcaaagaaaatttaactaattgtatgctcatcccagcttcaggtttttgttttgttttgtttgctagcttctttttatttcataatttttgctttgttttctgcccttgagcagaggttcatttctagttttcactggaattagaacaacagttgtgtccatatgcaataacagtgtttcaaattctttggggatttgcccacagtgtctgcagtcatattgtgacaccagttgtgatgccagtctctgtaaatcagacttattcccagtgagacattatatatttttgcagccaatacgatctattttatagcgatttatagcattgtctctgaaaaggatactttgatttgtgtcttgtttttgtcagttttcaacactttgattgtggcccaggttaattaatattttgtgtctaggtttcctcatctctaaaataaagatgtttatttctatagcttcatgttgacaattaaattatataatttatgttactcaactagcaagtaaattgatgtacagtgtatttataaatgatagatactatctttatgttaatttttattattgtcatcattatcatcaattttcaggtccgtgttctgactaaaaggaagccacactctgtcgaaaacaagctttgtaagaaaattttgaagtatttacttatatctaaccattcattccaccttttctcccaaataacactctaatatcttgagacatcttgtctagggccagatttcataaatgcttgtgaggcaggagaataagttccagaggcagttcacactgcctaaagccaattcacactgacttcctataactaaatctaaaggaaaatctcaactttcctcgcccaagtaacaaaagaatcagaggttatactccctttgcaacctgccccttttctgcctggcagatgaaaaatgaaaagtacctatgactggtcccctcccacgaccagccagactggtcacggatcactacttcatttacatagggcgtaaaccgagtaaccaatgggaaacctctagagggtatttaaaccccagaaaattctgtaaccggtggtctccagcaggttgctcaatcttgctgccactctgtgggatgtacttttgtttcaataaatctgtgctcttccttcgtggttttgtttgtgctttttgtccaactctttgttcaaaatgccaggaacatggacaccctccacaggtaacacttgttgatcaaataaataatatgctaatgataaatgtaactttagttatcaacatttttaattaaatgattatacatttaggttgtacatatttcacttggcttttccacttccttcaaagtaatagtaaaacaaagaatataaaacccggaatttgagatgcctgacaaaaatgcttcatatggccaaaagaactattaaattctaaagaaaaagccatatgtcatttcttacctaaagcactttggaaacacattgtagcacacagctacgtaaggacagtgagaaccagagctatcaggatggacacaccctccccttacagccctgagtggcacctacaaagaaacaaatggatcttgagacacaacctaaaaaccaagcactaatttctccaatatatgtaatacagccggtgaaatggcccctcaaatgccatacctgtgttttcttggtctattaattcatttgataggtacattcttggggtaaatatttgagcaactttattttccttaatttttgtcttcagctatttagttattaattccttccagttttctaagttttgtttaatatataaatatagaaactataaatgtagaaatacttctaatgcagaaaatttaatctaatacccttgtatttatcaagagtcaaaaaaaaagggacatctctgtaaggcctgaacagcaaaatgttacttagtggaatctagaaaaatcaaatccccatagaattcagtgctagaaaaacagagcctaacaaaaagggaacaaaggacatgaattactgcattatcaaagtagaactatttatgatcaagaaatattaaactactggaaacttacttgtaataaaaatgaaagttaaaaaagatagcattttccacctatcaaattgataaccattaaaaaacaaataggttatgatgaaaaggattttgaataaatgttttacactagagtgtaattaggacagattatctagtggaaattttaggagtaagtaaaatgtttaatccaataattgcagatgaattaatatagtgaaaggaaataattagatatatcaaatgacgtacatacaattgtatctctgaagtgatacttattatattgaaatatgtcaaacaataaaaatggattaaataaattatggtaaatcatgataagtacagcctattaaaaatcattaaataatagagaatatgaaaaatcaatcatgatataatgctgagaaagaaagcaggttacaaccatctgattcaaacacactcacaccatacatgttttgttgtatttattatatatatatttgatttcaaagacacactcaaaatgacaacaatttgagcttattaatactatctctagttggtgagattagtggatatttgtattgtttctaacagtttcaaaatagttttataattgtttatagtgaatgtgtacactttattatcaggaaaatgactttgttatttctaaatattcctatatattagaaaaaaatctgtagtggctgaagtcaacttttcacatgttaaataagtccattacgtatagacaccatcatcacgtaattattcattggccagcagctgtgttaaaggcattgattctctttaatgaatctttgcctttgaaactattgtttctctttctaaataacatccattactctaaaattgtattgttgtgctacctccagtttggcactaatctgaaccaactcaaatgtgaaggattcaatggtctgcctctgcagtaaggtgaagcatatggcgtgcattacacttaaggtcaagagtttatactggctggttggtagtatctgggggtataaaccagggtgttatcttggacaaatatagttatttaatagtttgaattatggtaaattgaaaccaattcttctcccatgtgtaaaagttgagactggggcagggacatttttgggttttttgctatgatagggtctaatctttagtgggagtcagaatggcagcaagtgttctcaaatgaagggatgacaaggaaaagttcagagtatcacatgacaccttctattacctatgaggcacgggctgctgcagtgctaaagcacaagtttacagagtttcagggtcttgagatttttacaccaaatttcaaacaagactcatagtgttacttttgctcctgagttgataccattttgcaaaatacaaatatttaactaacaatccaaaaataagcacattcaaatttctaatacataaccaaagaaatagtttttcattaaaaaacacagtttaacatccgtttgtagtaaatatcctcttcctctccctatccctatccttatcttccaccctcttattcacttacctcttctctctctctctttctctggcaaatgacttagatactgttattgatgtctctaatatgaaaatactcttggcataatgagagcttaaactgtacttaaagtccactgaaatgtaaagttaaaaacaaatcttagactcagatggaagcgactttagagatcaactgattcaatcctctttatttaaaaagaagaattcaggggctatttgtagcatatgaatgatctataaagtcacaagttaaattagaaattagtagtaatttgttaagaggc

SEQ ID NO: 2612 - DNA, 55608 bp, Homo sapiens
atatatacatatgtgtgtgtgtgtgtgtgtgtgtgtgtgtatatatatgtattttttttttttgagatggagtctcactctgttgcccaggctggagtgccttggtgtgatctcagctcactgcaacctccacttcccaggttcaagagattctgcagcttcagcctcctgagtagctgggactacaggcgcatgccactgcatccagctagtttttgaatttttagtagagatggggtttcaccacgttggacaggttggactagaactcctgacctcaggtgatccacccgccttggcctcccaaagcactgggattacaggcatgagccacggcgcctgaccagaacagataattttcaaaacaagacatacaagtgaccaaaaaacatgaaagaaatgctaaccaggttgttaaccaggatgcaaagaaaactgaatgcttatacactgttgttgggaatgtatatcataacaacctttatggaaaacagtatgaagctttctcaaagaactaaaaatagaactgccattagattcagcagtctcaccactgggtatatacccaaaggaaaatctatatataccatggaatactattcagccatagaaaaggatgaaatcatgtcttttgtagcaacatggatgggactgaaggctattatcctcagtgaaataactcagaaagtcaaatacagcaagttctcacttattgttgggagctaaacaatggatacacatggacatacagtgtggcataatagaccctaaagactataaaaggtgggagggtcaaagttgggagagtgttgaaaaactacttactggttacaatgttcactattcagacaatgggtacactaaaagcctagacttgccctatacacaatatatacatgtaggaaacttgtaactgtaccccctaaatatatacaaattaattaattacaaaaaatattatgttgtagtgttaactggtatatcttgtcttgggaaaatatggcagctcctatgaaacatctcggaaaatttgtaactgatgttacaaaacacccagaagaaataagtggtctggtgagaaaacttactcatctttgcctacatatgtatacatgagtaatttgattacacatttgtgcgggataatataactgaaaagaaaatgtaaaatttaacttaaattgtatttgtaagttgtaatttcattaattctgcattattgaagtacatgtaggaaaggtgcagaaatgcatcaggcagttaatacaaatacgttttttttttttttttttttttttttgagatggagtctcgctctgtcacccaggctggagtgcagtggcgtgatcttggttcactgcaagctccgcctcccaggttcacaccatcctcctgcctcagcctcccgagtagctgggactacaggcgcctgccacctcgcctggctactttttgtatatttagtagagacggggttcaccgtgttagccaggatggtctcaatctctatacctcgtgatccgcccacctcggcctcccaaagtgctgggattacaggcatgagccactgcgcccagccaatacaaatatgttttgctcaattttgtaatgtttatgctaccatcagttttttgaaatatgtaacttttactttttttcttagagtcctccaaattatgtttcaggctccttaaaaactttttatctatccctgataaatattcctcaataataattttaaaaatccatttggttaaatgaacatgaactctaagtcttttaaccagaaataagctattaggttgatgcaaaatatttgcattttttgccattgaaagtagtggcaacaaagaaataaaattgtatttttggaatagttttctcttaagctcttgataataaacctgtaagtattaactgccttacaaatggcaaaagaggccacttgaaggaaaggaaattccttaacaggactttccttagcaggaaagttagttgcctgggtcatcatttggataagaaaaaaatccattaaaaaatggcagtattattagtatcatatgcataattacatatataaaacttgccatatattgtgtgaaatatagttctttagtataggaaaaatatattgatatctataaaggtaaaattattttaactctttcacatacatgttatttgataaaatttgctttcgtgttttttctttgtcaggtttcattgatactcaaaattcatttcctttgacatagctcaggagatttgttagtaaaaatctcacccaaattcataagaattttccaataaaatatttcagaaatgaaacattttgaaagaattggtcaattatcactttctgctagatagagcatgatagtttggtgtatattttaatatatcagtgatatagtttggatattactccccacccaaatctcgtgttgaactgtaatccccagtgttagatgtgaggcctggtgggaggtgtttgggtgacaggggcaaatcccttatgtcttggtgctgtcctctagatagcgagtgagttctcttgaggtctggttgttgtaaagtgtggcacctccactcccaactctctctcttgctcctgctttcgtcatattaagtgcccactcctgctccaccacctgccatgatgataaggttcctgaggcctccccagaagcaaatgccattgccaagcttcctgtacagcctgcagaactgtgagctaattaaacctctttacttataaattacccagtgttgggtatttctttatagcaatgcaagaaaggcctaatacagaaaattggtactaggagtgaggcatggctattaagatatctgaaaatgtgaaagcaaattaggaactgggtaacaagcagcagtccaaagagtttgaatggctcagaagacaggaagatgaaggaaagtttggaacctcttagagactggttaagtggttgttaccaaaatgctgattgtgatatgaactttgaagttcaggctgctgaggtctcagatagaaatcagaaatgtattgggatcaaagattatgcatattatttcttagtaaacagcttggctgcattgtgtttatgccctagagatctgtggaagtttgaagttgagaatgatgacctagagtatctggtggaagaaatttctaagcagcaaagtgttcaagatgtggcctggatgcttctaacaacctatgctcagatgtaggcacaaaggaatgacttacatttggaacttacatttaaacaggaagcagagcctaaaagttcagaaaatttgcaggctgatcatgtggcaaataaataaaaaccttttacaagagagaaactcaagcaggctgttgagcaaccatttgctagagatatctgcataactgaaaaggagccaaatgctaatagccaagacaatgggaaaaaggtttcagtgacatttcagagaacttcctggcagcccttcttaccacaggccctgaagcctaggaggactgaatggttttgtaggccaggcccagtaccttgctagcctgcacagccttgagacacggctccccaaattctggtcactctggccccagcctcagctcaaaggggcactggtaaaacttgggccatcacttcagaggacacgagctataatcattggcagattccacatggtgttaagcatgtgggtgcacagagtgcaagagttaagaaggcttggtagcctctgcctagacttcagaggatgtatagaaaaggctggtgttcaggcagaaggctgctgcaggagtggagccctcacagagaacttctagtagagcagtggggaggggaaatgtgggtttggaagcccacagagtccccagtggggtattgcctaatgaagctgtgagaagggggccaccatcatccagaaccaagaatggtagatccattggcagcttgcactctatgcctggaaaagctgcaggcactcagctgtagcacttgagaggagccatggggctacatcctgcaaattcacaggggaagagctgcccaaagccttgggagcccaccccttgcattaacgtgccatggatgtgaggcatggagtcaaaagagattatttcagagctttaagatttaatgactgtcctgctagttttcggacctgtgtgagctctagtccctttctttgcctgacttctttctcttgtaatgggaatgtttacccaatgctggcaccctcattgtatcttggaagtaaatgacttgttttgattttacaggctcacaggtggaaggaactcattttcagatgggactttggacttgggacttttgattgagttgttgcagaaatgagttaagattttggggaattgctgagaaggcatgattgtattttgccatgtgaaaagaataggtaatttgggggaagacaagggtagaatgatatagtttaggtatttgtccacactgaaatttcatgttgaattgtaatccccaatgttggaagtgtggcctggtgggaggtgtttaggtcatgggggttgatccctcatgtcttggtgctgtcctctcaataatgaatgagttctctcaagatttggttgttgtaaagtgtggtacctccacccccaactctttctcttgctcctacattcaccatgtcaagtacctgttcccactttgccttccaccatgattgtgaagttcctgaggcctctcggaaagcagatgccagcactatgcttcctgtacagcctgcaaaactgtgagccaattaaacctcttttcttataaagtacccagtctcaggtatttctttatagcaatgcaagaacagcctaatacaatcagtaaatatgtcagattctacaatgaggctactataatgtgaagatatttttcttaatcatttacatttacaaatagactaaaattcttgttttatgttattgtcttagttcattttgtgctgctataacggaatactacagactggtaattaataaacaacagaagtttatttggctcatgtctctggagattgggaagtctaagactgaggggcctcatctagtgaaggtcttgctatgtcataacataacatggtggaagtcatcacatggtgaaagcatgtgtaaaagaggaagacaggagaactcatactcttatcaggatcccactcccacaatatctagccctctcccaggataacagcactgattatcttagaagggtctcaactctcaggactgttgcattggggattacatttcaaacacgtggatcttgggagacacatttaaaccacaacagtgatgttttgaataataaatatacatctacaaatgtgtttcttccacctggcaatgccttcttctgatagttttattctgcaaatttcaattattcaaataaaatttcctcattggccctctttaacactttttcctctgaaatcttatattacttgttgctttacaaatactctttaaaaattattccacactggtatctaaattcttccttttttcccagtcttatcttcccaattggcttttaatttccatcaggaaaggatccatgtgttttgacttcttggtactgctcacagtaatacgtaaataattaagatttaatataattgggtttaatttaatttcatgtagattccaattgatttttccaattagatgtgtgagatttttattcattaaaatacgcaattatactagcatccatttttacttgtccaaagaatgagctaagatttaagttatattttgcgatcttgagatacatttcatatgctcttcgttgaatcacttttctattcatcttcaaattccagctataaaatatgatatgcaattgtcttagctcagattgatcacaaatccttgttctacaagataccatgtattcatatattcataaaaatatcaacagaaataatatattaataaatatttaagtatgtaatttcagaaagagatggtaatgtatcaggacagattttagttaggagacacaatatgcttatccgagcacaaagttggtttttatcaattgatgttagtttttgattatatactatatgtaagttctctatttataattataattttctcattaataataataataaatcatacctatattgtaccttgaaattatcaaagcccctttcatttccacctcattttctctctttctctttttctctttctttttccctgttcttttagtctctgtctctccttcagaaaaaatatcagttacttagcaggacatatattattgtttccatgttacaggttggaaatgaaatttcaaaggaataagttattttttatggtcttatagctaataattattaataattgatatatgtaggattgggatcccaaggtttaactcctaatcatgtgacttcagacaaaaaaacgtagaaataacagtttttctggattgttacatggggtcttaggcaatttgagtcattataacaaagtaccataaactgggtagttttaaacaacagagatttattttgcagagttctagaggctacaagtctgacatcagggtgccagcatggttaggtcccagtgagggtcctcttttgagtagattgctgccattttattgtctcatcacagggtgaaaaacaatgtgagctagctctttggcctatttttataagggctctaatcccattcatgagggttccaccctcataatgtaactacttcccaaaagccctatctccaaataccaggatactggggattcgattttaacatatgaattttgggggaaaatgaacattcactttataacacatagagagtgaggtagtctggataaatgatctagcgtgttcactcataaatgttattttcatgctccttttctaagccttttctattataacagcaatgcagtttgtaactttaagaattattccatgtagaatgtaaattgatatagccattatagaaagcagtgtgaagggttgggcatggttgctcatacctctaatcccagcactttgggaggcctaggtgggaggattgcttgagcccaggtgtttgagaccagcttgagaaacacagaagggcctggtcactacaaataataaaggaaaattagccaggcatggagatacatgcctgtggtcccagctagtcaggaggctgaggtgataaaggctgcagtgagttgtgatcgtcaccactgcactctagcttgggcgacagagtgagaccctgtctcaaaaaaaaaatcaccaaaaccaaccaaccaaacaaaaaaacacacaacaacaaaaacagtgtaaagtttcctcaaaaaataaaaaatacaactaccatatgatccagaaattccactactatttacccaaaggaaatgaaatcagtactttgaagagatatctacattcctatgtttattgcagcagcattcacaacacacaagatatggaatcaacccaagtgtccaccagtgaatgaatggataaagaaaacatatataggcaatggagtacaattcagctgtaaaaaataatgaaaccctgtcattttcagcaacatgaaggaaactagaggacatgttaagtgaaataagccaggcacagaaagacaaatagcacataatctcactcattgcggaatctaaaaaaaatatacatcaatagaaatagagagtaatatagtgatttccagaggttggggagggttgggaaagagggaatggggacagattgatcaatgggtacaaaattacagttacgtgggaagaatacattttggtgttctatagcacagtagggtgaatatagtaaacaatgttatggtgtatatttcaactacaagagaggattctaaatgtctcatcacaaagaaatgataaatgtttgaggtgatgaatatgctaaataccatgctttgatcattatacaatgtatacatgtgttgaaacatcacaccgtactccataatatgtataattactatgtgtgaattataaacaaaatatcattccatgtaatgtgaggaaattgtttctctttgaaaaaaatgtagctatcaacaatactggtaaaagcagatgaagaagcaaaatatcaaaaacccataatcctgcaagagccttaacaagattaaatatttgattatttctaggacacaggaccttttaaaacatttcctgttgttctttggatggtccactgtgggtagtttgaaacagtctacgagacttctctctgtatcaaaggaagcaatgagatcagagtaaaaatatcagagaaagattttttaaaatgaattaaggaaggtaaatccaagcagagtttttataacattcacaaaagcatgtagctttgtgttaaatcgtgtttttaaaaaatattctcttcttgcttcgtatctttgagtcagaaagctggatgtgtgtctaaacaaactaggcaatgctaataccaagaatcccggaaaatgtgctaaattcactattctatgtaagtttgctcagatggtggagaaagtgcattaaccagtactgcaaactgaatcttttgtgtgtgtgtgtgtgtgtgtgtgtgtgtgtgagagagagagagagagagagagagagagagacagagagagagaaacagacagagaaagagagagagagaagatatttgaaaaaaatacaagaaataaagaaagaaatattcaaggaaatagatagcatgaatgaaaagcaatctaaacttcaggtagcaatgaacacacttacagaatgcaaaaggctctggaaagtctcagcaatagaattgaacaagtagaagaaagaatctgagctcaaagacaaggtctttgaattaacccaattcaaccaagacaaagaaaaaagaataagaaaatacaaacacagcctccaagaagtctggaattatgttaaatgaccaaacataacaataatcagtgttcctgagaaaaaagatgaatctaaaagtttggaaaacatatttgggggaatcattgaggaaaatttccccatcttttctagaggcctaaacatcctaacacaagaagcacaaagaatacctgggaaattcatcacaaaaagatcatcacctaggcacattgtcatcaagttatctaaagttaagatgaaggaaagagtctaagagctgtgagacaaaagcaccaggtaactgtaaggaaaacctatcagtttaacagcagatttctcagcagaaaccctacaagttagaagcgataggaaccctatcttcagcctcctcaaacacgacaattatcagccaagaattttgtatccagttaaactaagcttcatatatgaaggaaagatatggtgtttttcagaaaaacaaatgctgagagaattggcactaccaagccaccactacaagaactgttaaaaggagctccaaatcttgaaacaaatcctggaaacacatcaaaacagaacctctttacagcataaatctcgcatgacctataaaacaaaaatacaatttaaaaaacataaacaaaaatttaaaaaccaaggtatacagacaacaaatagcacgatgaatggaatggcacctcacatctcagtactaacgttgcctataagtggcctaaatggtccacttaaaaggtacagaactgcagaatggataagaattcaccagccatctactgccttcaaaagactcacctaacacataaggacccatgcaaatttaaggtaaaggggcgaggaggggaagacatttcatgtaaacagacaccaaaagtaagcaggagtagctattcttatatcagacaaaacaaactttaaagcaacaatagttaaaaaagacaaagagggacattatataatggtaaaaggccttgtacaacaggaaaatatcacaatcctaaacatatgtgcacctaacactggagcttccaaatttataaaacaattactaatagacctaagaaatgagatagacagcaacacaataataatgggggacttcaatactcccctgatagcactaggcagttcatcaagataaaaagtcaacaaagaaacaatggatttaaactgtaccttggaacaaacggacttaatgtatatgaaacattccatccaacaaccacagaacatatattctgttaaacagcacatggaactttctctaggatagaccatatgataggccacaaaacaaacctcaataaatttaaaaaaattgaaattataccaagcactctctcagaccacagtggaataaaactgaaaatcaactcaaaaaggaaccttcaaaaccatgcaaacacatggaaattaaataacctgctcccaaatgataattgggtcaaaagtgaaatcaagatgaaaattaaatattattctaactgaatgacaatagtgacacaacctatcaaaacctctcagacacaggagaggtggtgcgaagaggaaagttcacagccctaaatgcctacatcaaaaagtctggaagaacacagacaatctaaggtcacaactcaaacaactagagaaacaagaacaaaccaaacccaaaaccagcagtagaaaagtattaaccaagattaaagcaaaactaaataaaattgaaaccaaaaaaagtacaaaagataaatgaaacaaaaatctgtttctttgaaaagataaataaaatggatagtccattagcaagattaaccaagaaaagaataaataaaatccaatcgagctcaataagaaatgaaacgagaccactgaaattacaactgacaccactgaaatacaaaataccattcaaggctactacgaacacctttatgtgcataaactagaaaacctagaagagatggataaattcctggaaagttacaaccctcctagcttaaatgaggaagaattagataccctgaacatactaataacaagcagcaagatagaaatggtaattgaaaatattaccaacaaaaaaaatccagggccagtttgattcgcagcagaattctaccagatattcaaagaagaattggtaccaattctactgacactattccacaagatagagaaaaaggcaactctccataagttattctgtgaagccagtatcaccctagtacaaaaatcagaaaaggacataatcaaaaaagaaaactatggactgatatctctgatgaacatagatgctaaaatccttaacaaaatactatctaatcaaatccaacaacatatcaaaatgataatctaacatgatcaagtgcgttttataccagggatgcagggatggtttaacatatgcaagttagtaaatgtgatacaccacataaacagaattaaaaacaaaaatcacttgatcatctcaatagatgcagaaaaagcattttacaaaatccagcatctctttatgatgaaagctctcagcaaaattggcatacaagtgacatatctcagaataataaaagccctctatgacaaacccacagccaacataatactgaatggggaaaagattgaagcattccctctgagaattggaacaagacaaggatgcccactctcaccactcctcttcaacatattactagaagtcctagctagagcgcagacaagagaaagaaataaagggcatccaaactggcaaagaggaagtcaaactgtcgctatttgctgatgatatgattgtttacctagaaaaccctaaggactcctccagaaaacccctagaactgataaaaaaaattcagcaaagtttctggatacaagattaatgcacacaaatcagcagctcatcaatacaccaacagtgaccaagctgagaatcaaatcaagaactcaagaaatctccacactgttcaaatcaagaaatcaagagccccttttacaatagctgcaaaaaatacaacaacaacaacaacaacaacaaacttaggaatacacctaacaaaggaagtaaaagtcctctacaaggaaaactacaaaacactgctgaaataaaccatagatgatacaaacaaatggaaacgcattccatgctcatagataagtaaaatcaatattgtgaaaatgaccctactgccaaaagcaatctagaaatccaacacaattcccatccaaatacaaccatcatttttcatggaattagaaaaaaatctaaaattcacaaggaaccaaaaaagagctctcatagccaaagcatggctaagcaaaaagaacaaatctggaggcatcacattacctgatttcaaactatactgtaaggccatgatcaccgaaacagcatggtactggtataaaactaggcacatagaccaatggaacagaatggagaacctagaaataaagccaaatacttacagccaactgatcttcaacagagcaaacaaaaacataaaatggggaaaggatacccttttcaacaaatggtgctgggataattggctagccacatgtaggagaatgaaactcgatcctcatctctcaccttatacaaaaatcaactcaggatgggttaaggacttaaatctaagacctgaaactataaaaattatagaagataacattggaaaaatccttctagacgttgacttaggcaaggatttcatgaccaagaatcccaaagcaaatgcagtaaaaacaaagataaattgctgggacttaattaaactaaagagcttttgcacagcaaaagaaacagtcagcagtgcaaacagacaacccacagagtgagaaaaaattttcacaatctgtacatctgacagacgactaatatccagaatctacagtgaactcaaacaaatccataagaataaaaaaacaaacaatctcatcaagaagtgggctaaggacatgaatggaaaattctcaaaagaagatatacaaatggccagaaaacatattaaaaaatgctcaacatcactagtgatcagggaaatgcgaatcaaaacaacaatgcgataccacctcactcctgcaagaatggccataatcaaaaaatagtagatgttggcatggatgtggtgatgtgggaacacttgtacactgctggtaggaatgtaaactatacaaccactatggaaaacaatgtggagattccttaaagaactaaaagtagaaccaccatttgatccagcaatccccctactgggtatctacccagaggaaaagaagtcattatatgaaaaagatacttgcatatggatgtttatagcagcacaattcgcaattgcaaaacctgacaccagcccaaatgcccatcgatcaaccagtggataaagaaactgtgagacatataaatacacacacacacacacacacacacacacacacacacacaatggaatactactcagccataaaaaggactgaattaatggcattcacagcaacctgcaagagattggagactattattctaagtgaagtaactcaggaacagaaaaccaaacactgtatgttctcactgatatgtgggagctaagctaagaggatgcaaatgcacaagaaggacacaatggactttggggactcagggggaaaggtggaagggggtgagggataaaagactacaaacatggtgtagtgtatactgcccgggtgatggatgcaccaaagtctcacaaatcaccactaaagaacttactcatgtaaccaaacactacctgtcccccaacaacctatagaaaaagaatttttttagttaaattaaattaaacagaaaaaatttaaaaaataaaaacagaagccacaggccaagtgcagtggttcacgcctgtaatcccagtactttgggaggccaaggcaggtgtatcacttgaggtcagaagttcaaaaccagcctggccaacatgacgaaactcccatctccaccaaaaatacaaaaattagctgggcgtggttgtgcatacctgtaatcccagctacttgggaggctgaggtacgagaattgcttgaacctggtgggggcagaggttacagtaagccgagttcacgtcactgcactccagcctgggtgacagagtgagagtctgtctcaatgaataaataaataaataagccacagagagacacacaggaagaaaggccatgtgaagatatagaaagattgaaattctgcatctatgagcaaagaaacattaaaattactggcagacaccaaaagtacataagagatgtagaataaattctccctcagagcctccacaaggaagcaacacttccaacaccttgattttggacttctgcactccagaaatgttagataatacatatctcctagtttacatcacttaatttgtgctaatttattatggcagccttgggaaactaatacagactcatgatgcctccatggcagccatccaaatgtttgctctgttggcttgcatgtgtgagttcttaagagaatcctagagagtttctctactgcatttcccaggtctggaaggtcacccttaaacttaactttcccttcctcttcattcctgtaacttggagtatatccaaagctcatgcggatgtcatcctcttgtcttgaggtaaattttaatatatggtgtgcagttctggcaagaaagtttagtcctttggtggcatcccactgatctttgagaaactcagaaattctcaaagtgccagatgtaaaaaacaggttgctctattcccttcacttctgtagctgtctccagttttcttgctctgctctaggagatctactgtctaacagacaactaactaggaggatggtatgccaggctttcttcttgtcagaaatccatttctaaaagtgtcatatgttttccaattttttgagaagcagctcccctgtccctttggggatgggagttaataatttttctctaagagcttatagtttctacaagaacaacaacctgatatctttatctccttaattccatactgactcaccttctttcctggattgggaaggaaagtggcattgtagctggtggtagagttaatgctggttctccaatcccataaattcaggagtaagtgtgggggaatgcaatgcttgccttaactgttaaccagctttctttaaaacgttaggtagttaatgcctcattgtcctcaaatttgggccagggttactgattcttgggcactggattacatttcccttaaccactagctatacatgcttaacacaaaatccctccactagcatcagatgagtttgtgggtttggaactttagagtgaaaaagcacttagcaagatttgatttcactatatatttgacattcaactcaactgttcaacttacctttttgtgaggtgagggaatttgactaaaatcagcaattgcttacccaaacgatttcaggagctagaaggaaaagtaaatgcaggaagtaattattttgaatggggactgtgaccagtttgagagtggtaataccaacctgagtcgttgaattttaggccttcttgaagcgagtttctaagctctgagagatgttttaatgtccattccacatttaaatgtccatatatccactctttatgggcaggtagataacatatgagggcatttttcccttgtcataatgtttgggagtgggtgctactagccattttagtaagtagggatcagaaatgtgatatatgcaattgtcctttgtctcccatgattttcaaatgatacataaggtattaacgcagaaactgttcatattaacttgagcataatccaaattctgctttatatagagcttagatagacagacagaagagtaaagtattttgcatattttccagaaatacaattgctatttatattgagtaactattgcactttattttgtttattgttttccatcattatctagattcagccaccctttcagaaaatcatttcagcgatagcaagttgctgatagaatttgagtccataacacttcacacttaagtcaggcagcatttgtagtttttaactcatgtgattatacagatagaggtcagcatctgactatttcatacaatcttctcatgtagtcatgcctgaatatacataatgaacttcagatttcttcttaatgaactgctttcttgttatttatacttaaatttcagataaggcattatatagactttttcaaaaagctatttgtgggaagatctttatatccatggtcttcatttcaggtggtaaagcatttattacaaagtactttttataaaaatggaaaattgttttgatagcactgctctatatccactgtcagaggtctacaaaatctcagaggtcatcaatattctaatgtatatatatacacacatatatcagtcttcacctatcccttggccatattctttaacatgttatggttctcaggctataatattctcttagtcaccaggggcctaaagtaatctggttttacttgtagcatagtaaaaacttcaacctgagactgactgccagaggacctattcatttgatggtttcctgagtaggtacagttttcaagtctagatttaatatgaaagaagtatagccccctaaatattgtgtatggttatttgtagatatattcaaaattattgttttgccatgattaaaatatttatgagactgaggagattttaaaatttaaactaataaattggatcaactcactgttaactggtaaagcattttcatcattataaagagaatgcatcatctaattttcaaatgttttatctttctaattgaatttctaattagcacatgctagtaaaatgaaaatattaatgagatcctcataggtgcttaatatagtgatatcaagtactatcatacatatgtgtgtatatatacatatatatgcatgtgcataagttctgaagaaaatttttattatgcaagataattaagtgtcatttgacataaaaattttgcaaagaggtaaaaagtggcataaaattaaagaaagttaattatctgatctttctcctttcggcaatttactttcttttgtccacagatcaatcatcctaatgctcatttctttaattccctttaattacaactgagaagtaagcaagtgagatagtaatttctactgaaatttccatgcttaatctgcaaatgtagtgagcactgatatagtcaaggaacagtgtggctgttgtgagaaatagaaaatggaggacaggaattatactcagtttcccccattattcagcaataatagaaaaagttaatttacattttcttctttaaaatgtacattttaaaatttcaatacatttattgaattgagcaacaaaagtaatgtgtagggtaggcatttctgtaactttttctccctattttgtattttcatttttctgtattttttctgtaaagttttgtatatatataaactaaactaaactaaacttggaggttgaaataaaacccagattgacactgtatatagacagcagtacaatccagaaggaatctctttatatggtcagtgagaaacatttctatttttaacactactaaggggctccactaatgaagtttgtctggcagaggatgtgacctcagtattttataacacagaaatttctcctcaaggtagaaagctggctcgaagaaacctgtgactgtcatgtccctgaggggtgctttagagttcatagcttcaggatatctgtgaagttctgaaattgcaggcaataatttaagcattagtccccatgtttgtgtgtgtgtgcatgtgtgtgcacacctgcatgatactttggggggaagtggcccatttggtatgatccagttctaaaatatgattatccatgaccccctcaaagcttaagatcccctgaaatttcagctttctgcttttttgcaggcaaagatctaatttctcctctcttttaagtgaattatcctgccctttaacaaatagtggcgatacgttattttggtctttacaatccaggaacactattggttttgacaggctttgctcaaataaagactagtttcacttcatttccaaggcattcaactctacccaagtgacatttgtgaaagccatatatttcatttgtgcattccaatgatttaatttagtaagctcaataagcttatctctagtcaaagataacatggcatttatgactgtagagtgcgtgattgaatgggattcttcctgcttcagtttcaacttagactccattttgttgttatcagacaccaaagatcccgtgagaaaaattgacatatggagattttaaaagacactggttgaaactcttaattccggaactctttcacgtacttaggaaatacgcaagagagtcatggtctcaagagaaggttttaagaaaggggttattaaaactattgctttggagagtgcacttcacatgcaggctgttccatcctcttttgggggagaggcattaggcaggggtttactttccagtcccaatattgaagagggtgggcttctaggcatccaattgaagatctttgaaatagtcaaaaaaccttgaggataagtgcctgatcccaacaaaggaagctaaagcagttagtgttctgaggtcttttcttcccaggaggtccaggagaagagagagggtctgactaacagtgctggtggctgagccgggagatgctgctatgttgagattggttcactttctcctagcttgtcaggacaccggatgtgtgtcctgattgtttctggtgaattggatgtgggctatgtggtacaggatcctcttgggcctgtccatttgggatctcaggagggataagggctgcaagtgtattgcgggatgcccttggacaagggaagggtcagaagaatccacatatagacactgatacgcccaagacaagggaatttcagacaagaggaggagcagggaactattcccaggctcctataatcaaaatcatgagacagagagagtagattttaatcatctgccaagtttatgaagaataccagcttcactgatctactctgtccagatagcacaaagccacccaaagtaaatgtggcacagagccaaacagcagcttgcaagtgcaggaagaaagggaactgcagagagtagatagtagaggcaccagataccaccttagcccattttcctcaagcatctaattggggaaaaaagagatttaaggctacatcaagattggaatattttgagtatctatcttgtaatggacattctaattactggactgaaaggcatttgcaaactaaagtgatcatattgtgatatattccctaagaatgtgcaaaaaaaaaaaaaaaaaaaaaaaaccttgggacctacctgagcttctattcagggatggggaagatggcctgtatgtcttttcctaacctaccatcccctaagtgggagagaaaaaaaaaaaggttgtactttattcatatctgaagaccagtctgattatcatatgagttacactgcttaacagaatccaagcagtaaatactatgattgataattgtggtgattaatactgaatgtcaacttgattggattagaggatgcaaagtattatgcctgggtgtgtctggagggtgttgccaatggagattaacatttgagtcagttgactgggaaaggtaaacccatacttaatcttggtgagcacaatctaatcagctgccagcatggccagaataaaaagcaggcagaataacatgaagactagactggcttagcctctccgcctacctctttctccagtgctggatgttccatgccctcaaacattggactccaagctcttcagctttgggacttcaactggcttccttgctcctcggcttacagatggcctattgtgggaccctgtgatcgtgtgagttaatatgccttaataaactcacctttatacatacatcaatcctattagttctgtccctctagagaactgtgactaatacagattttggtaccaggagtggttctagaggaaaagaatattaaaaatggagttcttttgttggttttcaggtttctggagttggcttcttaaagtgattagccataaaaatgctaaggactctaattctaatagtatggagaacagacagtccttggtgtgaacaatttagagagttattatgcaaaataaatgcatttgatactcttgattcaccgctcatgaaaggcaaggagtttagtgactcaatacctaatacctttgaccatatgtggagaaccaaggaacataatgaagttggttggttgctcctaagttcactggacagagtgatgaaaaaaaacgaactcagggattctaactaactcctggcttcagaagcagatactgagcctcaaatctgctaagattgccctgagtgagtcttatctcctgcagagaaagagctgaaattgtggaaaatcagacacaggctattaccatgtgagtggttgacctgcaacaaaaggtgcacgcacagcctcgccaggtgtctactattaaagtgagagcattgattggaaaacaatgggaccttgcaacttggaatggggatatgtgagaggactttgatgaagctggggacattgagcttgtaaactctgatgaaccttttctgccagaaggaacagcttccccatccccagtagtggtaacatcccctccccaacccatgctgctattagcctttccatctttgtctgaggagatgaaccctgctctgcctgaggcaagagtgatggcctcccctgaggcagttgctaggcaagataatgttgattctcctcaggagcccccctccccccaacacccctgcttgcttctagacttataactaaagttttggcaggcccctagaggtgaagttcagagtgtgacccacaaggaggtgcactacactcgaaaagaactccttgagttttccaatctatataaatagaaatctggagaacagatatgggaatgaatattaaggatatgagaaatggtagaaggaacatacagttggatcgggctgaatttattgatttgggcccattaagtagggactctgcaattaatgttgcagctcagggagttaataaaggttctaatggttaatttgcttcattagctgaaatatggattaaaagatggctcactgtgagagaactggaaatgcctgatttcctcccttggtttaatgtagagaaagggattcaaaggcttagggagattgggatgctggagtggattagtcactttaggcctactcatcccagctgggaaagtccagaagatgtaccttttaccaatgctttggaaaacagatttgtgaaggcagcacctgcgtctttgaagagttctgtatctgttgcttttctccggataccatatctaacagtgggaaccatagtcactcaacaacaaaatttaaatgcaatggggataattggaacccaaggtggcaggagccaagtggtggcactcatccatcaaaggcacagtgggcatagctaccatcatggacaacagaggcaaagcagcaatcgggatagattgatttgtgtagagctctggcattggctagttaatcacagtgatcctagaagtgaaattgataggaaacttactgcattcctacttaatttaaataagcagaaaacttccaggccgaatggacaaaagactaatttgaattataaaaacagagcatcatggcccctcaattaattttcagactagagccagtttacagaaccctttgcatgaaggggaggccaggtccccttgaggaaggaccccactacactaccaacaatttatgctgttaatctttctcccatccttccccaaagggacctttggcctttcaccagggtaactgtgcatgggggaaaggaaatattcagacatttcagggattattggacactggctctgagcagacattgattccaggggacccaaaacatcactgtggtcctccagttaaggtagggggttacggaggtcaggtgattaatggagttctagctcaggttgaacttacagtgggcccagtgggttctgggactcatcctgtggttatttcccctgtgccagaatgcaaacttgacatagacatacttagcagctggcagaacccccacattagctccctgacttgtagggtgagggctattatggtgggaaaggccaaatggaagccattagagctgcctctacctagaaaaatagtaaatcaaaaacaatatcgcatccttggagggattgtggagattagtgacaccatcaaggacttgaaagacacaggggtggtgaaccccaccacatccccattcaactctcctatttttcctgtgctgaagacatggatcttggagaatgacagtgtattattgtaagcttaaccaagtggtgactccagttgcagctgctgtaccagatgtggtttcattgcttaagcaaattaacacatttcttggtacctgatatgcagccctttatttgtcaaatgcctttttctccattcctgtctgtaaggctcaccagaagcagtttgccttcagctggcaaggccagcaatatagctttgctgtcctgcctcaggggtatatcaactctttggctttgtgtcatagtcttgttcagagagaccttgatctatttgcccttccacaagatatcacactggtccattacattgaggactaaactctgatttttttttaacttgcccaaattcctatctaagctatctggtgagtcatgccctacaaatcatacattctcatcagatgggttttatttaaccctatatatcgtaactttccaacctgactctggcataacattactagacaaagaagaaaatcaaaatattttacccccaaaacacatttctttgatatattttgaagtagccctggaaagctgttctttgttgggggaaatttgcatatgtaaagaatctctattaacatagctagatttttttcttccagactctctcaatcctaaagaaattaactaaaatctgaataggaaacatttgtcatctgttgtctcgaagggcagccagtataaggcttcaaaataaccttagtctccacaatcttttatcttaacctgaacattccctttctatcaatcccaggtctttagacacaaacaaccaattgtccagcagaaaatatttaaattcacctatagcctggaagcccccactttgatttgtcttgcctttctggaccaaaccaatgtatttcttaaatgtgtttgattgatgtctcatgcctctgttaaatgtatgaaaccaagctgtgccccgaccaccttggtaacatgttctcaggacctcctgagtgctgtatcatgagccatggccactcgtatttggctcagaataaatctcttcaaatattttacagagttcaactcttttcattgacaacattatgacattatgctgattggatccagtgagtcataagtagcaaacacactgggctcatgctcatagaattcatcttaccatgttccccatcatcctgaagaagctggattgatagaactgtggaatggccttttgaagtcacaatgataatgccagctaggtaacaatactttgcagagctggggcaaagttctccagaatgtcgtgtatgctctgaagcagtgtccaacacatggtgctgtttctcccatagccaggattcacaggtccagaaatcaaggggtggaagtggaagtggcaccactcaccatcacccctagtgacccactagcaaaatttttgcttcctgttcctgtgacattatgttctgctggcctagaggtcttagttccagagggaggaatgctgccacctggagacacaataacgatttcattaaactgggagttaagattgccacctggacactttgggctcctcctaccttaaagtcaacaggctaagagggggtaactgtgttgactggggtgattgacctggactatcaagatgaaatcagtatactactccacaatggaggtaagtaagagtatgcatagaatacaggagatccattagggcgtctcttagaatcaccatgccctgtgattaaggtcaatgggaagctacaacagcccagtccaagcaggactacaaaatggcccagatctgtcaaaaatgaagatttcggtcactccatcaggaaaaaaaccccatgacctactgaggtgcttgctgaaggcagagggaatacagaatgggtagtagaagaagatagtcactaataccagctacgaacacatgaccagttgcagaaatgaggactgtaattgtcatgagtatttccttattcttttgttaaaaacatgtttgtgcatgtatacacttgtactagaaaatttcttcattttatttccttttttcctttatcatgtgacataagatttattgacttcatatcagcgtttaagtgttgttaattttgtgtaatagcatttgggttgtggattggtgcatttctggttgtattttgttaggtgtaattatgaccttattattgtctttatttgaagattacatatgatttcaggaaatgtgtatgaattcaagttgacaaggggtgaacttgtgatggttaatactgagtgtcaacttgattggactgaaggatgcatagtattgttcctgggtgtgtctgtaagggtattgacaaaggagattaacatttgagtcagtggactgggaaaggcagactcacccttaatctgggtgggcacaatctaatcatcggccaacacagctagaataaaagcagacagaagatcatgaaaagactacactggcctagcctcccagcctacatctttctctggtgctggatgcttcttgccctcaaacatcggactccaagttcttcagctttgggacttggactggcttccttgctcttcagcttggagatggcttactgtgggaccttgtgatcgtgggaattaatactctttaataaactcccctttatatatacatcaattctattaattgttctgttaatagttctgtccctctagagaaccctaatacaataattcttttttttgtttgtttctttttttaattttttattttattatactttaagttttagggtacatgtgcacaacatgcaggtttgttacacatgtatacatgtgccatgttggtgtgctgcacccattaacccgtcatttaacattaggtatccctaatgctatccctcccccctccccccacccacaacaggccccggtgtgtgatgttccccttcctgtgtccatgtgttctcattgttaaattcccacctatgagtgagaacatgtggtgttttgttttttgtccttgcaatagtttgctgagaatgatggtttccagcttcatctgtgtccctacaaaggacgtgaactcatcattttttatggctgcatagtattccatggtgcatatgtgccacattttcttaatccagtctatcattgttggacttttggcttggttccaagtctttgctattgtgaatagtgccgcaataaacatatgtgtgcatgtgcctttatagcagcatgatttatatatacccagtggtgggatggctgggtcaaatggtatttctagttctagatccctgaggaatcaccacactgacttccacagtggttgaactagtttacagtcctaccaacagtgtaaaagtgttcctatttctccacatcctgttgtttcctgactttttaatgattgccattctaactggtgtgaaatggtatctcactgtggttttgatttgcatttctctgatggccagtgatgatgagcattttttcatgtgtctgttggctgcataaatgtcttcttttgagaagtgtctgttcatatccttcgcccacttgttgatggggttgtttgtttttttcttgtaaatttattgcagtttattgtagattctggatattagccctttgtcagatgagtagattgcaaaaattttctcccattctgtaggttgcctgttcactctgatggtagtttcttttgctgtgcagaagctctttagtttaattagatcccatttgtcaattttggcttttgttgccattgcttttggtgttttagacatgaagtccctgcccatgcctatgtcctgaatggtattgcctaggttttcttctagggtttttatggttttacgtctaacatttaagtcttgaatccatctcgaattaatctttttttaaatgaaatattccttttttttctcagtgccatagataatagatgggtggactgtaacagtacctagttttcagctgaagcattttaatctccatcatttccactattaaaagaactaaatcatgcctgcttaatacgtcgtgtgtgttcgatactatttaggttatataatagtatagctcatttgaaacttagtgattctcagaaaaatctgagtattgcttatgttactaagagtttgtcatctggggtcaatacttatcatgccatattgctgtgtcccctatctcccattggagatgagaaaactctgacttttagtgtcagactgtctggaaatcacaatgtgaaattatcttctaaactaattcagctaaatcacatttaatatcagattttagtgactttctcatgactgtttatcaactcccaaatgactctttaattaattgtttctcctttactggctcattttctgtcagatccctttccttagagtgttgttttatccctgtgtggcagaaagactgtctgagattgtgctgttattaaatgtagtctggcataatttaagcacattaccttgatgatggtgatgtcactcaggtacttggcctacaaggagctagtacaatttcacttatttcattttaatggatccccttggttttgagcctataaactaaaataccattgcagtaccctccctccagcaatctcaaacttaattattccactccaggaagctgtctgatggccctgcagagacctgtttttgcactaaaacgcaatcccttattgtgtgacaaaattacttttgtttcatgttcttttctttatttatttacaaacagcatggaaaagcacttctcagcacaacttaataggtgattaccacaaatttgattttgagatttagattgaatagttgttaaagttttctttgtattctttcctttgtaatcatgatgacttcttaaatactattccaagtactgggcattgtgggtaatgtggcataaattgccaagatagctgactcaaatcttttcccctacttagttttgatattatttattaagtttcatagcttggatgacacctcttataagcccatctctaccaatatcttttttgctgctttgagcaaatttagttttctaagctaaaatttctaagtggttttgcagaaagcagaaaagacagagacacattgcagaaaaaggtgtggaaagattagagattcatagatgttgccatttgcagtacaaagttatctatgacaatggtcagtaatatatttcataaatgatcaaaagttttcacttacaatttcaacattttcacaattgtataataaccaagaaatacttagttttgttcatagtcaaaaagaaggttgaattgagagccagaaactctgtagtattttgcaagggacatatttgtctctagtcatcactttggtctatggggactaataggaaacgaacttcgtgcttctgtcacattttttgaagacaaagggacagcccatggatgtgctgtattttctattaataacatgttctttctcttcctagtttcctaggctttgaaaaaaatggtgaagagagagagaaaagagtaagagggactggcatacttacactttatgtgtgcatgcagtttttaattttgtgcttttcaaccctctctcatcagtgcaagaaattaaatgcatgagaattaatatgctcaagtcaataggtgaagcaataagctataacggaagagaaagggcttccatcatgcacaagctttatagacatttaattccctatgtggacaggaggtttacttatctgcacaagagcttcacacaaaacaagaattagattctcttcattttgagtttgcaatcctacttcatacaacaactgtggaattgagaaagaaaaataaatgcagagatagacaatatttggaaaaggagtcagaatgaaactgaattacacttgtttattttgagtttgggagaatgtggagaaaaacagattgaattaacacacacagaaaccacaaacacttttttcaaaaactcattttagtttatcttccctgaacaaactgagcaatatttagtgaagctctgtcttagtccctgtgaccacttttaaattacaggatggtcagaggaggattggtgagcacctggaagattgacaagtcacttccggcagagcaggcagatgctgaacatgatgtttctaaatgttctagcatcaaatgtgatcaacatgccttcccctgtctccttcgtggtatttttataaagacacagtgtttgaaggacattaatctaaatgacgggtcacaggaaatgaatgtgataacaacaggaagtgtattatggagatatggttcaatacaagcaagaccgagtttcattctgtctcccaggctggagtgcagtggtgcaatcttggctcactgcaatctctgcctcctagattcaagagattctcctgtctcagcctcccaactagctaggactacaggtgcgtgccaccatgcccagctaagtttttgtattttttttagtagagatagggtttcaccatgttggccagggtagtgtagaactccagacctcaagtgatccaccgacctcagcctcccgcagtcctgggattacaggtgcgagtcatggtgcctgtgtatttcctttttaactttaacagattttatttgaatagataacatgtttacatatttctgtgatggcctggtttgcctgtctggtttacaaataccaataaaagaggatacaaacaaatggaagaacattccatgctcatagataggaagaatcaatattgtgaaaatggccatactgcccaaggtaatttacagattcaatgccatccccatcaagctaccaatgactttcttcacagaattggaaaaaactactttaaagttcatatggaaccaaaaaaaagcccgcattcccaagtcaatcctaagccaaaagaacaaagctggggcatcacgctacctgacttcaaatatattacaaggctacagtaaccaaaacagcatggtactggtaccaaaacagagatatagatcaatggaacagaacagagccctcagaagtaatgtcacacatctacaaccatctgatcttttacaaacctgacaaaaacaagaaatagggaaaggattccctatttaacaaatcgtgctgggaaaactggctagccatatgtagaaagctgaaactggatcccttccttacaccttatacaaaaattaattcaagatggattaaacacttaaatgttagacataaaaccataaaaaccctagaagaaaacctaggtaataccattcaggacataggcatgggcaaggacttcatgtctaaaacaccaaaagcaatggcaacaaaagccaaaattgacaaatggcatctaattaaactaaagagcttctgcacagcaaaagaaactaccaccagagtgaacagtcaacctacagaatgggagaaaatttttcaatctactcatctgacaaagggctaatatccagaatctacaaaaactcaaacacatttacaagaaaaaaacaaacaaccccatcaacaagtgggcgaaggatatgaacagacacttctcaaaagaagacatttatgcagccaacagacacatgaaaaaatgctcatcatcactggccatcagagaaatgcaaatcaaaatgacaatgagataccatctcacaccagttagaatggcgattattacactgttgctgggactgtaaactagttcaaccattctggaagtcagtgtggtgattccttagggatctagaactagaaataccatttgacccagccatccattactgggtatatacccaaaggattataagtaatactgctataaagacacatgcacaagtatgtttattgtggcactattcacaatagcaaagacttggaaccaacctgaatgtccatcaatgatagattggattaagaatatgtgaaaaaaaaaaaaaagaatatgtggcacatatacaccatggaatactatgcagccataaaaaaggatgagttcatgtcctttgcagggacatagatgaagctggaaatcatcattctcagcaaactatcgcaaggacaaaaaaaccaaacaccgcatgttctcactcataggtgggaattgaacaatgagaacacatggacacaggaaggggaacatcacacaccggggcctgtggtggggtggggggagcggggagggatagcattaggagatatacctaatgtaaatgatgagttaatgggtgcagcacaccaacatggcacgcgtatacatatgtaacaaacctgcacattgtgcacatgtaccctagaacttaaagtataataaaaaaaaattaaaaaaacaaaacaaacaaacaaaaaaacaacaaatacccagggatgtgcatttagaagctgccaagacattaagcacccaagaggttctttttggtctgtgtctgtgcttctcaggtggagctgatggctgtactttcttgaattcagcagttgcatttccagcatgtgaggaatgtttcttactgctttcagggatgggcttaatctgagagtaacaaaactcttatttcttccccctggggcctttaacacttcaacatgtgggactgggaatcatcttttttaggaagtgagagaaattgcaagtatatctaaacatttttgagtaatacaatctgcgaaaacagttttattattcaacacttctgaaattgaatgtgaacatgaaataaacaaaacaaaaccaaagcaccataggactgaatggtttgcacaggagatggaaggattaactagaagcctgaatatctttgttggctttatatacttaataggcagccaataggaaataaattgtaagcaaaagcatgtattcctatatgccaggaaaattaccctgtaaatactgaattatatgtggctaatcaatattcataatttatcagatttcttaaacttatatttgtaagaaacatctacagaatagttgtttggcttcattaacttttgattcttatgtagatatatatttacatgttttgatggtgttgaaaggcaattcaattgtaaataataatttcaaaatatttctgcagagaaaatgttaaccctaaagttcggaatgattgtagaaaagtaaaacatcttgaaagctctttctaaggaagtaaaaattaagaccaatttattagtaaaataatttattaagtccagatcctaattttatgtaacttgaagcctttaacatatattttaatagttctgtcaaatacctattaatctttaaaatatcttaaaaatctttttaaaattctggatttctcctctataatttagattaaataatgataaagggcagacaaaagatgataagtcctttaaggaaaatatatttacttcacataggttttatattttttgtaatactcccagaatcataaaatatagatttttatataatttaacagtgtttggcaaaacatttggcatatgatagttgtatccttctggattttgggttgcaagccataaacacaacatctggctaagttataagaaaaataatttattggaagtgtatgcggctgtcactcacagatttgatgggaagactggagagaatcaggctcagaaaatggaaaggaaacaagaaagcctcagcatcaacattctcagctctggtcacattgtagagttgtctagtgtgatctccatggccaaacaccactgctgctgcaagctgccaatgggaataaatatatcttttttaggaagtgagcctttgtctttagatcccaagctcaacattcagcatcctaggtagcagcatttaatctgctgaatctaggtcaagtgcctgcatccttacttccaggagtatggagagacagggtctgatccccttcagcttgccaacttgcactccaaccaagacttaaacaatggaggaatttccaccaccaaatagaaagaggttttggacaaagggaaactaagcaaaaacagatgtcatctaaatgtggcatcccatattatacagacagttgattcttgttatttgcagtagttatagtctataaagtcactgaaaacactgaattagagagtgctaagcaattacctttagagaaaatacaggtatagtttcctgtgaacctctggtcacaatattttcatcaaccaatcgatacataaccttgctttgtgtgtgtttctctttaaagacgccttatttaatatatattgttgattcaacaacattgaactcttggccaacagcgttataactcatgcctgagcaaagcttatctaacacgtcttttctccgtaagtcacatcatagctttgttgcacttagaaatgctagatagcacttgggcactctgttgggggccattttaaacagcaaaattaccaacaaacagcacaaaaatgcaaacaatgtaacactagacagacctcaaaaagcacactggtttacagtgtgagagctgaaacaagaaggcagagcatgaacttgttcaacatctgctgggaatgtgagcatcgggtagccccaattttctgcttctctgcagatgagcatgtctgcgaatggcagcagaagtgacatgaatattgatttggggctacaaataaatttgccccaaatttatgtttctgtattcacaaatataaaatctgtgagcaatgaggataagctgtatatatgtgtgtgtgtgttaacaaatatacatacctaacaaatactactgtttttcaaactgtaaaacatatacatgcatgtaaaagctgggattatgtaagtcagtgatatagcatatacaaaaattctgtactgtattggcactgaaaccactcaatcctgaaaattcttaacatatttccattattagataaatgtgataatgttaggaggttatatatatttgctttttatttgattgtccatgttaaatgttaatactttgaaaacctttttgcatctatgaatttgactatagtttgtgagtttagttttacttggatacatcaaaatctttcagccattattcaaatattccttaagaaaaactagtatgcatgtcctgtaatatattttcagtttctaaacacattcaaaggtaattatctaactaattaatcattctccatctttgtccaaatatataaatgtttattcaaagattaaaataaatgttttatttttttcacacatctgatgagttgaatagacctcatcagtcaaatgacttcccaggacacttggtaaattaaaaattttgaaacacaaataagcctaactcccatcagcatttccacctatggtttctttctagcagaactagcagaaagttggtatagctttgtgtcttcaataccttaatgtttctaatctttcttaggtatctcttggctcactgacttttgacatttggtttctgtcaatagagatgatgatataaaatacatcttatgaggaaatgaggaggaagagctatcagatccaaaaactatgtcccagatggaaaaccttgccagttcaacagttatttgttggcattgttggtacctctggcaaaggtggatcagaaggatagtcttaggacaggtttgaggcaaatgtttggatcaaagatacaggagacttttacatcaacataaggttgattaagggaggcagaaccaaaaaaattacaagtatgaacggtctgccagacaactcagttctagactccgaagacctgattgaaatatatcagaaggtaacattcaatatctaagaaatcagagaatgattatgattgatcctagaaattgcaggctgcttggcctctgctccatttatagtacttgctagagtgggtaggctcaggtcttgagatatcattttaagcaagaaggaggtcaaaagtttacaggataaggtcagctatgctagaattagcttttagaaataataggtctacaataaaattagatacaaatgtatgagtttcctagggaaggtgaattgagttcttgtaaaataatagagagaaatggcagatattctaagacctaatatattttatatattcatttatctgaagtaaaagcaatttctcatgtctaaagtaaaaagaaataccataatttattgattctaagatgcactttttacaatttttaacatctctgaaacctggagacattttaccatcaatgacatcctacaattaaaatggaatgattctttatctttaaacataaaataatggggcaccttacaaatggcgatgaccaaaatatgataaaatatggtaacgcagacatcccttgataagcgcaaactggttccaggactccgcatatacccaaatccacacataatcatttgtagttggccctgtgaaacctgcaggtatgaaaagttggtcctctctatatgcaggtttgtatcctgtgaatactaggtttggctgaaaaatatccatgtataagtggagttgcacagttcaaatttgtgttgttcaaggatcaactgtatatcctaaattaaaaacaaaattccttagtgttaaaaaaatataattgggaagccattagcctgagacagttctagtgctttgggttcctatttaagcgaagagaagttcaactcaaggcaaaaagtaaaaggaaactgaagtttaactgagtagaaactgtcaaactagcctctaattagggaattttgatttgaaccaataaaaaatattttctttgccttgtttctgtcggaagcaccttataaaagttccccctgggtatagcccaaccacttatggtctgacgctgctggggtcatgaatcgctgtttactcaaataaactatttaaacgttaaatgtgcctaagtttaccatttaacgttagtaaaaacaggattgatatctgtacaaaatatgtattttttaaattgtactttaagttctgggataattgtgcagaacgtgcaggtttgttacataggtatacacatgccgtggtggtttgctgcacccatcaacctgtcttctacattaggtatttctcctcatgttatccctcccctaaccccccaactccccaatagtccctggtgtgtgatgttcccctccctgtgtctatgtgttctcattgttcaactcccacttatgagtgagaacatgcagtgtttggttttctgttcttgtgttagtttgctgagaatgacggtttccagcttcatccatgtccctgcaaaggacatgaactcatcctttttttatggctgcacagtattacatggtgtatatgtgccacattttctttatccagtctatcattgatgggcatttgggttagttccaagtctttgctactgtgaacagtgctgcaataaacatatgtgtgcatgtgtctttatagtagaatgatttataatgctttgggtatatacccagtaatgggattgctgggtcaaatggtatttctggttctaaatccttgaggaatcaccacactgtctccctaaaatatgcatttttaatataacattttattatttcaacttagggatcaacggtacccctttggatgtcttcctgttgggtcaacttcctgttattttatacgaaattctttctgtgtgtgtatatgtgcatttttctccctaaagagtctgtagttttcatccaattctgagttagtaattcaaaaagtggaaaacatctcaaataatcataggtggttaatttttaatagtccaaataatgattacataataggtgataaataatattttctaattattacattaaagtaatttgtataggtgacgttttttctgttttgattcctcattacagggcaattttccatagcttaacagatatgaggccacctagatttatagcggaatccttcatctatagcaagaaaaagtagaaaggaacctctactatttgagttctcaaatacgttgctgtattacatttaatgtctagaaaatagagtcagtttttatatcgactttaaaaattaagtataaaacaaactatacttttgaataacttctaatttcaaaaaataagatgttctttttgtaaaatacatgcaatggtaagaaaaaaatgtcagacagtatctaactacagagatattttacctccctgattagctgtattcctaggtattttattttatcttttcttttttgtggctgttgtgaatgggattgcattctttatttggctctcaggttggacattgtatatagaagtgctacagatttttatacattgactgtatcctgaaactttgctgaagttgtttatcaggtctaggagattttgggcaaagactatggggttttctaggtacaaaacaatatggtcttcaaactggggtagtttgacttcctctcttcctatttgaatgccttttatttctttatcttacctgattgctctggcgaggacttccagtattacattgaataggagtggtgagagtgagcatccttgtcttgttcaggttctcagtggaaatgcttccagcttttgcccattcagtacaatgttgattataattttgtcacagaattacaaaagactgctcaaagaaatcagaaacaacacaaacaaatgaaaacatactatgcgcatggattgcaagaatcaatactgttaaaatggctatgctgccccaaagcatctacaggttaattgcagttcttattgaactactaatgccatttttcacagaaagagtaaaaacgattctaaaattcacatgaagccaaaaaaggtcccaaataaccaaatgaatcctaagtaaaaagaacaaagctagaggcatcaccttaccccacttcaaactatacaaggttacagtaaccaaaacagcatggtactgatacaaaaacagacacatagaccaatgcaacagaatagagagcccagaaataaagccataaacctacaactgtctaatctttgataaagttgacaaaaacaaggaatggggagaggactccctattcaataaatggtgctatccaataaatggttgaatagcggccaggcacagtggttcatgcctgtaatcccagcactttgggaggccaaggcgggtggatcacaaagtcaggagattgagaccctcttggctaacacggtgaaaccccctctctacaaaaaatacaaaaaattaacttggcgtggcagcatgcacttgtagtcccagctgctggggaggctgaggcaggagaatggtgagaacctgggaggcagagcttgcggtgagatgagattgcaccactgcactggagtgggagacagcctgggagacagagtgagactctctctcaaaaaaaaaaaaaaaaaaaaaaggttgaatggcatttcaaccattattaaggctagccatgtgcagaagattgaaactgtacttcttcctttcaccatatacaaaaatcaactcacgatggattaaagacttaaatgtaaaatctaaaactgtaaaaaccctagaagaaaatctgggaaataccattttggacataggctctggcaaagagttcatgatgaagatgccaaaagcaattgcaacaaaacaaaaaaaattacaagtgggaactaaattaactaactttaattgaactaaagagcttctgaatgacaaaagaacctatcaacagaataaacagatgacttacacaatgggagaaaatatttgcaaactatgcatctgacaaagggctaatattcagcatctataaggaacttaaacaaatttacaagcaaaaaccaaacaaccccaataaaagtgagcaaaggacatgaacagacacttttcaaaagaagacgtacacgaggccaacaagcatatgaaagaatgttcaacatcactaatcatcagagaaatacaaatcaaagccacaagacatactatctcaaaccagtcagaatggaagttattaaaaagtcaaaaaataacagatgctggtgaggttgcagagaaaagggaacacttatacactgttgatgggaatgtaaattaattcaaccactgtgagaaacattttggtgatttctcaaagagctctgaatataatcaccattcaaactagcaatccattattggttatatacccaaaggaatataaattgttctaccgtaaagacacattcacacatattcactgcagtactattcacaatagcaaagacatggaatcaaactaaatggtaataaatggtagactggattaaaaaaatacatatataccatggaatactacacagtgataaaaaagaacaagatcatgttctttacagcaacatatggagctggaggccgtcatcttaagcaaacttacacgagagcagaaaacaaaacacctcatgttatcacttgtacatggaagctaaatattgagtacaagtggacacaaagagggaacgatagataccagggcctacttgaaggttgaaggtgggaggaaggtgaggataaaaaaactacctattagttactacatttatcacctgggtgacaaaatatttgtgtgtccgacccctgtgacacacaatttacctgtctaacaaacctgtacatgtatacttgaacctaaaataaaagtaaaaaaaaaaatctaactacattcggatcttcattttggaagaaaaattggaattgatcagataaatgaattgtttaagaatgaactctcatcagtaggtctttgatagtgaagggcaaagctctggccactgtggagaggtgaccaaaaaaagtaggtattctttatttaaaacaataacagaaaatttgggttttcatttatctattgaatactcaggaggtaagatgttgggttgccttaaagattcaaaggaagaaggaaaatgggtaagagtgtccctaaaaggggagcaataatgtgataaaccgggaaacacaaaaagggaactaagaaattctttttgtcagagatagctagaaatttagtaacaatagtggctgtcatttagcttttaatctttatttttttgttctgcagcaattatcctctagtataccatggatttggtaaaagattcacacaataatattatgttcatcatataaaagtacagacatttgagaacacagtttttgcagccaagcttacgtaggttcgaatcctgactctaacacatgactatcagcctctcagtgtttcatttacctaagctccagaatgggagtaaaatgtactgaatccacagatctggtcaagattaagtcagttaatgtgtataaaggtcttagaccactgctaggcatatagtaaaaactaaaaaaaaagttttggaataaaatgacccatagaaaactagagcagcctgtggaagcattgggatttaactgcataatcaaaaaatgaaccagtagcagggatttagagtaaaatatcttggcaagtataagtgtcccttctgcatgcccttattgtttgtcatctcaggaagtctcagaaatatgaataaacctgttccagtttcatgggatggaggcttgaattgatttcattaggatattactaaagggtcacttgggaaggctgcatgactttggaatactttggctacatatgccaaatagaaagtgaaatttcccagtcacctaactcctcagaaataccctgtgttaacaatctgatatacagaatatactctttcactttatagtcttaatacaattattttacttttgaatgaagaaaaatgtgtctccaataatcattttaatttccctgaattgatcagcatgaaaaaaaatcttcagttttcattgctgtcaaggaaagatactgcatagaaaattgggagacatgagattgaatcttgtggctttaacttgttttagactgtgtaaattgctttattcctgaaggactctgtttcatcatattttaaatggaagtatttagctaactcatcccgaatgtgtcttccatatttaaaaatatataattttaatggctccatagcaaattgggagaatgaattataataaaagtacttctattgcctaaagcaagtttttttctttattttttggacaatagttattcaatagcccacacttaattttgtccaggtttcaccaaacaagtcacaattctaaacacttcccagtagctgggagagcgattcttcacaatttttccatatgtaggatagtttcatatctcaattatattgatttgcaagcctcttcactcttctaattgtgaaatatttattgagagccccagctgtacttcatgtaggttctcatgacaatctcagtaggcagaaggccatttgatggcagtcaacttacttgcccaacctatttttaaagagtatgtagtcagaaatacacctaccatataattcagcaatttcactttggatatataaccctcaaaaggatatcagtatattgaagagttatctgcactgttatattggccgcagctctatttacaatagccaagatatggaagcaacttaagtgtccatcagcaggtgaatgaataaagaaaatatagtacttagacacaatggagtacagccatcaaaaagaatgagattcaggcatttgcaacaacatggatggaactggagatcattatgttaagtgaaataagccaggcacagaaagacaaacattgcatgttttcacttatttgtgggatcgaaaaatcaaaacattaaacccatggagatagagaatagaaagatgattaccagacaggggaagaatagtgggggttcttgggggaagtagggatgattaacaggtaacaaaaaatagttagaatgaatgaataaggcctagcatttgacagcacaatgaagtgactatagtcaatgataatttaattgtacacttaaaaaataacgaaaggagtataatttgactgtttataacaataaattttaagggaatggataccctattttccatgatgtgattattaagcattgcatatctgtatccaaacatctcatgtaccccatacatatatatatatatcaattatgtacccacaaaaattaaaaataaaaacaaatagagaattgagtcagaatgaccaatctatagcagttggtgttataattggtggtagcagtggaaaaggaagcagacagatctataacacaatctgagggaagaaatgaaagagaaagggatgatcagctatgtcctcatgatctgacatttgatatctagctatcacaccagataaggcattaatttctggaacttttctttatccaacttcctgaagttttgtcactattattctttaccacctagtctgcagttgtaatattacttgatagaagtggattttctttagaaccagtagcacataaagacattattcatttagcaattgagatttaagttgtcagatttgcttctggcacaaagactaataaactgggggccattgtggggaatactgtggggaactagaattgggaaaactcaggataactgaatacacattggcagttggaaaggttggtaaaaggagagtgtataaaaggaagagggagctaatagataaatcctctgaaaatttccttgaattgtatattttccggaaagctggccctcaatcaaagttcctaagaaacggaattaattgaaaatgtagatgctctagcttgagatgctttgaatttatttattcagctcaaggcatttgctcttcatatatgttattttaggattatgatgccagatgtttcttgtgcgggatactggcaatgaaattctttacatatttaccttttgatttctatcttggaggcttgactgaatgccacatgactggaattaaaataaatacacaatccaacttttaagttaagctttgataacttttctcacatagatatatacttaacaaaacttaatatcattaatagtaggcagttttctcaatttttgttgattctatcttgtctgcaatcataccctgtgaaataaaattaaaaatatataattacagtcctctcggtaggctgttgactattttgagttaaaaagcactctgtgctggcagcagaaacacagaggcagcagtctaatttcctctatttcactaggtgcctgcttaattgcaaccttccatttaccagctctctggcggcatgccatttttgcttgtatattttttcattcagtttatcattcatttgtatttcatcgagtaacatataatagagactgcgctgtttgctctgtagcttgtgcacacattcagttgagccatttctatattttgtagagttgattttaactcagagaagaaatacatttgtataaaaatttagacttcaaaaggttttgttaaggtgtctcagaattatgagaaataacagaagagtgtaagaatcattttagctgtcagattgaagagtaagatgatagactgaaaggaatatgaatcgatgttagtggaagagttttgctgtcatataatgtattgtgttaattatttttaatggaagaaaagattcttggtaccagttttcaaaaccgttatcttgtatatgtatgtagataatgtaattcttcaaaccatccaattatttaatgaagtcaataaatcaaaaaatgaaaaatattcactaaatatacaattatatgttattgtttatatacatttaattgtatacatgtaaaatatacggagtttcttttcagctgaagcagttttgttatttttgtggtgctaaaattgtatataatacattaggtttaatagaattagagatatttggtctggtttacagtaaatttattcaacttagattgtaatctacatgaagccagagagtttatctaacttatttagcaacatattctgagactaccacaaagtaaattcttaatgttattgaggtacataaatatcaatatttaagtggtttttttcctaaagagacatgcagttaagatttacaacattgtactgtctttgtgaaggttctggtcaactgttatgaaaagacaaactcaggaagatagtagagaagctgagatgaagataattcaatctagaactttagaatacaaatgttagcttttgtcaggctaaaaaaagattcaatatgaatgttggcttttaattttatatttagagggaaaaaagatgaccgggagttatgggacgaatcaaatgggaaggtgaacaaaggattacttcagagtgatgaaaatgttttacatcttgattgtggtggtggttacatttctgtatccatttgccaaactcagagctatatgcttaaaatgggtgttatttactgtttgtaagtaatattctacttcatatatctataatacgttactaatatgtttgcaaataaaattttacttgttattactgtttgtaagtaatattctacttcatatatctataatatgttactaatatgtttgcaaataaaattttacttgttattactgtttgtaagtaattgatttaaaaaatgttctccaggaggaaaaataaataaaaaactgaaaataaaggcaatagttgacatggcattttttaataggctctagccagaaaaacattctaaaacataactagaagcctgatctggaaacaattcgccaacttggaacatgttgactagaaaatcgatgactgtcattttcattttatttttcaccttttctgactactagccactgaataaggaatgagagaaaatattagagcccagaaagaatcacgaaatctccttgaactcttagattacgattagacagtaaattaaaatgaggatccctcatttctgaacaagcatatttttataatgacatcaaaattgttttttaaaaatagtttttgtctctaattttcctgtcattgatcatgtttattcactcagcaacattcctgcctcatttgctgggactagcttaacatttggctatgctttgagggtctgtcatgaaaccttatctgacttcaaattatgtgatcctttaagtttctccacaagaatgcaagctcagtcatgtagtcgcagtggttagcaatgaaaccattatgtaatgtactataaataagtaactcagggataaattaatctctccattggattttcagaacttccttcaagaaagtagctcagagcagacagttacgggttttcgtgtgtgtgtgtgtgtatgtgtgtttaccactatcttctacagaaaagtttataatatgttcttatttaacttttagtttccaatatcttatgttcaaatgccaattctatttgcattgataatctatgagtctgttgtaatgatcatttttcatagttattggctgtccactatgttttcaacactctttaacatgttttgggggaattttctcccttatttataaatcctctcttctcagagaaaatgccagaaattttatttcccaggctcccttgcaattaggccatgaacatgcgacctaggctctaccaaatggaagcatccattcaggagtatgatttgcaagaatagatatcatgtactgttacctcatgtatctaggcataaacttgggcacatacagtagaaacaggatcttgctttgtcacccagactgggttgcagtgatgcaatcgtagttccctgcagcctggaatttctggtctcaagagagcctctcaccttagccttttgagtagctgggattacaggtatgtgacaccatgcctggcaaatgtttttatttttatttttttagagaaagggatttactatattgctcaggctagtcttgaattcctggcctccaatgattatccttccttggcttcctgaagtgctgggattacaggcttgagccactgcacccagcctcccaatgactaattaacagagaagaggaaagagagtttgatttggtttatagatcacccttcatgttatataaagaacatgaacctctgtattgtgacagtagtactcagagatgttcctaaaagaacatgggaaagaataattattttaatgtgaagaatgttgagcaactttccccattgttcttttgtcttggaaggtggaaatatctgaagtactgttccacaatcattcatggatattgatgaatagtttttttttttttttgagatggagtctcactctgttgcccaggctggagtacagtggcccaatctcggctcactgcaagctccgcctcctgggttcaagctattctcctgcctcagcctcccaagtagctgggactacaggcacccaccaccacacccagccaattttttgtatgtttagtagagatggggtttcaccatgttagccaggatggtctcgatctcctgacctcgtgatccacccaccttggcttcccaatgtgctggtattataggcgtgagccaccgcgcccggctggggaagaggtatttagatagataacaaaatgtacctacagtgtgtaattattttttcccatgtgacttatcaactgaagattgtcactgggaaggagatgagcaatattctgatagaaaagggtgatccagctaatgaatgtcagtaaccatgccgatattgagtggagtcattcttgcttttacttgtttttgattgtttttgtttttgagacattctcagtctgttgctcaggctggaattcagtggtgtgatcacaactcactgcaccgttgacctccttgggattaaacagtccttctgcctcagcctcctgagtagctgggaccacaactgcatgccaccatgtccaacaaatttttgtattttctgtagagacagagttttgccatgttgcccagtgctgatctggaactcctgagctcaagtgatccatccgccttggctgcccaaaattctgggattacaggcatgagccaccgtgcccaggctcattcttgtttttgtgagattatgcactggatcagcatgtccttcccttagcactatctgaccaattattggctgtatttgatggccagttcaccagtggcagaagtcttagaaggcaaaactcttaacctctgatattaatagtatacctgggggtgaggtatgaactaaccaagaagggttaaacaaattacttggtggtaggctgatgatactaaacctattctaccatgaattagactgtgatttgacctcactggaattaattacaattttggatttggaaatttggatttcctccccctcttttccagagacaatatctatggacttattaaaatgccttgtctacaattgtggtgtcccatataccaatgcttttgaccatggaaatgatttttacagaaacggaagtcatgtatagatatatactgtttggatttagagatatagctaggcactcagtcacccaaaagctgctggtcttgataaaagtgtgtaagattattgaacacatattatggcaccacccttgtgaagctggaataccatcttgcagaataaggcagaagcttcttccaaaaataagaaaacaaagagattgaaagccagaatttcacgtgtcacttttacgtcttatgatcccttaacaaaaactatgtttcatattctatgacctttggcttcgttggcttggaagacgtagtgccggagtgaagaatgcttccaacatgacacccaactatatttttgtagaactaggagctgagactattacataaccatttcaagctttttgtgccactgtatgaataggtcaaaaatggaagttatagttttgctggggtgattgaccctaattatcacagacaacaagggctgacacatgtagtacagaaatgaatatttaaaatacaggggatactctggccttcatagtgctattatagctagtagtaaaatgaatggaagatccatggatgcgtacacagcaggcaagaccaccaatccttttgtatttaaggaataaaatttcatttactgtgccaggtaaggattctgaacagctgaagaactagatgaggaacagttgaggaaaaagaattctagaatacatgatagagaaagaaaattataacttgaaataatgagcagttccagaaatgaggaatatagtatctactcacattccctgtagtctcttatacatattcacatatttcaaaatgtttttcctctctcccttccccctattattttatatttatatgttcttctttcacaatgtagtccataagttaaagaatataaagatgacattatgatggacttagaccagtgatgtctaccacctagatatcttagtttagaattggatggagaaacttatgaggctttggatttgccatccttttagaggtagggcacttgtattttcatttctatgaagaatagttccattatgttaagctgtggcattttcttattgttcaaagtttaaatatattttttaaaaaacctggtgttgttgggaggtcacaaagcagatagtagcagatggtaggatatttggcaccttttgtggccatcagcgtgttgtgaactatgttgggaattatcaatgttgtgaatcccttctctctaagacagaggttccttttcccagcttctcttataactgaaatatagatatttaatataagctctacctatcaggcacattgctcaagaattctgcttggaagacagtgacatgaagaaggaggcattcataggctctttcaggcaattttggcagagccggtcgagagatttcagttttgggagtataaccccagaatctttaatggctgtgtccaggatgtgcctctagtcttttcttaggaactatccctggctctgtagcctctaagaatgatcccagagaatctgtgggccacccaataattaataaattccttttccttttctacctaacctgctggaatgctttttccccatatgtgtctatttatttacagtatgctccctgaacataaatgaactcaaagaacaaataatctgaaagaacacctgacctacatgcatacatacttgtgggtatgtgcatgtttgtctatgagcatgtgtgtgtatgacatgggattaattcagttttaatatttccttgtttttagagcttctactctgtaagttttcacattttcattttatacttatttggtgaaatattttccaagcgtccaaaaatagaaaaaaatagattttgaggttctcagtgtcacccaaagaaaacttttgaaatagtctcacagtatttttctcttttcaaaagaaaatttcaaggtatttctactcaaaatttcattatcaagaaaatatcctcaattttactaacttatataaaggagtatatatatatatatatatatatatgacttccagaacattatttcttactgtttaaaataagccaggcacggtagctcatacctgtaatcccagcaatttgtgaggctgaggtgggaggatcgcaggaggccaggagtccaagactagcctggacagtatagtaagactcatggtctataaaaactaaagtaaaataaaataattgttaatagtttgaggctggaatttttattctttgttcagtgatctggaaagtccaagcacttattaatttttctgttatttcttttcttttttttgaggcagagttttgttctggtgcccaggctggagtgcaatggcacaatctcggctcaacacaatctccgcctcctgggttcaagcaattctcttgcctcagccgcccgagtagctgggattacgggcacccgccaccacgcccagctaattttttgtatttttagtagagatgggggttcctccatgttggtcaggctgacctcgaacacctgacctcaggtgttccgcctgcctcggcctctcaaagtgttgggattacaggcgtcagccaccacatctggccaattttgtttgtttgtttgtttctatagtacatatacattttatggaagtaaatttgtattttaaaaaatactcttgtaaacatttgttatgatttgttttcattgtcaatgtctgttttcattgctgatcaagcccaaattacttagtgaatgaattgtacacattttcagtgaagttaggaatgtctaaaacagtttttaactatttaagccagtagatcatgacaaagccaatcttgtcacttggtcagcttactcaaattaataaactggccattttccagtgcagtgcttgtctctgaaaggccagggcctcattcagggtatttttccttagcttctatctggcccttatacctgaattaggaatctgagaggaataacatttggagaggtttataagctcaagttactattgtatttctcttgctgtttagggtagaatctagtcacaattaaaagaaaaaaggagaagcttcccaaaatgtccgcccttcacgcctcttgctgttcagatatttcctctgggctttccgccctgatttcctctggtttttagtgcttttatttttcattcaagcattagaagagggagtacttaaaacaaatagaccaaaggaattatgtcctatgtggtatagatccaagagctccgttctgatgtcttcaggggacacagaacaaaacaactgggcctctaagggcttttgggaggtgtaaggaatctggaaataatccagctatcctcaccagagtttgtgtgcagtcctggagtcgtcagggattacgcatgaaagaaagaaattctctcctctgctcactggccgcgcagcaggcaaagcactaaatctcctggtcccttctacttgtggattttaattgatggggctggtacacagagtaaagccatttgggcacaaatgacaggggttggcatttaaacaaaaatggcaattttaattttatcttcatccaaattagaaaggcaaaaaaaaaaaatcaaaaaagaaaaacctcgttttttcaaacgaaaagtgagtttttaaaacctttggtttgcaggaattaaaaaaaataattaaaacaaaacttgtcgatgtcattttaaagtggttggttaataagctttggctcatgatttcaatttgaaatttccctagactaccctgtttatgatagaagctgaattttacagtggcattttatgtgcctgggctacatttttaagcccagtcctgttgtttagggccagaaatggacacaatttaattctgtttattatagaaatcaagtgcttttggaaagagattgtgagcagctgcttagtattgtctttgtgttaatatagaggttcatttctcatgccttttgaggaaaaagcagttcatgagatttctagaggctcttttctacagaaatataggttggctgccaggatttagcagcaaaagagatttgctgttaattggtggggctggatgtctctgacaggtgtcaaattaagacatgtactccagtagaatttctagggttgtgcaaagaagacatcagtaatcaaaatagaaaaataaaacttttttttgttatacaatttcccagcgagtttttaatctcatgtagctgaattcaatatgaagaaagtttttggaatgaggatgacaaggattatttccactttccttagaagactgtgttcatcgatggttaacaaaattaattttttatttaaaaaacaatctagttaagataattgagcaaattttaaggtgagatgatggttttaataattgcatttacaatggtaagtaactgaaattcacagtctcttgaagcaggcccttgcatatagcatttgattctttctacaatgatataaagaacctattaaatttggtggaaaatagcaatggcatttagttcttaagctatttttttatgtttggtaacgatatgaataaaaaccaaggatgagacattcttatactctcataatggctggctctgtttctccatccactatcttaaatcttagggtccctttttcttagtgctaagaaagtgacagccaactgcatctcagaactgcagcaatgctgagtcaataaataaaaatatccaggtaatttccttatccttaagtgaagcttatgaacataagttatactgaactactttgaaagttggaataccattgaggaattattaaatggaatagaatttgtactacacccacattttgggcaaaatactcatttaaaatatgccttaaggaatatgccttgaggaaatatacccagtggatttctaaaagcattctgtggtcttataggtagactgtgatttctgcattaagactacatggggtgaggttatttctgtctgtgttccatgaatactttgctttacatgattttagaaaaactagtttgaatttcttcatttattgatttatccttctgttaaaaaaaagcactaattttaaaatttattgcagaaaaaaacacttttggactgagctatataaaatgactcagaagtaaaacatataagtgtcagatagaatttgccaccagtctgcctaaaagactgaagtatttgagtatggattatatttcatccggttggtagcactttgtgaatctgcatttcaggatggcctgttttcagtttccaactcaaataagagtattattgaattagttggcaatcaaaatatacagtctcgcaccctggaaacttgatttgtgaagaaatctctttgaaataaaagaggttaggtacgtatactcttttatggaaatgaaaatgcataatatgaaatttcagttcttgagactttttggataccaaattagcactcaaactcaagacctcagaaggatgttggtgcagcagggtgagaaaacttggacctctgataactgcagtgctgctatctccactctggactgccagagtgaattacagtttttgtttaaatactgtaggcctgtttgtctgttttgtcatataaagttgaatataacactaactgatagcatttaattaagtaaattgagctcagtcaactgtatgcatttctctctcgctctttccccctttctttttctctcttgtctccctccccactcctttccttttggattggtaagtaatacagacacatatgcataataaggccataggcattaatataccaaaatgtacttcaaacaaaaggaaataaagcttgattttaagttccaggctctgtgttcacacttactttctctactccacagatattttaacaatacttatcatttatatgcataatcccccagtcctttttttttcaatcaagactacaatgatggtgaatgaaataacatgagaaaacaaaacttgacatagagtggacatcaaaaaatgctatttgctctttctctttcctttaaggaatgagacaatggtatagttcacatatgaatttggagtacttttcaggttttgaaaattgtgttattcttttacatgttttaaaataaagtagctgatagtaacacctacttgtggtatggaatactatttggaaaagggatggcaagtaaatttatatcctacagctgcaaattcattgtcctcaaatggagataaaactcaaattagctgatgtcttttcaaatatagtacaatttgtatcctcaagaattttattttattttgtttattattatttttttgagatggaatctcactctgttacccaggctggagtgcagtggctcactgcaacctctgcctcctgggttcaagcgattctcctgcctcagcctcctgagtagctgggattacaggcgtgtgccaccatgcccagctaatttttttgtatttttagtagagacagggtttcaccatgttggtcaggctggtcttaaactcctgaccttgtgatccacccgcctcagcctcacaaagtgctgggattacaggtgtgagccaccacgcctggcctttttttttttttttttttttaatggacaagaggtttttaatgttgcccatgttggccttgaacacgtagccttgcctccttatgcgccaggacaacgggcctcagccaccagggctcctatcctggagaattttatagtctttgattacgtaaacctttatcagccaataggaagactggtatttcatatacatggtctccagtattctacatatggaataacaattcttgtcttactgtatatgaggaaattggtggctttctttacatggctgtattatctgctttcacaccttagagagaaagccatcagctgaaccatttacttttcactttcttgaactgccgcgtgggagtacatttaaaacaatttgaactttatacatgatgagcatgatccaattttagtcttgtcctacatttccaaaaaatgtggcttattttcataaattacttttacatatgtttctgaccctctgttatggttatataaaaaggcaaaatgcatggaaatagtaccagacagtcatcctgttttaatacaattttcagtataattgtatgtgctataaagtttcaaataacatttgaatcaacaggcaaattttgggggtgcttaagttgaactgaacttctgaacatcaaagtttgcttttcagtggttaaagattgttttagggaaagtgaataccctctgtcaggtcgagagttatttataattttttttttacagtctagcctgctacatttgacctctatgtaccttttccacttagcttgctagtgagaaatggaaacattgatttcagaaaatgacaggtattttttcctaaggtggtggatgcatattttgaattgtgtcctgttatatccaaattgagaaacgataaattactagatgtgaaaaaatgtttataattcatattaaattaagcttatggccagatgacgtcaactctcactataaaagatgatgttttccatttaataacaacttttatatagattttataatgctctcccacttaaaaaatgcacatgtgatcccaacaactccgtgaaatttcttattaatgtcattttactggaaatgaaggagtcttagatgtttaaggacaagctgaacatctggttagtttttgaaccgagattgttatagtgggtggttagtcagacagtaacagggcaggagaggcccacacactccaccaggaaagtcaggcaaccatcaggtgatggtcaggcagttgtcacattgcctctctaaaataataataggttgcagccagcaccagggaaaggcagtctccctatagataggacacccctgaaactagtgatcagcagcttcctgataagatctcaggagctgggtcaatgagctcaagcatgcacactaagaggcaaaatggcagtttaactagtatatgatcttccaggggcatttgactggtaagggaagaatgcctcagatgagcatgcatgcaactccagtaaacacactgcgcatgctcacctatcaactgctagcaggccactgcgcatgcgggtagctcaccctaagggaagaatcaagagaaatgggacacaacacaccagaagtatgccaacatatataacctcaagtcaaagtccaaacctcacacttgacctccaagatgtccgcttggccctcttccaaatgcactttcttttcattcctgctttaaagctttttaataagctttacaggcctgctctaaaacttgcctcagtctcttcttctgccttatgcccctcagtcaaattctttcttctgaggaggcaagaattgaggtcgctgcagacctgtactgatttgccaccggtaactcgggtaacttccacggctaacaagatcttctgattttggtctgttattcattgtgtgccacaactacttctaatctcatatgagaagtctttttcaagagacagaggaaaatgaaatgaataatatagaaacagcaaaatttaatctgtgatgtatcaggtggcaagtttaagctaagccacatgtaaatgaaagttatgggggaagagaaaagcccctcagagaggaagtgtttccaaagagacaaagggtgtggttccagttccctatcttccagctccatcctgtaacccacctgaactgtcaggttcccctctatagttttttggaaagcgattaaaaaaaaaaagaaaacataaaaaatgatgaaatgatgttctcaagtgataaatagacaagtcattttattttattttattttattttattttattttattttattttattttattttattttatttcttttgagagagagtcttgctctgtaacccaggctggagtgtgg

SEQ ID NO: 2613 - DNA, 58011 bp, Homo sapiens
atgtaatatgtaaaataaattataattatattattaatattcatattataacaataatatatgtgatattatatattatatctattatatatttcctataatacatatattatattacatataatacatattatatatattatataatacgtattatatataatatataatatatataggagtttgttaaatattaacttacacaacttacacaatcacaagttcccacaatagtcggtctgcaagcttgaggagcaaggagaaccagtccaagtctcaaagctgaagaacttggagtccaatgttcgagggcaggaagcacccaacacgggagaaagatgtaggctgggaggctagaccagtctcgcctcttcatgtttttctgcctgctttatatttgctggcagctgattagatggtgcccacccgattaagggtggatctgctttccccaccccactgataacatctttggtaacactgtcacagacacacccaggatcaatattgcatccttcagtccaatcaagttgacgctcagtattaaccatcacaaatggtttatagacttttatgtttcctgtttctttttgaaggacttatactaaacacatatttgtaggaaattgttttatttagtttactaatcatgttggcacaatattaatatattattgtcacttttctgattttaaagatattttctggggaagtggataaattggtcttttcccatttgttgagaactataggtacgtttatattcaaatacttgacccagagaaaacatttggatttcactagtgtgtttctataaacaaaccaaaagtgactctaatgacagacatagacatagtttgggagaggcatgctttaaactcaagatgtgttaaaggccgtctattctatttatgaataaaactgctttgctttcatgtactaccaaggtttgttgttgttaaaaatcaattaaaaattgaaaagcatttgcaaaataagtttaaagtgtatagccaagcaataagctggctagttttgttctttcacttattgaatggtatttattaaatgcatagtatgtgccaggcatgatattagacataccacattaccaagcactgccattctcctgcctaggatgcacaatgcccttgtaaatttctagaaatcttaagaaaaacagtggagggccaagatcagcagtaggatgaaaacactgtgtcaaacagttgatagaaactaaaacattggacttcctctctgcctctcttcaacctaagtctttttgacaggagtatatttaggtatgtttctctcctagtgctattgtttatgtcagattgatgtcacctagtgagggggatcatttgtttcataccatttaaattgctgatggaatccgagtagcatatatatttctttaactgtgttattttatttaatcactgtcatttccaatagattctgagagagattcggttacacagttttgtccactcccatatggcaaaacatttttttgttttttgagaattgatagtctacaataatattgccaaaatatgagtcaatagccagttagatgagaaccattatacaattctcaattttaacctgttgtaatttgcttttctagggggacaatatttggtgttcttattgtcctttgctggaatatagatattaatctttcattctctattatcaaccttaaatagaattgtctaaacatgctccaaaggcagttcctatttcagtgcccatttaaatttgcctttaatactctgtttatcagatttccaaagaggacttcaggcatattaaaattgagtagctttcaatctaatgtgtatcccaacacaactgagtaatctcagatgctttcatcagtaaggagataatctcatcagcgatttgtttgcatgtgggtgcttttgaagttgttagaaatctccaagggagtttattcacaaagagtgactctcacaaatatttgttgagtgcccactacatgttatacaatattctagctaccaaaaatgcactactgaaataggtagttattgccctttagacttacattatattggtagaccttattaggcaatttcactgcagaggaataagagttatagtagatcaaatacaggtgctcagagagcacaaggaggtgcacagaacccagagctggaaattaagggaagacttcttgaaattacctctctgctgagatacaagcaacaacactttgctaggtaaacagctgtcaaggttgtagtttgggggttgggaataccaacagcaggaaaagcaagcaaacaacaaacatatggaatgaactggggttatatggagaagggcaggcttaaataatttaacattcattagctgaattgagtgtatactggatgaattgaagcagttttagggcatgggtctttccctctatgttttgggtcatttccttcatatatactgtaatacattcgatgcatgcatagaatttcaagctcatcacacttcctacttaggaccaaatattaaataaataaaaatggcaaaaggaggtatttggaagacagcgatggttattagtgtcttatctagtgagatgattaccaaatttagtagaagaaaacctccttttagtctctcttggctccaagttacagaaaccatatgaactggcttcatctaaaatggaattttttagaacaaggatactggtgtaccacatggaacccaagaacagggatgtgatgagcctgcatctcatgaaaaattggaacagggactctcttgctctcttacatctttacttcaatttgtttatttactttatccttttctcttgctcagaatcatctttcacattctacagaagtcacagaagccaacacacaactccagagttaaacatattaaacccctgtcatcagagagaactttcaaaaaatcttgagatgggacccattggctcagactgagtcagatgtctacccttggaccaatcaactgtggtctctgtgaatgtaggctactattattgccctatttgagttttcttcccactcatgagccaatcaactctagacagaaaagggaatgatctgaagcttggaagttctcacaggaaccctataaatgaagaagaggacaggacatgttttaagacaaagaaaaacgctatgcaaccaaaatacatctactacaataacagtgattattaaaaagtcatttaatttctctaagcctcaattttctcttctctaaaagtgtatgaattgtctattgctatggatatgtatcaaataagatactttaaaagttttaaatgacaaacttctatacagttctaaaaggttgctctgattattacactggtgtcaccaaagtggtttctagattctatttctgcagagctttcatttgtaaaattggaatgattttctctactttttatggttatggactaattaaagagaaatatctaccatttatttattgatggtttaatatatattatggtaggaggtttgcacatatttccttttttaattttcaccacagtcctataaactagatagtcttaccaagcatactgtaatgtaaacaggttaagatgattaagttcctaacatgaattagtgtcagagagaggatttaaatcaggtctgagtgattccgtgattccaaaggcaaggtggggattttaaagagccatacaataacactcttatgtgttataattttattgttcatttttataattcaattataattggtttatttctgagctagtttccttaaaatttttaatattttgccattacatttttaatgacctagtgattatattaaaaatcctatcttttatgaagatataatgatgccatactgtggatttgccaagtgatgctctactacttgttgggagaaattaaaattttaattctgaatgagaagcttgatatttgtaaacaattgcaagaagagagggataaataatcacaacttgttcagaaacagtatgtcagcatccagggaggtttctggaagaattattaacagcaggttatcatctttggtcttaacagtggaaagtacaattaaggagtagttgttagaatttctgggttctgatccacctggacagaatacacattttcttttgtaatttatattagaaataagatacctggcccatctgagcatgtatgattagtttggtggaattgtgttctaatcagaaacattagagtattctgaccatttttgtaagaaaaagagtctcaattgcatggcaaaaaccccccaaaaaatggtattctacttttatgttcttaatttaatgacatgttagatactccagattccattcaaagagatgagtgggctagcttttgtgatatttctcattactgagatatcatataaccctttcaggtatttctgaaaacacatgagacagaatcctctcttcatgaagtaatatgtggaagtcctcttcattatatcaatgctgttagtgtttacctcttgactttcagaaagtttctgtgcaatgcctttcttttttggcttcactttaggtctctcttccattaatcttgcacatatacttaatgattctctttcaaagagtgtttcctttaaggattaagctcctttgggaattaatccaaacttgtaggtttacatagcagtctaaaatcatgaatttttgtatctgggacaacaactccatccacaacacattatctcatcatttactcagagagtattcagatttctttggacctgactccttgaaagtgagctgtccttcttatgtatccaaaaagtctcaggtgtattatagctttgctatttgaaaataatatcaaagacagcatcttacgatgttcaaaggcaatgttacattatttgtttttcagatgataggactgaaattttgaaggctgaaatggcttgctatggaatacaatgtcatgtggcagattgggaaggaacactcagggcttctggctcctagtccagagtaatttttgtgctctctttacatgtcaccttcatctgcactgtatcatttggttcataaaataatatggcattcaggcagaaacagatttggtcctccactagtttacagataagaatattgagccctagagggatttttgtccaaggctatatgacgagaaatgttttgcccccaagtttaaggtatttccagtacaatttgctggctttccaacttaaaaacgttctctatggcccattaataaattctacaatctctttttattttaaacgcccttcatattttttagatttcttatatttataatattttaaaatacatgttttattgaattaataaagcaataatttccatagtggtccaccctgaactctccagggaacctgcctgctgctcttgtagtataagaacagcagcaaacagcttttttgttggaagtctacatgagttctgttgctaataaaatgaacatttcttttttaattttaatttgagttggggatacatgtgcaggtttgttacaagggtacatttcatgatgttgaagtttggacttttatagtcccatcacccagatagtcagcatagtacctaatgggaagtttttcattcctttgaccatctttaggccccctagtatctattgttcccatcaatatgtttgtgggaactgaactgaagggaacaaactgaaggtttatctctcacttataagtgacattataagtgatatttggttttctgttcctgcattaatttgcttaggataatggcctccagctgcatccatgttgctgcaaaggacatgatttcattcttttttatggctgtgtagtgttcgtggtatatatgtaccacattttctttatccagtccactgttgatgggcacctaggttgattccatttctttgttattgtgaatagtgctacaataaacatatgcatgcgtgtgtgtgtgttgttttttttttggtagaatgatttattttcctttggttatatgcccagtcatgggattgctgggtagaatggaaggtctatttttaattctttgagaaatctccaaactgatttctatagtgaagtaatttacatttcctccaacagagtataagcattcccttttctctgcagcctcaccagtatctgttgttttttgactttttaataatggtcattctgactggtgtgagatggtatctcattgtagttttgattggcatttctctgatgattagtgttgttgagcctatttttcatatgtttgttggcctttttatgtcttcttttgagaagtatctgttcatgtacttggtctactttttaatggggttactttttttcttgttgatttaagttccttgtagattctggatattagttctttgttggatgcatagcttgtgaatattttcttctattccttaggctgtctgtttactctgttggtagtttcctttgctgtgcagaagctctttagtttaattaggtcccaattttcaatttttattttcattgcaattggcttttgaggacttagtcatacattctttccctaggccagtgtctagaggggtatttcctgggttttgttttaggatttttatggtttgcggtcttacatttaagtctttaatccacctttagtcattttgtatatggtgataggtaggggttcagtttccttcttctacaaacagccagttttcacagcactgtttattgaatagaaagtcctttcctaattacttatttttgttgagtttgttgaagatcagttggttgtaggtgtgtggctttactcctgtgttctctattttattccattggtctgtgtctatttttgtaccagtatcatgctgtttcagtcactgtagccttgtagtatagttcgacatcaggtattatgcctctagctttattctttttgcatagaattactttggctatttgagctcttttttggttccatatgaattttagaatagttttttctgtgaaaaatgatgatgatttgatacaaatggcattgaatatgtagattgttttgggtaatatggacaatttggacaatgttgattcttccaatccataagcatgagtgttttttctatttgtgtcatctatgatttctttcagcagtgttttgtagttctccttgtagagctctcctaccaccctggttacatgtattttatttttttgtgtatggctattgtaaaaattgtgttcttgatttggctcttagcttgaaaatcactggtgtatagaaatgctaccaacttttgtatgttgattttgtatgctaacactttactgaagttatttatcagatccaggggctttttggtggagtctttagagttttctagatatagagtggtattgtcagcaaagagagaaaatttgacctcctcttttaactatttggatgccttttatttctttcccttacctgattgctctggctagggcttctagtactaggttgaatagcagtagtcacagtacacatctatgaaagctaacatttcttaaatgatgtacatgagacaactttttaaaatgtggaaattattttcatctaagccaaaacaaaaagtttttgtaatttttttccttgaaaactaattgatgttaatttaagaaaatcattttctgcatcttttcaaaacatttgttaatttgctaatgtacattaggaagcagttcaataattattaccaggaaactatgggtatattccaattttcccaataataaatttaaagataatagataaattaatagtacagtattttgcccctaatatttttcctaaaagttgtagactctgaggaaatcacatctctgttcactaaggttctatatgcattttctattgctgcccttatcaattacaacaaacttagtggtttaaacaacacacatatattattttatatctcgatagggagtaaattggacctgatatggtttggctctgtgtccccaaccaaaatctcatcttgaattgtaataattctcatgtgccaagggcgggaccaggtggagataaccgaatcattggtggaggttcccacatcctggtttcaatatagtaagttctcatgagatctgatggttttattaaggggcttcccccttcgtttggctctcattctttctcctgccaccatgtgaagaaggacatgtttgcttcccatgccaccatgattgtaagcttcctgaggtctccccagctatgtgaaactgtgaatcaattaaacctcttttctttataaattacccagccttgggtatgtctttattagcagcatgagaaccgacaaatacaaattcattcccttgaagttgttagactgaggcaccattctttgctggctctcagctggtggtcattctcagcttctagaggtggcctgtatttcttaacttgtgggcccttttgtcttcaaatccaacaatgtaagttgtcatccttctcctgccttctctctcctgcttttttatgtgtcatcacatctctctgaccattgctgggagaggttttctatgtttaagagctgatgtgattagattaggcctattatgataatccagcataatctccccatctcaaaattcataaccttgatcacatctgcagagcctcttttgccacaaaaaggaacattcatatattctgggaattaggatataaacattttggggtccattagtctaccataggtcctttgtaagattctgtgactcttcaattcaagtttgtgtctgcagaataactccttttgatttcagagaaataaaaaatattgggaatattgtggcttctgtgatgaaaagtcttttaattttattacaattttaaaaactttatggaaaaatgaaatctgcctcaatttatgctaagtatatatcaaacacaagcctgattttttgttaattcaatcagttattcaatgcaattaaaacaattatactcttggttgtttagtgtcaaagtgactgaaggtccattttcaaggcgtgaagcaatgccatgcaaacatagcgttgaggcaaaaaaaaaaaaaaattaaattccagattgtcccccttcttccttcttcttttcgtcctaaggaagagaggatggtattatgggataaaatggtgggatttcaaataagatacagattatttaatttggatatgtttcaaagtctcatataaggaaccaattgctcttgaaataggaaggagactttccttctggtagctcgtaagaaaggtgagctgttgcagaggaatgagagcaatggtactgtaattattgctccacacaggaccctcccgttctttttattcatttgtttatttactcaaccatattcattctgagtttatctaaaccaggaattataacaaagccagtcattctacctatagccttctttccagcttgtctttggccactctctcagaggaaaacattatgctgaattttttgtttatcttttctttgacaaaaaaatatttataggccaggtgcagtggctcacgcctgtaatctcagcattttgggaggctgaagcgggcagatcacttgagcccaggaatagaagtttacagtgagctgtgattgcatcactgctctccagcctgggcaacagagcaagcaagaccctgcctctaaaatgttttttttaaatataaattctagaactgaaaaattcaataattgaaattaattagtcaacagatgcatttattagccaattggaaaaacaaaagataggattagtgaaccggaatataggcccacagaaaatatgcagactaaagcatgggccattaactgccaggcattttcaacttgtcttacgtggtacctgaccaataaccctgaggcaaagaccagaatggggagtgccagggttgtagactgggctccaagtctgctaaatgaatttttctttatgtatgtctaattttaaaaagcaagatacaacttttttcctgacctatatttattatcaacacttttgacatcaaatttgtgggggttttctctataccaatatattctccaactctatggacaccaactttgtgtcctatgattgaattcaattctgacgctaactctcctatgttagcactgagcccacagattaaagggctcaatcctaccaagcttcacctacttcagatggcaaatgccagtcccaggttgccatctttgcttttggccaaccagttataaattggagttttctatgtcccccttctcaagttccataatttgctagcatggcttttagaactcaggaaagcactttactattactagtttattatgaaggatgtcatacaggataccaatgaatagccagattaaaagatacatagagtcaggtatggacgaggtgtgtggaacttctgtgccctctcagggtgttcccaggacctcaatgtgttcattaacctggaagctctctgaaccccattgtttagggaggtttcattacataggcatgattaattaaatcattgccctttggtgattaactcaatctctggccccactctcttccctgcaggccaggagttgaaagctctaatacttcaatcatgccttagtcttcctgttgcctagttccaatcccaaagctaactagggaccctcagtcaccagtcatctaattagcatacaagagacactcatttctttatgcagattccatgtgttttaggagctgtgtgccagggactggaaacaaagaccagatactttttataaatgtaatatgttacatttccttttaatttgatgttgtcctttaatttatgattctagtacatttatatttattgtgattatttgtatatttggagctatttctaccatttaaaacttatgttttctcctcttccttttctgtgattgagttttcatttgtttttatcctccttttctcacatcttatttgcttagaatttatacatgtaacttctcttctttagtccttagctttataattgtattgtaaacatttactccaatagagccttaaagctaaacaccatcttgatccctctcctatatgataaatgtatattaaaacattttaggttttatctttccttccctaccaatgtagtggcaagtattttggatgggatcttgtgattaaaccctgtcagtttttatctgaaaatatttttattttgtccttattctgctgcaataattaatccaagttgacagttattttctctcatcatttggaagttcttattccataatcttcaggctgtaattttagttaagaattctgctggctgggctcacacctgtataccagcattttgggaggctgaggcgggcagatcacttgaggttaggagttcgagaccagcctggcccacatggcaaaaacctgtctctactaaaaatacaaaattagccaggtgtggtggcatgtgcctgtagtccctgctacttgggaggctgaggcaagaggatcacttgaacccaggaggtggtggttgcactgagccaagatcacgccactgcactgcagcctgggcaacagagtgagactccatctcaattgaaacaaaaataattctgctgtcattttaattgatcttcttcttttaaaaatatgagctgtgctttttctctagttgcttttatgaacaagagttctttggaaaggattttggaggaaagaggctttattccagtgaatagtttgcaaactggagaaacatagcagtgtaagacaaagatacattccaaaaacaaagagagggtttgggttttatagcaaatgttcctgtctagtttctcaaccaggttcacttatgcaaaagaagaattgaactttgcttagttatgattggtcaatacagttaagccctaattggttgatatagctcagcccttggactaggacaaatgagctctgattggttggtttccaaccctcaaaccagaaatctgtcagatgcttctttcaaatgccaggtgttggaggatttctggaagcagtttatcctgacactaacaacaataactggtctgccttgattctagaaagggaggtcctatgataacttttacaacaactttctgagaacgcaaactgtgtgattgctccctcacccagccatggccacctgttttaactttgagcacctcagccacaaggaatgtattttgtctgtaagtaggggctcactttaacacgtttaagattttttttgtataattttattatgatctgtcaaatatggatgtatttttggatctgtggtttcttattttgcatctctactgggaattttacagctattattgcctttcttttgttctcttcattttctttctttttatatatttttttgatcttcaacaaaatccaaagccttctcattttgtcctctatatcctctatatcttttattttcttttatttatttttttgagaccaagtcctgctctgtcacccaggctggagtgcagtggtgcaatctcggctcattgcaacctctgcctcctggctcaagagattcttgtgcctcagcctcccaggtagctgggattataggcatgtaccaccaggcctggctaatttttatgtttttagtagagatggggtttcaccatgttggccaggctggtctcgaactcctagcctcaagtgatccatctgtcttggtctcccaaagtgctgggattataggcgtgagccactgcacttggcctctatatcttttaatgtttacttgttttgtctcattatgctacattggggataaattattttgctatgtcttcctctaatctattattcttttttttttttgagacagagtttcgctcttattacctaggttggagtgcaatggtgccgtcttggcccactgcaacctccacttcccaggttcctgcctcagcctccagcagctgggattacaggtgcctgccaccacacctggctaatttttgtatttttagtagagatggggtttcaccatattggccaggctagtctcgaactcctgacctcaggtggtctgcctgctttggcttcccaaagtgctggggttaaagccatgggccaccacgcccagcctattctattattattactatttgtttgagtcggagtctgctttgtcacctcactagagtgcagtggctcaatctcggctaactgcaatatctacctcataggttcaagcgattctcctgcctcagcttcctgagtagctggaattacaggcatttgccaccatgcctggctaatttttgtatttttagtagagacagggtttcaccacgttggccaggttggtctggaacttctgacctcagggatcctcctgccttggtctcccaaagtcaaagtgctgggattacataatctattattcttttttttggcagggggagacggagtctcactctgtcgcccaggctggagtgcaggcacgatcttggcttcactgcaagctccgcctcctgggttcatgccattctactgcctcagcctccccagtagctgggactacacgggcctgctaccacgcctagctaatttttttttttttttttttgtatttttagtagagatggagtttcactgtgttagccaggatggtcttgatctcctgacctcgtgatctgcccacctcagcctcccaaagtgctgggattataggcgtatgatctattattctttaaaaaaattcttgctatttacctaatatacttattggcctttattgagcctttaatttcaacagttataatattttatttctgtaattactatcttttcagctcaatgtgcttatttctcatgttttttactctatgcttctctttgtaacttcacttttcttttacaaatttcatgcatagctattttcttttttttttctttttttttttttttttttgagacggagtcttgctctgttgcccaggctggagcacagcagggcgatctgggctcactgcaagctccgcctcccaggtttatgccattctcctgcctcagcctccggagtagctgggactacaggtgcctgccacccacacccggcgaagttttttgtatttttagtagagacggggtttcaccttgttagccaggatggtctcgatttcctgaccttgtgatccacctgcctcagcctcccggagttctgggattacaggcgtgagccaccgcaccaggcccttatagctattttctattatgtcagtttcaaggtctgcaattccttcactttaaatctttgtttttttttttttgtctgatgattctcatacatagcagcttgattttctgtgtatttgagaatccttgtttttaaggtcatgcttgcttttaatctgtaggagacttagcctacctgaggaaagtttccttcaaggagggcttgcttctgcctttgcctgtgggtgatttatcccaggcacttcagttgctattctttcagttatggctcaggagagggctctgagacttcaatttccgtcctggtgctatctctacagcattgttccctgggggcaccgctttccaggggcacctgttgatttagtccagctcgatgccctctggctgcccactgctctgactaactgctgctttagctcagacttcccttctctatgggctgggtcccgggatgtttttcctgaagccttcagggtttcctgctttgtatccagtctgacccagactccctgtcctggaagtcctggaattagcaatattttgttggcttgtctgttttctttttggtggtggtggtgttgactccaggaaatgtttcctaccttttgtgacaccagtggttgtctccaaggaggtgcagtattttgtctggttatgaataaaatgattgctcataccttttaaatactagtgaccctggaagtaaaaacaaggtgatgacgtcttggcactgtgatatacaagtggcagtcccagaaagtagctatgtttgtatatggagagtaaaagaaccatatttaagatgttatattttgagaggcaaatgttggcattagtatctttcttgtatttgtgaccgtctaacaagaagcagcagccagagatttgtcaacattggaaaggtaaaaagtattggtagggcacagtggctcatgactgtaataccagcactttgagagactgagttgggaggatccctcaagcccaggagtttgagaccagcctgggcaacttaaggagatatcatctctataaaaaaaattaaaaattagcagggcatggtggtgtgcacctgtagtcccatctaccagggaggctgaggcaggaggatcacttcagcccaggagttcaaggctgcagtgagctatgatcatgccgctacattccagcttagctgacagagctagaccctctgtcttaaaaaaaaaaatacagtcaaatttgtgtttgctttatggaaagaaagaaaagataattccaatgctgttaagaatattctaattattaaagtattaattagctttaaatataaactattttcccttcctactagaaagcaaaaaaactgggtaatatattggccgggcgtggtggctcatgcctgtaatcccagcactttggaaggccgagacgggtgaatcacttgatgtcaggagttcgagagcagtctagccaatgtggtgaaaccctgcctctactaaaaatacaaaaattagccaggcatggtggcgcacacctgtagtcccagctactctggaggctgaggtgggagaattgcttcaacccgggagccgagatcgcgccattgcactccagcctgggtgacagagcgagactctgtctcaaaaaacaaaacaaagcaaaaaactgggtaatatatgaatgatataaatgataatctgaatatatttagatgtataattttagaggagttgatgttacattgtccaacatatgtagataatgtgtgaaaggcttctgagaattatataattttcataattcaaaatgatcatcttcatttagcccctgcaggaaactcaattaaataagggaaaatgtcttgtttaaatatggagaatttatgagtcacacagccaattcagcacaaggtttttatttccagactggtgctcttttttattgtaacctgctgcccacagggatgggtgaagaggacctttagggacaagctaaatggaagagcataagtctttttttttttttttttaatctaaaactgtagttcacttcatttaggcctctaacaaaaagtactaattagtgaagaaatgttagcaataacaaatctttcttgaattatcactgattgaaatgtcatgatgtctgttgattaaaacagtgtgtgcaaaaaaaggaaaacttacagcttcatttcttcctaatgaagtagaaattggaattcatctacaaatacgtttaattttcatggcccttgtttccatcatatgctattgaatagtcgaagaaaaaatatagggaattagatttttgtcaggaacaataattataacaggcactttatagtattcacactgtgcccagcagggctctaagtgatttatgaatttaatccatgtaatccttataacaagtccacgagttgcgattataatctctattttaaagaagaagaaacagaagcaagagatagatctacttgctctgggtcaaacaaacaattaaaatatgaacagtatgtcccaatattagtttccaaaatgaagtgttttagtaatccttatatatttaggaatgaatggcagagcaaaaatgactttagaaatctaaatggactgtttttttttcctatcagtgcattatatggcttctgaaaccatttttctcattttaaatatgaaatctcaaagagctactcaagtcaattcattattttgctgattttttcatttttctagactgcacttgttaatactcttcaatgaggcccagttttactacaacaaacattgacatatatattaggttggtgcaaaagtaattgcagtttttgccataaaagaaatgacaagaaccgtaattacttttgtaccaacctaatagaaagataagcaaagtcaaggaaactttatagaaagcaagggactctgtagagaagtgccaatggtgagatcattgtgaaatctctatattaatacaagtggggtgtttccctaaggagttatactcttatttaggaacacagtatcctgtactagtttcacatgattgtcaccttaagtgaagtgacagatgagtgatggcagttataaaacgaagactggtttcagaaaatctaaataaaaactaaacaattgtatacgacaatagaaaatgatgttgatggcaagaaatgtagagactgttggactgaataaaaatatggtcttgcttattcaaagctcttatggagataaatcagaatgtttttctaacatttggcctgaataaattgtagtacacaaaccacagagtatctaaaacaacaactaatgtttcaatcttaatttttgtatttggttcagaaatgccacttggaatgttatacataaagaatctgacattgtgtaaatggctgcataagcttaatgtaaaggaaaattgtggaagaatttatcagcttggactgaatatttcctcaattcacaaaatgaactgcaactccaatagaatgcagagtgaaaaatttcctgtctttttcctattgggtttgtaggacgattgataaacacattgctgttgtgtttgtagggatattgataaagacattgctaaggatggtatgtcacattttttcttttatgttgacccacagaagaaatgtctgacatatttccatgacatgaaaagttatgcttcttttgaatgattgccttttaaaattatttggacattatatgtctgatgagcaattttgtttctctttttgctttggacactaggaatctcaaagctgaatttgaaaagcattttatttaaccgtgtaatatcctgtggaattcaattttgtgtactaaatttatctaataggccagcctttattatcctttgtattcattcttggatttgtttttgagcctgttgcattatctatatttctgtaagaaaattcaaatcattttgaaaggacatagggtataattacctgaacaaatgttgtatttttccttatcaaaatttataagtgcaataaacagtaacaaggaatgaattatcaactatgccaaagtgacagataaaaaatcacataccattattttctgaatacggactccaaagtatgaagatcagaaatgaaaaaatcttagtgttgttattccagtaatggaaagggagaaaaaaactgataattcatgttatcatgaattgtgaattcatgataaaataacacatgctattatgcatgtgttattagaaggaattaggtcatcagagtcagaatttaaaatttttaaatggttacatatatttaggaaaaactttgacagttacctttgagatgtatgagctttgtaatctaccttgcttaatgtaaaccctacattaaattgccctacttgtttttccatgttagccaatgagaatatttaaggaatcaaatcaaatttgttgtacattcactttggctaattcaatggtcagatttttggaaccaaatcacaatagcataaataacggtggtagaattttgattaaagaccaggcagtttgcttatcccattcttttaagacctgtcctatattgtttatatttgatggggtgtaggaagttaatatgtaataacaaatgacccccaaacttagaggctttaaaccataaaagcttatttctcatttacatctacatgttcaccatgggctggttgaggctttgccatctgttgacttcgtaactggacccgggctgatggagattctgtcagggatattgcaaggctcataacagaggggacatagaatcatggtgactcatgagctgaattgtaaacttctgctgagaagtatatctcactttttgttcacttttcattgtccgaagcaagtcacatggctaaacctgttatcagcagagtggggatgtataatcctcccactgagagcaatgaatattttgaataaataatatattacgttgctgcaagcaaagggttttacctcttgtgtttttggttttgcctgattgggcctggtacaatgtttaatacctagactgtttgactctctagcatatacaattacagattgtctagttttgactctggtacaaatagatggcatttctctccccccatatcttctaggatgcctattttttgagaggataaaattaaaaataaaaacctctcagggtagcctgtttttttgcactcttttctaaactgctttataaaggacagacatatttatcctttataaagacatatgtgtatatacacacacatatacacatacatacacatgtgtgtatatatatgtgtgtgtatgtatacatatacacacacatacatatacacacacaaaatatacatgtatatatacacatttattaggttggtgcgaaagtaattgtcacttttgccattgaaagtaatggcaaaaaccgcaattacttttgcaccaatctaacaagcatgtgtgtgtgtgtgtatgtgtatgtacatatatatatatgtacatatatgaccttggaagagatctgaggtatggtagaggtttacctcttagaattgtttcgaggattaaatgagatgatttttaagcagcctttagcagtgtttgtgtggcacatggtaagtgctcaataaatattatcttattagtattatttcaagcgtaatatattttgatatctttagagctcaattgatacttgaacagtcatgaaaagaaatgatttactttaaaaaacacttgaaaaactatcctattagatgaatttatattttattataacaatgcatgtagacacacgtacatacacacaactagaaaggatatatgtgagagacatatgtatttatttagtcacaaaaagagcaaaataaatgtgccaaatcatttgaagatcatttgcaagaaatctgcaccctctaatccaccattatctttcaaaatttcatggttactttcttggcgtacatggacaaatgtttccactccttccataggacactaattctaactttggcctcccattaactgcaaaacatctcatgcaacattattctgcaggtttagctgactttattggttaacatcaagaaaatcacttaaatgttaataatttgaaatggaattgaactctcttgaactaaattttttattaaagcacacatggttttcacattgaaggaacaaaatattccataaaatatgttttaaatttaatgaactcaagactgttagcaatcatttgaatcacaatgaaatcaacatgtgtggcaaagatttgtctactctggtaagcagcaatgcatttgtgcaccaatttttactttaaattttatagaactataacaaaagagaatttcagctcagttcttgaaatcatggacaaaactttgcagaaaaataaatgagtcatatcattcaataccatacatacagctgagttgacttttatccaaactcattatatattatcattttagtattgtcccctgcattttctttgccttctcctctaagaaatattttccttatggtagaaatccaattattttttcccctgtaattgaaattttctgttttcatgaggccaaagccgagcaaataagatagaaatggagagtagtgagcaagaaatatttgcagaacagaattatatgggagctccttccttgtatgtagggggcacaggtatgaatgcatgtgctagaacaggttttcctcactgaaacaagtcttatcacagaatcactatgtgaattaatattttggaaaatgaaataattccttcccactgatttataactatagagatatttaattcttttctgatcaacctttaacattgtgaccacattttccaactttgaaattatcaatcttgaatgtgtccataagaattgggaagtacagtatagaaccttaagatccatcagtgcttttgtaaagtgaaataaactaatttaatggtagtgataactctcagttgctctcttttttaagttgatcttttaatgttttgtcatatgctatttttcttggcagtgaatgtataatgaaaaacctgtccataatatgaatgattaccctataatttatctcctttgggggtgtagacgaattgcaagttaaatatcaggaaatgcaggatggatgaacacttctctgggattgagaatcagctgagtctaaggaattttgccagaatagtatagctcatgatgttggtgggacacatggctccataaaagtcccacccatcttgtgtaaaggaggactttcaccttttcatgccctggttcccatggtgactggtatattattagtttttggcataatagtggcattgtggcatatcatgttaaattatagctagggactcagctgcaaatgtttttgcttcctgatttatgggagatagcatgattgagagaaaagaatttgtaagcagtaattagaggagcagaggtaaagaagtgcactgagatatatattttttttcagagaaatgcagttaatggagcatgtcaatgaaaaggattttccatttttaggctggctggtacgtcccctgtttaataaaataagactgaagtgtgccttttactttctatacagtctgacaaaggtaatttagaatggagcttttcgatgtctgtaggctgctgctgccaggatttatatcttcatgaacgaaacacaattgcagatgccttctcaagctgattgataggcaataaaaaactgaaacaagagctcaatctccaagaaacaagaaaaagttgtgtgtgttaaatggggcagagagatatctgctatcctcttgtgatatttgtgtctattttaatgcctatgtagatttgtgctgtggcacatgaaaccaggtatatattaccaatgtaacatgcttcatttgatttgcaacattttcagtgaactgcatatctcatagtgctcagagccaacctaaaatttctgactgattagaattgtctgcatttgtaaatcactgaggctggacctggaaagaaaagggatttggctcctctggggcccctggtatacattgtgcttaatagaagaattttgattcagatccttgtttgatgctgaaattattcttttttctccccatataaaatctcctgaaaattgaaggcaaattctataaggggcacaatatagatcattgtttattatgcaacacattccttcttccctcccttcttccattcttaaaaatagtttttgcatctttgcttatctttacttaccctacaaggatattgctatctgctgtgaagatagacaaaactgaataattttgatgcaatgcatctggacaataatagataatgtttgttatagaggattaggtctgtgtaagacatctggagagatagagtcagtaactctgttaggactggggatgagtcaaggaagacttcacctaagagcacaagcagaaagaaaatttcaggcatggagaatagatggtaactcaaatacatgaaagagtaatgtatttccagctgattagctctggtcaaggctccaaggaaggctgaataacaaagggtaatgacatcaaccttcccatactactaagctggtttaccaagttgccttgatattgtgaacattgatggacctttaggacaaaagatacggtcaggagcaaagactcaacattaaatgtcctcttgatgaaagtctcaggtgctggaatgactgtaatatgaggataggcaagatgcacattgataaagaagttccaaatatttggtgcagagagtaagaagctccccagttttggagaaagcattaccaacgaaaggatggttattagtaaaaggttattctgagacttctgtcttggattactgatgatgttgatgcaggtatagaacaagttaagtctgaagtactgatgagccaagataactgtcttatagctagaaatatgtatttcattctagggcagaagctgaaattgcagatatagatttgagaatgtccatcacagagctggtagttaaagccatggagtagtggatgagaatacccaaaattgctgtacatgaaactctacaaagccacaaaatttacttcgcggtcaagaaggaagctgagagagagttataatgattggcatttgtctgtggtcagctgagcaataatttccccctttccccttcctaactgtgcccaggtttttgtttgggtatccatacatcttcccattatgttgccgagattccttaggaatctgtctcaaacacagctctagggatgagccatggtttatacagccattcagactaaccttatatcactgccataatgattaattcaaataacccaagcctaagtaacatggcattttcaggatgggaggggcaaaagatctaattaaatttaattggacatgatgggaaatttgctggatggaggtttctggggaaagtatatcttctgaaagacagtctgttcattctgaaaggtgtgacatgttaatatgaagcttggaactgttacaacataggataaaactgacaccagagatgcagaatagaaggaaagaaaccaggtccttggacaagctgcctaatccaatcagctctgacctctgccttatctggaaatttcatttacattaacttatatgttgttattatttagaccaattttatttgagttttcctttgtttgaaatggaaagcaccctgatagctgcaaatgaacaacatgaggaatgtagttaataatattgtattgcatattgaaaatttgctacaacagtaaattttaggtgctcttacgacatacactcacacacccaaagtgacaatggaagtttctgctgtgtatgtatataaaacaccatgctgtataccttaaatatatacaattaaaaagggacatgttgaaataagacattaagaaaagtgtcaaatgccacagaaaccttaggcatgagtttggcaattgcagttctttctctgtctttgctagattagccctgtttggggagagggatggaagcagatttcagtaggtagaagagtgaacgggggaaaataaaatgaagacagcaagtttcagtagggcaagcatttttgtctttttaaaatgtatgactgaccccccagcccctggaagagtacatgagaagcagtaagcacttaccatgtactggacagtggataaatgtgcagacattaattgcacatttcccatttaagaagtgtcagaagagaatagaaatagtgtgtcaacatactgaaagaagaggataagtaaaaaataatttaaaattagaaaaaattttagtttgggatggtccttactatgtaattagaagacattcaggaaaacgtaaaagataatagaaaaagttaagaaatgtgaagaataggcctataaaatttttgagaaggtaaaagatgcaaagagaaaatctggaaagtttctaaagaggcaaaaaaatattaataagctacttacaatggaagaaaaatgagattagaattctggaagcaaagagattgtggactaactggctgcagatcagtaggaggagagggctacaagctgggaatgtggatataattcatctgctaaaggaaaagaaagatatttatggatttgtgagaattcagagaatatgtcatgtatatgccccaaatgggaaagattaaaaaaaaaaataaagctttcatcagaaggaaactccagcatgtggtggcacatgcctctggtcccagttacttgggaggctgaggtgggaggatcacttgagcctgggaagttcaggatgcagtgagtctgtcttgactgtgctgtacaatgcagcctgggtaacagagcaagaccttgtctcaaacaaaaaaaaaaaaaaaaaaaaagaaacttccacataggtgactataagtcgaaaaacaaatagcaagcaagcaataaaccttaaaatgtgtacaatgtacctaaaatatataaccaaggggatacaaaatgtttataaataaatagtagtgataagataacaaggaatgcatgttttaagtgctaaatacaaattgttgaaacagaagggacattcagagaggaaaaactgcagttactaaatgttcatcaaaacttaggaaggctcattctacagggttcatcactaaaagggagaatagagaaagaaaagtctctcagtggccttcttagggaagaaaaaaacaccaccaccaccaccaccaccgtggggaaatagcacatctcagtcaggaaaatagttgttattttggtttcatataaaaagagatagatgtaagaagttggaaaagagaaagtaaacactcgtagaatggaaaactacagaatttcatattaagtccaaggaaaagaaggaataaatagtaaaacatcaaaagcaagcaaaaaaatagtgtaagcaatattaaagaagcaacaacaaagtaaaacagtagtaagcagtaagatgtaaggaataaaacaaagtaactaaaagttatgttaaatacgacttggccaaattctcttattgaaaaattgacactgagagacttaaaaaaaaaaaaaaaaccacccagatatagtcagtaatgaaacactgaaagttatgaagaaagtttaaaaagagaagccagacaaaggcaaagaaagagacagaatggcaatattattaggtggggtagaatttaagattaaatgcatcaaatatgtatatgtgaacaaagaatgagttagatctgtcaactctcttgagaaaaaagagatttctatgtgcgaaatgatagatgtagagaaaatattgtgaaaataatttttgtaaaacaatcttccatccctaagtacgtgtaaatgtgcacgtgtatatgtaattctatgagcaaaaggaaaacgtggaagactgcagactggtgtttagtattggccacctagaagggactggggcagcttgtacaggatcaggtgcaggtgaggctggaggaagaaaaataaggtttcaataacagctgacttgtggcaaatgcattggtaaactgcccatcagctccttcctaaagacttaggatacaggccctggattcaggagacattggagaatgacatcaaagctcaggacgagtcccatagaaaaggttctagaactgactcacagctgcctgcttagccacactacttaggagaataaattcctttttattttgttgtatataagtatacaaataaaactgcaaatagcattaaaaaaattaaagtgtaaaaacagatgcttgagtccaataacaattggttgggttcccttgaggcctagaaaattttcaaaatgttctggatgcatacgtgttaaggagtgttattaagtcaattttccagaatcctggtatcatagggctaatgtaagacccaagggtcaagtgtagagagaacagcagtatgcactgaacacttgggatctgtgcttcactgacatttcccacctgcagataagttttgaacggatacacatacagattttcctgttgtttccccagccccaggtaattgctttgaacatcctgcgaaggtctggagtcacttgtatttgggtgatcgtaagtaagaaacaatatagcatataacatcttggtaatttagaattttctctatttcaaggtccagtaattatgaccatgactgacatgaatatcgaaggacagacaagctttctaaccaggacataggaaattacctgatatgaaaaagcagattaactttgtgatatatttaggtcaatttagaggtgagatggattttttttctttctacagctagagaaggcagccagccagaaagccccctgcttaacagagaatccacaaaagggatgagttcatttacagagggctggattgattataagggtgatgctggctctaccagcagaagcagtggcagggtattgaagactggaggagactccagacccttcaatgtagctgatgacagcaatgtgtttctcaaactgagaaaatcctgaagagcttgatggacgataagcagccactaatggatgggggaaatgtgatcactaatggagaggagactggcttaggacatgggcctgggagaagccccagaggctttgtttcatggtcagtttgaacagattagactactggatgctcacagtgctgctggctgctgcttccaagaaagattgacatgtttgtcttgacatctcgcttcaggaatggatggatacacagggaagcataaatttgggactaaagtgttctaacatttctcatgctgtatgttcattcgtctcttcgggcaattcagcacatgcgtttatcccattaatggctggagaaaaagttctgattaccttccaatttacatgattcatattagtgggttggagcagtaatggtgatgaattcttctctgcttaggttgtgcatgtgtttagggcccttgaaatctgagaatagccacactgtaagtagctgagcctctttctctagcacctgctcagatagaatttgtttgtaatttaaacaaactaataaacaacatattccaagctggagaattctgaagatgatgattatggcaaattctacttccaattttagctgtttgtggtgctttgccttgattttatggatttaaatttgctttaggttaaacaataccttaataatacacacacatgcactcatatgcatacacaataacacaatgtcagcaagcctagctagtttgatcttcagaacattttgttctagtgttttatgtggctgccataagaatgttatgggcaatgtggggaaatgtcagcatcctattgggagagcagcactggggtaattttttatgtcaagtttatttccctcctgcaagctgacatggagaaagaattggacaggttcttgatctaaggctctttgtctcctgtcttggttatgcttaggccaagtacttttggaggaatggttgagctgagccttctgcagaattttgattctaaggtcccaaagattttttttttccatagacagagtctcactctgtcgcccaggctggagtgcagtggtgcaatctcggctcactgcaacctccacctcccaggttcaagtgtttcttctgcctcagcctccaaagtagctgagactacaggtacatgccaccatgcctggctaatttttgtatttttagtacagatggggtttctccatgttggccaggctggtcttgaactcttgacctcaaatgatccacctgcctcagtctcacaaagtgctgggattataggcatgagccagtgcacctggccagatcccaaagattaaattgtataaatggcaacagcagcaagagccagagacactgaaaagtagtgtagagtagggattgagaatggctttggattttggagtttcattattaaaatctcagctttgacctttggtagttgcacaattttaggcaagctttaattttttccataaacacttaggatagtttctgccctatgatgaatactcaatctgtagtgcaatgatattgatgattgtatggacaacagacttactttctttttaaatcagaacctggcaatcatttcctgcctcctttacagagttacagattctgaatatctaagattagggccaaggtgtctgcgttttagaaagttccatagatggttgtgtaaggagtggatagaaaattatgtttctggtgttgggagattctctgacctcactcagcttggtctctgaacatctatctcagataacattaggccttactccatgtagctaaactcctagtcccgactcagcccttacatgtttctatacaatccctgcctcactgccacaacgatttctctgacctgcctcagaacactacacttcagggaatagagagagtgctgctaggaagatagtatttgaaatgaaatgctagttagactgaggcagggcagatctgtgtagatattaagctgatgaggtgttaaactaggagtggtagaatcatataatgcatgatgaatcttgcataggcaaagttgaaaaacaaactgttctgattcatctgtacttgttgctgaaatagttttatcttaactccctatttttctgtgtgtgttaggtctgcaagagggtactgaactaaaatcctcagattggaatttgctgtgctaactatatgcattgtttggagaacagtgaacattcaaaattgtattcacatatgggcagtcccaggttcacagaggtagcaggatggagactgagcgcaggtgagtagaccatggtcattcatggagcatccaagtgtggtaggactaaacccttacagccagggaacactgtgagagagtgaagacaatctcagagacttgggagcatggtcaaggaattacactcctgggagagatttctagaagtggaacatggaatcagaagtacaatgatgtgaatctgggtaaatttctatgatgtagtctcaggaggacaggcaaaagtgccctagaattaaatgaatgggcatcaaaaagtaatgaacaggctgcaaatcagaagaaagcctggggatgccactttttctttggaagaaaaaatgtttttgttattttaagttccgggatacataggtagaatgtgcaggtttgttacataggtatacatgtgccgtggtggtttgctgcacctatcaacccatcatctaggttttaagccccagatgcattaggtatttgttctaatgctctccctccccttgccccccaccccacggcaggaactgttgtgtgatgttcccctccctgtatccatgtgttctccttgttcagctcccacttatgaatgagaacatggggtgtttggttttctgttcctgtgttagtttgctgagaacgatgggatgtcgctttttcatgttggggataacctaatgctacaatcccttcaagatagggcttaagtacttcctgtttcaaggaattgtcagtcaaggagattagcatatataattgtggggaatcttgggaaaaacagagcccaaagcaaagaggagagagctctcaccatcagagcatttccatctttgaatttttctaaatgcagtttgcaaagtatcatcacaggcgagtaccaacaccagctagcatttattgatcacttactctgtgccaggaattagactaaatattttacatgtgtcatctctttattctttccagcagccttattggtagatttcttttatcatctctctttggccattcaggagatgaagtttcagagaagttactgtgtctaggtgacagaggtgtaagtagaggcaatcgaattcagacccagatgtgttaactattctttatctcctgatcttaggtattatttatcgatctgtgctaaatcacaacagtccttcctgaagtaattttccaaatttctttccattgtaccgttaacttaccaagaaggaaaatgaagagatataatacactatatatctctatctcgctgtcatctatcttgctatcttcctttgccactctctctctaatttgtatctatacagtgttaaaagagcatcagttattaaattacataaatactgagtttatattaaattatataaatcctattctgtcttaaacatttagtaagatattctccttggactcaagaaatgcatggtccagttggaacgataagactaatgccataataacatactgaaggccataggtatcacatgctatataatcaggcaaaaaactaaggtctaaaagtggggaaggcctctttgatattgagaataatattataggcaagggagcagttcagctagttcatagtattttgttaaaaatcagctgatctggctgggcgtggtggctcacgactgtaatcccagctctttgagaggccaaggcgggtggtttacaaggtcaagagttcgagaccagcctggccaatacgatgaaaccccgtctctactaaaaatacaaaaattagccaggcgtggtggtgtgtgtgtgtgtgtgtatatatagatgaattagcattaatgacattgaattattttgaaaggtattttcagaagcagacctgtgtgaaactgattgttctattaaccatatgaatgtttctaatgctaaattaggaatggctttgtttcatctgaacaactaacatgtttttacatttgggccctgtgaatctttaatgtgttcaggtttccttctcatgcttcctgtaagaagatttaaagtcaatttttttccctaaacttcagcaaaattaaaaactttatatatatatatatatatatatattctgggagctaatctctcttactgatctcctcttacttgtcttcttatcatgatttgtccttactccaacatgtcttttcaaaggtaaatttataccactacttagcatatcatttcaaaatgttttcttgtcctttttggaacaagacaggttatgaataaacaattgtatgaggacttgatcaatctaaaataacagctatcattgtattgagtgcatattcactcattttgcgcactcaccatgagtgcgtgtcacccattttatggaaattatgtaatattcacaaagatcctttgatgtaggaaacattatctccatttacagatgatgcagccagtttaaaaactagcaatggatgggaacaggcctcaaacccacatctctctgactctaaagccttctcacaactgagagtttatgtaactagatgacctagatgcacttcgcctcagcctcagaccccttcccagttgagctctcttgacagtcactggtgatcaaccctacttgactgggagaagattttaagttccatctctggatcccatgctcgaactaaaacatttctttttgtggtattaggaggttactttcccaactattttctgttttgttcatcccttccccatcgctcccaagtaaatgaaataaaaattggctgggcacagtggctcacgcctgtaatcccaaccatttgagaagccaaggtgagggtcacctgaggtcaggagttcgagaccagcctggccaacatggcaaaaccccatttctactaaaaatacaaaaattagccaggcatgatgacatgtacctgtaatcccagctactcaagaggctgaggcacgagaattgcttgaacccaggaggtggaggttgagctaggattgcacccctgcacttcagcccaggtgacagagcaagactccatctcaaaaaaaaaaaaaaaaaagatagcattagcagaatgcggactaaaatttatattttaagaaggaatacacagctttgtgaacttaggatacttggacaagtatctttgagagctcagtttgattctataaaactttccttcacatttatgagtctggactttgggactgtgatgagtatttcacttgatattcagtcctcctgccaaagtgaaactatggccctcttcctgtttttaaatcaaatctgtacaaatcactcaaccatgcaaaatctctacctgcattaataaactgatgacctaaaatcagacagaagggaggggtgatgtatactttatttgatctgttggctggctgatgaaggcagacaattttatgagattcagattcatattttgctttgaatctacttttctttaagtccacagaatgtttttcactctcaaattttccacataagtagctttgggagttgtctcttcaatccattctacgacaggtcaacagagatggaagcctttgatatacataggctttctaagctgtacgtagtctgtaatatttatctgttgacatagttcagggagaactcaatttatttagaatcaagacatgagtacttgattgtggctgttacttcatttgcttcatgtagatagtattgtactttagacccaggaatataagtgtagatttgaagctagtatacaaataggttatatttttatagcaaatcctatctcctttttttgatgtctgtagggactgaatacttttagaaggtatatattgcagaatgctaaggagtatcttagaattgaatagaacagtagaaaatgagtcttgggaaataaagtaatatagttaaaataattcatccaaagtaaagcaattgttctatgctcagatcttcaaaattataaacgaaattgtcttcttagaaaatggttagaaaacttcaaagaatttttggtgtagatttaggaaaggcatttgtgcgagtgttagtttctctacatcttttctggccccaatcatttgtttaaatttatagtttctgaagtactttgttttgaggtaaaaacaaaattttgtctgatatagtcaaataattgaagcaaaattggattctgtagttaaataattcaaatactttccttaaattctcttatcacctaaactaacattggaaaacaaacaaaaaacctctaactacatattgtggatggtatagagttcctgggatacagcagatatacggtgtcgaatattttaggacattcatcaattcattaattcaacaattatttactgactacctgctatacaccaggcagtgttctaggtactggagattcagcagtgaaaaaaaaaatggacaaaaaaatttctgttctcttggagcttatattctgttttagtctgttctcacactgctaataaagacatatccgagactggataatttataaagaaaaagagctttaatggactcacagttccatgtggctgggcaggcctcacaatgatggcaggcaaaggaggagcaaaagctcaaattacatggcagcaggcaggagagagagcatgtgcaggggaatgccccattataaaaccattagatcttgtgatagttattcactatcatgagaacagcaggggaaaaccctccaccatgattcaatcacctcccaccaggttcctcccatgacatgtggggattattggagctacaattcaagatgagatttgggtggggacacatccaaaccatagcatattctaattagggaggaagacaatatatgctataaaactcatagcttgttagtggtaagcactaaagagaacaagaagaaagcattggaggaagacaaagtttagagcctgtggccagagaaggctttgttgagaaggcagcatttgaggagagatgctgggagggaaggagtactatggtgacagtacctctgtattgcagtttctgtgcctttctgtccttggcttcctgtgaaatggaaggcaaggaggccagcatggctggagtagagcaagggagaggaagatcaagatgagttacacagtaacagttgcagacaggaggtagatactgtagaactttgcaagtcatagcaagggctttggctgttactctaactcagggcttcccaattggaacactattgacatattactacagggttgtcctggggattccatgatgttttgtagcatctctggcctctgtgcattagattacagtagcacttccccagtgtgaaaatttaaaaatgtctctagacattgctaaatatctcctgggggacaaaaccactcccagtcgggaaccactgctcaaagtgatacgagaggccactgaaaggttttgaagggaagattgcagatctgatttaaaatgtaataggatcactctggctgcaattttgagtacaaattggagagagagaaatcatacaatatttctgtagttcaatggatcctgatttttaaaatctggatattgccaatgagaatttttttgcatattcaaggatctcttctccttgtatgatatctcatgtgctcaatagttaaaggaaattcatagcaatcacagcaaatccaaatatgccatctctcctcccactacaaatcagaaacttaaaattttcttaactcattataaaaaagaaatctctctgtaggttaccaagttatcagtaaatgacactagaagactttggatttaatataaaaactttaaaacatttctattgcaaaaatccatagatatagttaaatgagacagttgacaaacattattttgtatatatttgtaacatagaattttttttgtatttttattttgtattttttgtttatattttgtatatacaatttttatatatttctatgtgtttgtaagtatatacaagggattaatatcaacatataaatttcctcagagttaagaaaaaaagcttcaataggaagaaaggacaaattatataaatagaaagtacatgaaataaaaaatatagataaatggaataggaaataatttggaaaacatgcttaataccactaagaatcaaataaatttaagttaaacaataagatacatttttcatctatgagactagcaaggataaagagtatcttatttgatatttacaagaaacagatactcaatttacattgctaggtaaagagtaaacttttaaaaattgcaagccatgaatattttacttctaggaatttttcatatggaaataattagacaagtgcccaaagttataggtatatgttttgtgtttgccactgaagagtggtatcaacccctcacccaaaatagttttgaatgtgcagactgataaagccacacacacacaaagatggtatggaaaggcttttaatttacataacaggactttctgggagagcatggcagaaacccaagccaatctgcaaaggctccagtgatgcgagaggtgagaggtgatggttctgattgtggttagggattggagctggggtgagtgttcctgtgcagggccagccacttgtgtggtttgaatttcctgctggcaccaaaagactttcttatgggcctgcccagatgtggggcaaaaggggcaagagaaggggtgggccttaaacgctgtcagtgaacaaacaccaaaactggagtcagactctttattacaattcattcctgatacctgatcaatgatggaaatgtgccatgtctcatttaatgaaatttgaacttaaataggctattctggcatcctgtgaggcctgcaccctgagcctggtaaggaatgtaaaagttccattcaaggctttggcgaatggcccagtgttttgtattttgagaaataaaatgaatgccttggtcaccatcaaaaatgactagaactgaagggtataaggaatgtcttggtgaggccttgtgtcatgcctcagggcacagagagataggtgtgactttggtgtgtattttaggtatctgtgggacaaagaattcccagagttctttctaacgggataacctcagagaaggaactgttgctgttagcattaattggatcagttagccagaccattgtcaatagcccgagagtctgtaaaaatgtgcagaaagagcttcctattgtccaagtcatcttctagtgctaaggcgattgcctgaagtttggtcagttgttgtaacccttggatctcgtctttgatcagggatatcccagttgggggatagacagcaaaagctctccagggagcttcaacacatgtgatatctctaaaggttatgaacaccctttctgatcactcagttgactcctgtgggcctcctaagtggtcactgggtccaaagagggatgaccttcctctggtgtcatcgtacatgacaacggaatgaggacaggggaagctgcttcctctcataggtggaatatgccagagggtccaggtttgggtctatctggaagcacaatttccattttcattaggaggtcattggccatgccaagacttcagggttctgtccctacaacctgagacataacaatcagctaagtttggagagtcataggctcagggcttgtggaagccttcatctccagaagggccttgtatgaggccagaaattgctgctccactgcaatgtggcattgggctgggaagggcagtttcttgcgtcagaaacacatgggcaactatggccactatggttggtccagtggctctaggaggcctgagaggaggttggtaaagcctctacaggaaggggtctctggcatactaatgggagttcctgttgcatagcaatctggatggattctagagactactgcccccacctgccccctctttttttgtagaggacccagttcaaaatggggcaatttgtcagtgatgacgaatggcccaactttaatttactgatgatgctgggattgagacatgattcaacctgagacagatggataggtcctggccaaggcatacaacccagattcactataaagcaggcctcaatttcatactcctgtccctaaatgctaattattggaacatatgacttaggtaggttaagtctataacagacgctcagagtaggactctacaagtggatcagaacatgggaatgctcaaaatacaagcttgacagcagacagccacacagctcaaagcttgcatgagtcagcagacaacaggtcaaagggcatgtttgtaacaacaaatgatccagctggcaagccaaaggcaaaagaagaaagacccaggaagtaggagtcatcatgtagaacttcctgcttgtagcgccaattatacctctcaaaattggttcagatgctgagactgatgatgccacacatgcagtaatgggataggaaaagtttttatactcaagcaataggatcatttaaaatggtttgcaaaacagaaggaaaaattggctttgatttttattgcatttaggggttggagcttgggtgagggttcctgcaggatttgtgtggcttgaagttcttctctgtgctaggagtagcagcaccaggctttcttataggcttgcccagatgtggggcaactgggggaaaataagggatgggatttgaaaggggtcagtggtataatatcagaaaggaagtcagattttttattataatatattcatcataattctacttatactgacaaagaattagaaccaacttaaatacccaaggagaggatgtggtcaataattttgtagctccatgcaatgaaatattgtgagactggaaatattgataggtgaggaaattaagttatgtaaagtaggtgcaatatgacttcattttttgtgaatatgcacatatacatctaaacacacatacacatatatgcacataaaattagaagcgaatgcacaaaaatgttaatgattacttctggtaggattataatgaatttcattctgattttgtttatttgcattttcctttaacatatatttgatttgtttttttttccaaaaaaaaaacaaacaaacaaaccaaggctttttattgaaagtttgtttttgaaacttttggtttttaggccatttctagcaatggggccacacatagtgtgtaggtgagaggtggaggctttgctgcatgtggcttttgtccttctgctgtgtgttttatcattttgcctggtctggtttaaagatgatccagatggccaaaattctatgctgagtaaatagctttgctgcatggtctgtttaactctgatttaccatggttcagaacatcttgaattacttttgtatttattttgtaattttataagcctgcaaatttcagaagtagaaagatattcagagttactatggtaaattactttcccctccaatttttcagtgccttgcctagaaaatgataagatctttataataaaagttttgaattctgacaactgaatagggtgagaatttggcccatcataaagatttctttattagtaaagcaaattctgtttagaggacacaaacacttcatagtgtgaatgaaggacatattgccagtgaggcaattaaaaactaatttgcatgtttgaaaacagcatttctttctcttaaaagtgaaacgacactgcttgaaaaaagtcactaggtgtttgttttttaaatttttaatatttttaaaattatagtcactaagaaaagtattcatttaaaagttgatttaggaagcaatctaaaatttggaagtctattatgtgacatttactttcattatcagaatattaattacagagataacaaataatgcccagtgggtaatgctatagaactttatttttttttttttcaatatggagtctcgctgtgtctcccaggctggagtgcagtggcgtgatctcggctcactacaacctccacctccctaggttcaagcaattcttctacctcaacctcctgagtagctgggattacaggtgcccgctaccacacccaggtaatttttgtatttttaatagagacagggtttcaccatgttgtccaggctggcctcgaactcatgatctcaggtgatccacccatctcggcctcccaaagtcctgggattacaggcatgagccacaatgcctgcctgccatagaactttctgaagatgaaaaaaacttttggcaataagtgcatttatttcattctagttattttaaaattgataatttggataacgtatagttcccatttaaacatactaagccatgtatcagaaaacttattttcttattgccaaatataaagaatgtatagaatatggtttccaaagaagttagtgacataagactaaaaaagaaaaaaacttgtcttacttgtcttacttccttacttgtctattatattccacacagagtaagaatttttacccgtattcttcatccatttcttgtttcctaaaattactctaacaactctttttaagcattcattatgtgccagtcttaaattaggggtcaagatctcttccttgatggaatttacacctgtctttgtaattttagccttattgaaacttttccaaagaagtatttgtagttgactgatgagcagggtctgttttcaactccattttctcagcatccctcctagctaaggtgtgggcacactggctccagactttgaatgggaagagagtgtcctgatgaagcagagaccatagaaaaacaaaataaaactgagctggtgactgatggaagcagtagggattgaaagagacatccattttccagaggtggccatagtatctgagaggcaagctgaggcatctgccagtaggggctccggtggagttccttagcttaagcctggttctctggtcttccctgcaatcctgtcagctactcagtatcttttaaatcaagtcttttcttttttctttttttctgaacaaaaccatagtcagcatctgctgcttgcatctaagaacctaagtcatttaatattattaatctgatatcatcaaggagggaataaaatcagagtttaatgaagacctatttgtctataaagtccatgctctttctaatatgttgtgctacagagatggcttcttttccaagcaaagctgcctctgggtccagttttataagaaaatcactcttggctcattaaaacctgtatacccttctgcagtggcacctctaatgagagcagggacaggctttctcatcctaactcaattcaggggtgtctgtgatgctgaaaccatcttcagttcattcaacttagtgagaaaaagagtgcaaaaaaatggctgtaaaaataaagcttagcattgtggaagtggctcattgacttactgtgtatcttagttttcaggtcattgttttgtcatcaagtataaaataaaagtattttttgttttgttttgtttttgtttttgtttttgtttttgagacagagtctcactctgttgcccaggctgtagtgcagtggctcgatcctggctcactgcaatctctgcctcctgagttcaagcgattctcctgcctcagcctctcgagtagctggaattacaggtgtgtgccaccacacccagctccttttgtgtatttagtagagacagggtttcaccatgttagccaggctgatctcaaactccccacctctggtgatccacctgccttggctctcaaagggctggggttacaggggtgagctaccacacccagccaaaataacaattttaaagtaaaacctggtcatcttctgttagtgatggccaggctgtgtgaggtgttatagagctggagctggggccccggtcacaatgtcttattccactcacccctgctgttttgtggaacgtgctgtcaagatttatgtttgttttgaagttaattagtctgatgtaaaccttatgtgcttctgattaattagtttgacactagctaactctgatatgcatgtatgatctgggacaacataggttgggggtggaggagggctggtggctcccaggaggcagtggatgggaggtcttcccctaagaggacactccatcctctccattctccattttattctaacaaaacctgcatacattttacactgacttggagaaaaaaaaaagttcacagctcacactgtgttttcatgactcaccatttttcatgtttggactagttttctgacagtttcttttttctttttttttttttttaaaaaaaaaaaaaaaacaaacctctgggtgtattttgtgaaattttgatggtagttgtaagtctcctttttgtgtaccagagcccttcatgaggaaatacttgctttttcagattgtcttacctcttctccttcccagattgatgacgaagtcttagggcagtttgccatgtgtcggtggctggtggagggggtgttaggagggagggcttcagatctgcaggagagtcccagagttgttttctggctccctattggactctacagcctggttactcttgtccacaaggtcactgctacccctgcctgctgcagcctgtggctggagagcatataaaaagctcacttgtacaaaagtatttgtaaggagactagggtcagctgcttctcctctcctcttcctgcccaaactttttcttctataccttcccccatcttcctcttccagtcctgcttctcggaaagaaccagttaaggcccatcctccctccacagggcacctaagaactgtggataccttctacatagtgtgcaggctgctggcagaagttctagaaggataaactcagacctgacttctccttcactgcaccatgtccatgtgtttactgtgtggtggccactccatgcaagactcttcccacaggacaaaatgtggaactggcaaaaagccctcccacttttagcttctcttcaacctatgtaatatgcttcctaccccaacttcagattttggcttaaagtaaagaggaggtcttgaccactccccactaatctttttcttcccacagtcttctggggttggaagaaatttctaggatagcatctgtcctgtcttgactttctctggatcataatagctgtcaagttgaaacaaaagaaactggctcattttaagaggagtttcaaaaattttatgtcctatgagtgtgtttgtgtatgtgcctgcgcatgcatgcatttagttctattgaaattggataggtacatattcgctgcaccttgtagttgtaacttaatgtatagctttccttttggaaagtatgcataatgtattagtctgtttttaccctgctgaggaagacatacctgagactgggcaatttacaaaagaaggaggtttaatggacttacagttccacatggctggggaggccacacaatcatggtggaaggcaaggaggagcaagtcacgtcttacatggatggcagcaggcaaagagagcttgtgcaggggaactcccctttataaaataatcaaatctcatgagacttattcactatcacgagaacaggggcagggaaagacctgcccccatgattcaactacctccctctgggtccctcctacagtacatgggaattcaagatgagatttgggtggggacacagccaaaccatatcacacaggtaaatactttaaataattattttttaaaaggagataggtgttcataaggaaagccatcaccggtttctcccctctctatcccatcctattccccagaagaaaccattattacctttttatacaaattctctttacattttcctgctaattatatctacatcactaaatgatacagcacccttgtgaggagggaaactgtcagcctgcagggatcttctcccccaacctggaggtgaattcagaggtggattcagtgcttagggggtgggacaacagctacatcagctgcattgtctctgtacagacttagaagcatcaattcctcactgagagctcattacttactaaatgtatgggtaagatcaaatctacagcatttaaattaagcatgcccaattatttacagatgtcttaaaatgtgaaaaccacaacatttataatgaagattacctatatgtaataggtatgtgtaactgatgcactgaatgtatgactcataagatggataaaagctctgtctcctgacgtccctttcaacttcattcggtggaggaagactttcctcagctcctcaatagagttactgaaataatagactgtcccagagtcaatatatgtcacaaaatagtcataattcaagagttaggagcatctagtccaagctgtgaatgaacacttctgtctttattgaaagacatgacttctcaccttctcccagctaaggtctggggtgtactcactacctgcaccctttctaattctatcccccagtggatgttctatacccctccaggggtgaggcttggggaaagaagagaggtcagaaggcatacaagtgtctctgggctgaatggctttattctctctgggcttggcatggtttatgcccactctctctcttgtggtgtcttccataggctcttttgaaaatctcaaatagaggacctctcacttggctgttcttgacccaggagattgcctgtccattctaactagtcatttgaacttccttctgtggccttcaggaactcatgttcatctctagccccttgctgaaagatctctttgacctttctagaacaccagaggtgacccctcactagctccttctcactcatggcacatgggaaacactcacacattctttgcttcaacaaactctggggatggccccaaccccagtgacaaggcaactgtcctggctctgcaaccaaaagcactaagtcacctgggcttataccttctagtttttgctctccataaaatagtgtctagccctctgcctcatattctgcttttatctctatcagcaccctaattcactatgccctaagcttcaagggcttcagagtaagctctcagtggagtctgattggaatccctcttcgccagcttgtgaggtatggggctaggttccacaatattccctttgagggagtagatcttccagccttctggggcatgctctgaaagtcctctttgcagaagtagctctttaaaatcatattctctttccaatttgacctctttttttatccttgttctgtccatgctgtccaaagcatcttggactaagttttgactttttttttaagtgctgcatttccatttgacattttacctttgtaaatttctatttttttacctttgtgacttattaaaatattttcttttcaaaaatttaaaagtgacatacaaaattatatgtgtatgtacaacaaaagcttaactataacaccttgttacatactttgctatccaggccactgatcctttcttacatagtaagtcagctatagttcattagcttacagtttttagatacaagtcttaatccatcccttctccttttgtattctttactttctgcaatatttaagactttttgcgttctgactaaaagaaaccacctgaaattggcatatgcaactgttcatgaatgagaactcgcatggaattgaaaggcaggaatgcagcttgaccttagaatggatttgatccaggaactagaaggtgggtaggaagcctagagaatatcctctctcaaattcacacacacacatacacacacacaccctcctttctcctcctctctgcggggctgaagtcttctttcttgacaggctggctttctttgttatcaatattggtggtaagagggaaatgatcactgatgacattcaggttcatatatgacaatgcacactgcaaagccagacttctcttatttctaggaaatggatcctgattggcccatatctgatcaggtgtttgtttcttgctgtagtaaacaggagtggcagcaaaatgttacaaccacagttgcctttgggaacccagcacagaagatgggggatagtaaacaacacatgcactgaaacatctcctataatgcctatgctgatttttcttgttgaattggctgccatctaagtgtcactgcagttattagatacctttttagtattcatttttattgctgttgtagcaaattaccacccagttggtggcttagatcaacataaatttattaccttacagttttttaggtcagaattctgaaatgaggctcactgggctaaaatgaaggtatcacatggctgtattcctttgggaggctctgagtaagaatctgtttctttgccatttccaacttctagaggctgcctgtatttcttagttcatggctcctttgcatcttcaaagccagaaatagctggaagagtccttctcaggctgtattacttacagtcagtgtcttgcctctctctcttataaggaatcccatgattacattgggctcacctgcatcacacaggataatctgccaatctcaagaaccttaatcacatttgaaaagtccccttagccatgtaatgtaacagattcacagcttcaggaaactaggatgtagatatccatggggagggagcattattctgcctaccacagctttcatttgtctacttttttgacctgacttctatttctatgttgtatttgaccccatgttttaacgtttctttttccttcctcttttcatggctacttacctttagctagtcacctgcacctaaagacagaaatgacattctagtgctttatctagtctactctgccccctcactttattgaggctacaggagtttactaaatatgtattagattgactaaagggaaagattacatagccaatagatcttgagaacacataatcttgcaagttgccaaaggagcagataacctaatcagtcatgagtaagagaaagataagctaatcagatgcaagtaggaaaagaaaaagccaatgtcagcagaaattcttaattgccaaaagaagatgacattgaatacatagtggtgatgcaaagtggtaaatgaaaaatgaaagtccaatatgatgtgtttttttccccaaagctactaaggatcttttgcaaaggatctaggaagaatatcattaataattttagctatgaataaaatcagaaaggtaaaataataatatatatttatatgttaattaaaataatggctatcatttattggtaacttagtatgtgagagacattgtgttaagtgccttatgtgtataataatgaaaatactcctgacagttgaggtactaccatttgcagtttatgactgcgagactaagaactagttagatcatgtgtgttgcacaaggtcatacaacctactggtcttgcctctacaacctacttgtcgtatgactttgtgcaacttacatagagaagcctgattataaacccctgtggttcaattttactctatagcctccctattatatacttcaatatcacgcaccccctctctattctcactacaaccatcagaggaaggcatcaaaccatggggaggataagagacttgctcaaggccacccatattttggtggaactagaatgtagaggctaggtcctctactcccaatccacagatgataggtcttaggcagacacaagagaagggaaaataaaggaagaatgaagaggtaaaaaaggaaatgaagtaggaaagtgagacaaagctgagaagaggcacaaaaggaactaaaagttgaataaaactttataaagatattcatggtatgtagtggaacatactgctgtgttttcttgctacctacctaaagtacctgcattatattcaagtggccaagttatccctgttctatgtcattaacatccactttactgtttatggagacagttgctggtcccaagggcctaccagcctagatatacatgtagcacgtatctctcccagctcattaaatcaaggatacagaaaatatatacttatgattggaggacctcttagaagtctgcctaattcatatcccctggcacgcacgcctggcaaaatccctgagtactgtggatatgatagaatagaaaaaccatgattaagttatgctacatggaaccattgactttaagaaagggagttatccaggtagacctcatctaatcacatgagccttttagagctgttgctggggatcagagataggaagtcatagatttgagacacaggaaaatggcttgaagttggcagaagccaagtggcaaggaacttgagtattcttgaactgagagagtcccctgtatgaaggtcagcaaagaaaagggacctcgattctacaaccaaaaggaatgaaattcttccaacaataagcataaatttagaagtgggttttttcctagagccttcagacaaaagctctgcctgtgcgatgctttgatttcaggcctgtgatatcctaaccagaaaacccaggcatgccatgctagacttacaacctgtggaactatggcttaataagtggatcttgttttaagtcattaaatttgtggttgttacacagcagaagaaaacgaacccactagttttatttttctttatgccaagttggtttttaattcaactcccaacccacatggtggcaaacactaagttcagtttttctactttcccagggttgcttctgggttaccacctgtacaaatcccccacggacattgaaggaggctgcactaggtttctctctatttgagttggcatctgttgagtcacctttttctttttttctttttttttcaagatggagtcttgctctgtcacccaggctggagtgcagtggtgcgatctcggctcactgcaacctctgcctcccgggttcaagcaattctcctgtctcagcttcctgaatagctgggcctacagacgcatgccacgacgcccagctaatttttgtatttttagtagagatgaggttttaccatattggtcaggctggtcttgaactcctgacctcaggtgatccacccgcctcggcctcacaaagtgctgggattataggtgtgagccactacgcctggccgagtcacctttttccacagattggtccaggatagtccacatagatcataactaaggtatctcttgcttctaacaagaagtcttcttcagactttgtgtttacttagctaccttactgttccatttaagcttgccaatcacctttgctcctggatctcaccagtgctgtggaaaactctacctgagaccttccctggctaaccatgcaacgtggtttttatcttttctaggattgttaagcaagggataggataaataccagaaaagacacaatctggcataatctctaaatgccagactatcaaaatatacatcacctcccagaattttggcatcccatataagagacataattggactagacataacccagtcaagtgagtgacaggcaaggaccaaaaaacctggcacccacccccacatgccctgccatgggctacagactttgaggtgaatctttccagctccagaaagcaagtagcagcatgttgtggttacaaggcaaatgatcctttctttctcctcttgtattatagctacagagaagctccttcaaatagcctctcagattcatgccagccaatagctcagggtgcaaacaagtcacaatactgcaactaatgtcttctgatatgaaagctatgtttccagagccactggggccaggacgtggactcaagagagacagaaatatgctcactggatactgtggctcagtaaggaaccgtgccagacctctcatatgtaactgttctctccatgtcattagtataagaaaagaggaaactttggatgccaccaaggctagattgttcaggtgattctgctccatcccttccaagctcccccatgtaagtggaaggaggcaagggtgtatgtccgtctcctggaggaaatccactaagttcctagttatggctgacgatgtgtgcctctccttgggatgtcaaaccacatctttcctgctacccctgaaggtatacatttctgtgagcctgcacataggttgtaatatctgccctttctacttgcacatccagtggcacctagtgaaggacaagtcccactagtcctgatggtacaacctttacaaagtgtccaaggtgttatattacccctaaatgggagaaatatctccctttggacatggaggacgacttggctgagttgggatgccaacaggggagtgattaggggtctttgtctctggactactgcagccctggaacagcaaatctgccctgagggggaaacaccagtacagcatgatgaagccccacccggttgcctgacctgaatatacctggaatagttgtctaaatgtctaaatggggatgagatgattcttccaggctggtagatgacttgcattaagaagttaatggagacaaaggatcctcaaaacgagtccatgtttttttttatcaaaacagtaagaaataaagatgaagtgggggattgagtgctggaccacaaactgccttatgagattatctcacaccaaataatgtgactaaagctcctatgaaaagagatggacacagaggaaatgatggcttctcaaacttttagatgcaaggtagcttgttcatatatggaaacccaaaggaagctaaagaaagtacaaggaacagactaataggatataatgaagactaatctgtgagctagagcaatttgttagtagaaggagaaccttcagaagattgagacaaagggagatccctttaaagactagaattgtttgttctcatccttgatgttagccatgcatgaccctcaaatcccggaatctttgaaagtacatccaagagatgaagctaaagactttgtcaaaccaatctcatttacattggtggtactgaagtggagcacatggaggaaactcttgctgctttcagcaccatcttgtaaaactgatcctggtccctgagtgggagccctttcacattaaaaaactagtgttgaggtcttgtccttctatctcccagggagaatcaccataagtgttgaactcttcaaattcctacttttactagattaaaaaccccaggtaacttttacccatgggtcagagaagctacaaaataaattcttttttttttcttgatttgagattagtgtttgccattgctcataagcccagatcataattacttgatatttttcaccttttgaatggaacatgatagcccttcctttgtcagactgcataattggcaaaggaaatttatactgtagaagaccctcagtaggacctgatgtgttgatgctgaatgcaccagtaggaacttcctatgctaccaagacctgctatggtcattcaaagtaagtatttgccgatatacataacctggctcttggttggcttgtgtctttgataataaaactgttggcatctatttacctcttttcagatttggtggagagattttcctcattaaaggaaaactttgactcttcaatttcacattcctatttgataataagtactttctgagttgaagtcccataaggtaagacaaaattgaggatgctgtcttgtgaaataaaaatggtacatccagtcaaggaataagaccattcctcccagactcagttaactccacctgtagttagctgcccatctattggaaaaatatctacattagctgtttttcctaaagttctagctcaaaaagagttttgtctttaagacttgacaagtaaaactggttccctgatgaagcagtttacctctgaagtggtcatagtcaatgagctgcagctatcaagcataataattggaaattctggtagctctcagtattgcctgccctttctcagtgggctgaaatctaaggtgtgttctaatgagctattgctaatgacctcatttgcatggtcaaacaggaggtcatttaagaccagatttttaagggtatactcataaggggtatctcctatggaaaaaaaaaactggtgttaactagaccttggttgaaggcaattagatggacatgaatgtgaatgttcttttctattggtgcctaatagtcatgctgactacaagggtacttctaacctcatctttgctttaaggctactttcttctgcttctgaagtcatgctttgcagtgaaatgcttattcctgaattcctgtagagctcgttgctccagaaaaagaacaaagtgtctggcttatccccaagggtgaagaaagacctttgatttgttgggtgcatacatcatgaccccaggaagggcggagagttataggacaagtagctttttatcttttgcagtttgtatatgggtaggtagacccaaaatttttattaaaactatcccagctaagagtgaaaacttgtcagaaaagttgataacaatattgtacatccccttgatgggaagacctaaatgtaataagctgctgtaactaagaagagcctgtgtgtcttccagatattccctctcataagctagcaataggattcctctaaaggccgctcatgtgggccattaagaggtaattggtattagtattagagaatagaatgtttctgttgccggcaagactagataggatggcaatttcagctactgtccaggcttggaagtgcctgctcctgctctctgacctctccccattcctggtgtctgctccagggtggagcaaagctgtgaccaagcctgggtggtgttgcaacctggccaagtatgcgtgtgcttagggtgatgctgacataccagccccctgctgcctcggtcccctctgaacttcgggtgccaacgagcacaggagagaggccaaggagggactgagggcagcctggtgcaggcactcctcagaatgaacagcctgggtaccatggatggcatgttgatggtggcaggaggcaggcaggcttctgggtggaaagggacaggtccccagtgagaccccaccttcaagccagggacagcctgaaacctggtggctgagctgccagttccaggtggagtctgtggcccagagtgagaacttatgttgcttttttcaggcccactcatggccacccatagacaaatcagcatgcacttcttcccatcagagcccataaaaaccctggactcagccagacttggacagatatcaggactaccagctgctggaagaagctaccctctttgacttgttgggatgacctgcctgtggaaaggagctacccactgcaggtctcctctccactgagagctggacattcattgggatgacctgcctgcataaaggagctacccactttgggtctcttgagagctgttctgtcactcaatgtagctcttctctctgccttgctcaccccccagttgtctgtgtacctcattcttcctggacgtggggccagaactcaggatcttctaaatggcaggactgaaagagctgtaacaaaccaggctgaaacatgcctgtctcccacttgccatgttgtgggtgatgaagagagaagagctacagctggtagtgcaaactgagcacagccagctgggccaggtgggcagaatgaacccagagggcatgagttatactcaagcagagggcgccactggccacagaagtttctggctggcaaagtgacaccccaaggatcccatgacagcatgtgagatatatctgaaatctgcttcctagacagacatacctcatttcttcatcttcagctttttgctcaaccgtcatcctatcagtgaggccatccctaaccaccctacttcaagttgcagcatttgtttactccttggcaggctctttctcctttctctgctttatttttcatcaatacattcagtttcttgtaaaatattgtcttttaaagataattattatttggtttcatcccctttaataaaatgtaatttttctgtgaaggcagaaatttgcatgtgtttagttcattcctatcacctaggaaagtacttgaattttagtatatttcaaatggaatttgttgaataaagaatcaaataaagattcctggaacaaataatatgtacctctatcttaactgatgacctaaacaaatattttctatatagacttctctaaaatttgagaattgcaatttagaaccaaatttaatcaagtatttgcctatttattttttagccataataccttacatctttaaatgaagtagaggttatctcaaggaggattttggaagattttattgttcctgccataatttttaatgtagaatttttcaagaagggcatgcatattcatcttgtgatcagaaaaaaaattcataaatgtgttttactgactctttttaatgtttggaattgtgaatatctggactaaggatcaatactgaatgccactaacaaatgaagtatggagtgttactaattcagggtcatccagcatctcagtatttgtcatctttttatgtttctttgctatgtatttatgagggccaaaaagtaaaattgctagattcagaatgtatccttgccccaggaaaattctgtatatattccaaaagattattataagcaaaagtaagctagttggaatgaaaaggaaatagcacatttcaatatttattttttttctttagcgcttttgttgtttttttctaagttgatttctggcatgcatttattttatttttatccatgcttaatattactgagaacatggcttaagttttattctgacttttatcactttcttatacttttcattttactaaagtaagagaatgtttaagataacatagaatttatatgaagcccctttagaaggcatactaagagaatttataaaaaattgtcttaacacttcgatgatgtagatatggaacaaatagttgatttgtttttgttgatatgtttgagttgaacatctcatatgttcaagttgaaatcttgattcagcatgtggtatattttagctctttctgaaatattttctatgagccacatcttactgaagtatctgggggaatttgcagaatgtggcaattttggcacagaatcttcacatttaaatagatggcaggatgcagaagagaaaagagcctgggtttctcagttgttaggtgaatatgtgtaagtctgactgcagtatttcagatcttgaggaatgttggatctatggcttttgtattaggaacatatagtggtgaagaactctggctctgtagttataacagcttgaattaatatagtcaattgtaatttcatatcagaataatcttgggcttaatgtctctgagttccagtttcctcatctgtaaaatgcgtgccattttacacatatattatagctacctgcttgtctataaataccttattttccccaaaccatataaattagatgctaatgctgactttatgctaatgatcagagaggtttagtgatccaagagctcaaaattagtaaatggcagagtctggttaaggctgacacagctccagtactgctgctgttcccattatgcccgcaagaactggttggacctgtgggatccaacagaaacagaaacagacaatgaaaataagagagaggaagagaagtgttaggtcagggcctaaggatactttattgacttgagtaaaaatgaagtgaaccctaatcatgaaaatattaaaaaatatttttaaggggaaagtagagccatcatatcacttatccaaattcaactatagcactcgacatagataatagatacatacctttaaaatctattaaatatggaccttctatattagctactttatctctgcttggtgcccacctaaaaaacaaaaagcagaaacaaaatagcagttttagtctatgttgggagagtgtacaaaaacacaatgtactttatgcgtggtttgggggcttattgaaggtaattatgacaatatgaatttttttcatgtacttcattttggaacataacgcctgttagagatttcattgtggtgctaatgtgagctgttttctatgggttagattaatttttgcataatcggttactattcatggatttgtgccaacatctctacgttctgcaaacagctataactagcactaagttggatacattttatggcaatatgtaagtctcttatttcctggtttgcttatacttacgtagtttgcactttattcatgcagttgtactcattttcacatagaaacattgttataaataatggttcccttcccaggaaagccatccccaaaccctagaaactacagtagacctgaaataccccctttataatgaaagcaaccccacaataccaatttaaaagtgatctgccctggatgactcataaagctgaacacttacccatggaaatgctttgaaagccatggaagaaatgtgccatcaaaatgtaaatatgttttcacttaaaaagaaaaaaaaaatttctctgtggaaactggtttacataggatttggagttaacattccagtttttcaactgattgaaaccagtggctattttatttaccgatgttctttggacttagtaccatctgctgttcattgttagggcatgcaaaattcctggggttgtatatcctccagcagatttctttgctgtgttccttttttttttttttttttttttaagactgttggttcaacttttcttggtagctccagtattcttttttgctaaaagctgtgtcttggtatagttcttccctgacctgaactaccaattcctaatttccaaaggaaatgacaaagcctatgtaaattgttatagcttattctgaccttgttacctgcactaacatttttgcttttgctgactagatttttttcttcctcccgttttcatttgttcctcaaactaaaatcacttaacttacattgttaccagatattgtttatcagtacttcaccccactagcccatgaaataaagctccccctggtctgttgcttactatagaggttgaattttgccccccactccccacaaaaaaagtatgttggtgtcttaaccaccagtatctcagcatgtgaccttatttggaaacagtcttatagaggtaatcaagctaaaatgagattatttgggtgggccctaatccaatacgactgctgtctttatataaaggggaaatttggtaaaagaaaaaaaaaaaaaagacacatatggaaaacaccatgtgaatattgaaaatattggaacacactgccacaagccaagctctgccacaactacctagctaggatctggagattcttcctcagtgcctttggaagaagtatgtccctgaccatcctttgatcttggacttctcgcttccagaaccctgtgactatcagcttaagtcagtttctggtgttttgtaactgtagccctggcagatgaacatacctcctcatacttttgctcattccatctcttgatatccccatctgtgttcccaaacctttccaattctttgccttttttcattgctattcctttgtaatggactgccctgttattgcatccatatattcaaagtttacctttgttaaggtcctgttgctcaaatactggattgtttatgaacattttataaacaataaacttctcataaaaggtaggggtatctcctccatgagctacctttttgagatcctcagttcaaccccaaaaagccagaagtttttcttcatcagagtcagagcctgtgtattctgctatgtatatttattaaatgagttactggaagaagatgtgagagattcacagagaaactgacataattaggtgtagtgctctgggttgggggtaggaagtccacatttatggaaagatgcatggtgggtgggaaaattgtccatatctaacccacgtttagtttctgggcattccctcagaggccctagacacattttttctttattccatttatcccagctcagcacagatagaaaaatcttcctctatcatctaaaactgttctcctatattttattctagcttactctttttaatacttagcatttaatatgaaatttatttgggagtacagtatgacccaactgattttctacaagtcaattttttccaactcccttgaaataacccagttatttttcattgtacaatgattagcatatattaaaatttcatatactctgattgattttttagtttaagcttacattattttagttactgtaactccagaataaatttgcataccttgtaggatgcatctctttttaattaccttttttttttcttggtaaaacacttattatctagatgttttaaattcaaatgtatcaagaaaaatttaaatatattctttgttatctttgggtttaactaaactttattctagtaaaatggatatctttacaatatttggcactgtcattatttaatataaatttttattctttagagaaactttgtagttttatgaacacagcatattattgag

SEQ ID NO: 2614 - DNA, 1082 bp, Homo sapiens
cttcaccatcaggcacaggacatgccagtttcgagagacgtttaggatttatgtgcaaccaatgaataagatggagtgtcagagagagtggggcctacccactgtctcctggacgagctgggaccaaacccagcctacgcaggaggggtcataacatgaggcctgtatctgctttgttcccatggaatccggtaaagtggatccccagttcgactccagcaggcccatctctcacctgtctgccacgtccacactgccaccagggacagagctaacatctggctctgcttcatgaggcctccagccccagagcagctcagggacaggaaggatgaactctgcctggccttgctgagctagttctcggggctcccactgcaagctctgtggttaacgcctctgctgacagcggacaggacagactttctctgaaagtctgagtttctctgaatctctgaggtgcaggattctcagaaacccagcggcagccttgccacgcaccaccgctgcgacactggccactcccggcaatctgaggggcattttgtgtgtccccagcacctgtacagcctcacactttgaaggtgtccaatcacatctgctggaggaacaagtggcccaatgttgcatggatcctctgggtcggtgtcatctctctgggtcggtgtcatctgtcccctctcaccaacaggtacgctgctcagagcacagaagttactggtgacatacacatgtccttaaaaggctaagaatgctggctgtggcagaggcaaactactaaatgaaatggcgcgtcagtagctcctccagcagggcctgattagccgtgggtaatgttcacttgtgagagggggcaactcggcaggcctgggagcaagaactcacacagagggcctgccctggccctcgaagaaccatagacgccggggcagcagcctctcagcaccaccctcatctgtgaggactctgggcccacctaacaacctgcactctcttcccactcacccctggccttggtagggggtgagccagggacaacccttctgcctggagaaggggctcaggaagaagggtgtctaggg

SEQ ID NO: 2615 - DNA, 9594 bp, Homo sapiens
ctctgcacacagtcccggggcccctggagcaggtgacacctcgctgggcaggtccctgggcctctgcacatagtcccggggcccctggagcaggtgacaccttgccgggcaggtccctgggtctctggacacagtcttggggcccctggagcaggtgacacctcactgggcaggtccctgggcctctgcacatagtcccggagcccctggagcaggtgacaccttgccgggcaggtccctgggtctctggacacagtcttggggccatggcacagcactggcacctctgccctcaccagcctttcccaggactggaggccttgtctgtcgttcagggtcacagaatctggagtcctcgctgttcccagccacacccagcccagcctcctgctgggggccacattttaccccaatttttctgcatctcaggacttcacaaccatattaggagtggcagtgaagtccataacagactcgtaggctccttaaaaaaactctccctccacagcccccaggacttcctggtcactgcccgctctgagatcagggaagccgtggggcctctccctgccagcttccatccatgccccaaggatgggctactcacccctaattcctgtccctcccctgcaaatggagaacactggaaaattactcatcgcagtcattatttgtgagcaagaatgagatacttcatttaaagcggtgaatgcagtacctcggcaatcaccaaaaaacaaaaaataaaaatggagtcacaatataaagaacctcaggaaaaagtgattttgcatcttcccagaataaatcagtcactctatcacctggaacatgctagatgttcagccaatggtttgtaaattaattactttgttattttatttcatatttagtaggacctggttgtataaaaccagagtaaaacatgttagaagtcaagagctagttctgagcaagttgtgatacatgagagctattcaacaaaatatttaaaactttgtaacatgttttttaattttaaaaatcacatttaaaaagccatcaggaatgcagtagccacagcttttgctaaaacagtttttaaaaattatttttccatatctgggagatttgaccttttcgttttgcttaaacttttggttgacacatcacgagtgcacaggacagcagctgacaactgccccgcgtgctgggcacatgcttctgcctgctccaatatttcaaagctgacttattgtttgcttgaaatgtgaatgagttactgaaaaaatattatgtgtctcacagtatttctattttacagcctttaatagttgttttgcagctttaaatctgtttggaaaatgatgcccaatgactgtgtgtgggtttatgtcacctgtgctcacagacatgtgaagcaaaaaccttggcctgctccccagcctctgtgcaggacaagccaaagagcaggcagcggcagggccaagaggatccaggctccccctggaccacacacggtcaccgtaagcacatggtgctccggggggtcctgcttggtgggtggctcacccttatgtgtcaggcacccattttatagatcaaaacgtagaggtctggaagtctcagaagcagcaaggctgtggccgctcagtctcacagtctcacgtcccaggtctttacagagaaccaacacacatcctcatacttgaagctcgatgataagtactcagcgaaaagtatcaggccagtgccgtgactcacatctgcaatcccaacacagtatcatcaggccagtgccgtgactcacatctgcaatcccaacacagtatcaggccagtgccgtgactcacatctgcaatcccaacacagtatcatcaggccagtgccgtgactcacatctgcaatcccaacacagtatcaggccagtgccgtgactcacatctgcaatcccaacacagtatcaggccagtgccgtgactcacatctgcaatcccaacacagtatcatcaggccagtgccgtgactcacatctgcagtcccaacacagtatcaggccagtgccgtgactcacatctgcaatcccaacacagtatcaggccagtgccgtgactcacatctgcaatcccaacacagtatcatcaggccagtgccgtgactcacatctgcaatcccaacacagtatcaggccagtgccgtgactcacatctgcaatcccaacacagtatcaggccagtgccgtgactcacatctgcaatcccaacacagtatcatcaggccagtgccgtgactcacatctgcaatcccaacacagtatcaggccagtgccgtgactcacatctgcaatcccaacacagtatcatcaggccagtgccgtgactcacatctgcaatcccaacacagtatcaggccagtgccgtgactcacatctgcaatcccaacacagtatcaggccagtgccgtgactcacatctgcaatcccaacacagtatcatcaggccagtgccgtgactcacatctgcaatcccaacacagtattaggccagtgccgtgactcacatctgcaatcccaacacagtatcaggccagtgccatgactcacatctgcaatcccaacactttgggaggccgaggcgggaagatcacttgaggctaggagttcaagaccagcctgaccaacatggcaaaaccccatctctactaaaaatacaaaaaaaaattagctgggcgtggtggtgcccacctgtcatcccagctactcgggaggctgaggcacgagaatcagttgaacccaggaggtggaggttgcagagtcgagatcacaccactgcactccagtctaggtgacagagtgagaatccatctcaaaaaaaaaaaaaaaagagagagagagaaaaaaagaaaagcatcagtcctggatagagtttaggttgtatcaacttgcctgcaaactgtaggaaggtgagaataagaagggaaagatcttggctggtgctcagactgggtgggtgcaggagagactcttgttccagagcaggatcccctagggtcaaagcacaaagagaaataaacttcagcacctgaaaattctgtaataagagtctttgaaaatggaaaaaaaatctatgcttgaccattgttgtctaagagaagtttgctatcaatccctcctctaacgccctgaacagaatgttcttcaccagaaccctgtgtattcatcaccacacaggctgagaggcattccagcatttgtgcaacatcaagatttatgtgcaattatctttatggcaaatgttccacaagttatagctgttaaaagaaaataagatgcaaatgaacaagaagaagcagaggcgctgcctgcagcctgggaaaatttgggaagctagcctaatgagtgaatttgttttaaaaggaaagttggcaaaccttattccagttcattaaatttcaacaaacagcaaggattaaagtaagaatcaacacacaactctaaacaggaatcaagcgcttagaattaggagcaaagctctggccctgggggcttatggttttggagaagaaagattttggctttcatatatatatttaacataaacagcctttggaacaaggcaacttccttcttctttctgaaatgtggtatgttcttgcctaatgtgtccctgaattccacctcttttatgaacaatatgaatatgcataaaggagaatttgggggaaccgtgccatgcgcccctcagagcaggagcaatcttgagaaggcgcaggcagagagcagcgggcggcttctccagagcaagtaattaagtcccgtgactccctagaactcagtgttcagttctgaaaaaaaacttcgggttcaaactccctaagtctatggtccttgcatcagacgcctcttccctgggattgctgggaactgaggaaggaagggcgctgcagagctaacgatagcaaggggctcagagctggccaccccagctccctggtggcaggagagctaatgtgagctgatggaaactgagaagcagcagataaaggaaaagccatctgccctgcctctattgcctaaaagtagaacataaatccgcaaaagtgaccatttccctctccaacagaaaggacagaaattcatcaccagggaccccaggccctcaacagcctggaaccagccccagaggcatttgtgtggcaaacctctgcagccccggcctcccttcctgtagttgccccagagaggcctcctcaaaacgtgtttcctgggaactcaaagtcctttgctttggtcttgcagcttcttggaaaatgattgttcttttgctgaggggctgtgcagcagagttctaacgatccattcgagtttccatcttggggcgctcagggggctccctcgtggaagcaggagtccaggctaataacccctgtgagttttcctcctgtgactctgccttttgtcagtctaatttcaatgccccagaaaattaatctaagatgcagggagagaaaaggtttcttcttcccctacagatggatgtcagtcatctctattcagccaagaagtagttaacctaaacaatgaaaacaccaccggttccagtagagacttgagactatctgatgagagttatgtgtctctgggaggaagttttcaatacagaaatggatttattttatgaaacttaaaagactaataatctgcaagcctataagaatgttttaattctgtaaaatattttacaataagaaaagaaactagagactaagcaacatatgatcagttaaacttgaataacaatatattaatattggtcaataacaaggaatgatctctctagtaactgccgtttccaagcatagtagagaaggataagcatgtttctttatatttaatcagttggttcttaaataattgtcaagtgcctgctgaaaaccagcctttggtcttggtcgtgaatagcgcagaactttgcagagccctgaagagactctcagtgataggatgcatatacacaggtggtgtgagtgacagagctaattttttttctggtacctaaagatcagcaggatcaaaatttcataaaggaagagctgggagcttgagattgacaatttcatgagatgaaggataaattgtgcgttacctccacagctctgcaacatggagattggtcttgggcaggtggtggacgtcctggattctgaggaagacctgcacgcaattcagtgggcatcaggagccttcagatgctttcatcaaaggcacaggcacaagcaggccttggtttagaaaggtcacttgggtgacagcaggagggacagaaggatggtggggagatcagtgcaggagccagtcaagagctccttctactaaggcagtagaaagtgagactgacaacggccaggcaggagcagaacgttctcccagagacattatggggaaattcacaccacatggtgagtgaaaggcaaggaaagccacggctgggcttcttgcttggggacttgagctggtagggtggttatttcaggctgttaacacccctcaacagggaacagaggaggatggcgtgactcaggagagaagttcaagtggaaaacgggcgtttgggagaggaccaaaggagggtgagaggagagggcaaagatcagaggagccagaaatgcacccgaggtgacactcacaggagggagaccatggagagaagagagccacagtgaccgaggctgagagagagagtggccagagactgaaagcaaaaggcacgacggccgggagcactgaacgcttgccaggccctggaccaaaagccgtgcaaacctctctgtaaaaccatcctaagacgtaactctgtgcacttgccaggccctcagcccagagccgtgcaaacttctctcttcagagcacacttgcgaggccctcggccaagagctgtgcaaacttctctctaaaaccatcctaagatgtaactctgcagctaggagagaaaaccgcgccaggtgaagtgagctgccgcgtcactcggagattgatttgtctcactccagagcccatggccgtcacccctctgccacttaagaatgccggcaacatcccaaaagcaccagagtcctggggaggtggggggcggggctggttactgcatttggcaaataagcggtcgtgactgaccacagaatacaaaatgtgagttgagttgcctgggcagttgcagtgggtttagaaggaaataagaggaaaataaaggaaaattccaggtgtcttatatctcaagcttttgtgggaacaggaggttccctgattcttgagagctgaaagaaatctccataaagcccggaatgctggtccttgaggtccacacctgccaccgatcctgcgacgcccaggccgcccctcccctctcggctcctactcactcttggtggcatcgtcccacattgcactgtccccagcacgcacacattggcgtaaagccaggtcccctcttcagattccacacccagagcctgcagctctgacggctgtgctgggggtccccggcgagctgtgagcccgtgctaggtgttcctccctccctcctgcccttgccccagggagccccacaccggggggctctgttcattgctctctgcccaaccctgaggggtcaccctctgccccaagtgcttaaccactggttactcatcccagaacccaagagagatccagcacggaggttttcttaactttgctgtatcacactgtaagaaactgggtggccaatggaacagacggagcagggcagagtgagcaggaagaaatgatgctggggaatttgtgtgctccttgggtggggacgagcatggaaggcgcgtgggactgaagccttgaagaccccgcaggcgcctctcctggacagacctcgtgcaggcgcctctcctggaccgacctcgtgcaggcgccgcgctggaccgacctcgtgcaggcgccgcgctgggccatggggagagcgagagcctggtgtgcccctcagggacttctatttgcttttaggagccaattcattcctttggtgaagtattgatgctacgcaggtgaatttagtaacaggactgacgtgtgaacatggccggaaacacttgccgtcttcctgttaccgcgtccggaacttcacggtgatacccagaaatgggatcttaacctcttacacattccaggtgctaaaacaaataacacaggagtgctttcattggaaactactggtatagtggaattattttatcttttattaaatacacaagataggcaaatcttatcaactttaccactggctcaggtaaccagtgatgaatgttcagaacaaaagttattcggaatcatttgaagtggtttgggcaagtgcgaaattaaggtgagtagctctgatcccatcctccaggcagctccgtgcagtgggggtggacgcccctctgtagcggggaagtgaaggcctgtggagggaagcgaccccgggacctggctgcctgcctgtcccggaagccacgtgggcatcaccgcagcaagatgggcttgaggaacaaagcaacactgtcagtgaatcgctgaactgtcattgcgctttgactgtgtgacattctgttccgtaggaaagcctgaggagtctcgtgtctctagcgtcttggaggaaagcaagcgcctggtggacaccgccatgtacgccacgatgcagagaaacctcaagaaaagaggaatcctttctccagctcagcttctgtctttttccaaacttcctgagccaacaagcggagtgattgcccgagcagcagagataatggaaacatcaatacaagcgatgaaaagaaaagtcaacctgaaaactcaacaatcacagcatccaacggatgctttatcagaagatctgctgagcatcattgcaaacatgtctggatgtctcccttacatgctgcccccaaaatgcccaaacacttgcctggcgaacaaatacaggcccatcacaggagcttgcaacaacaggtattgtttgtggattttcttaatcttctcgtgaaagttggatctgaacatgactagatgccatcatgaaggaacttctaccaccactggtggatctgtatccacccctgagcccctggttcctgtccttggcctccccgacatggcctcctgcatgcctggtggtgcctcaagcagcgtgccaagcagtactgtcattcccagccacaacgtcccatccacataggtgcttacaggtgactcttaacttcctaaccccacaaattccaccgcccttcacctaagagctcaagccacgtgcttaggcgccatccttgatttcgctagctccgctacccattgtttccaatgcacccccaagactgtcacttttacctccaaaatgagtcctctccactccctgtcaccttagctgaagccaaaataaccatccagctgccatcacgtggtggtcccctcactggttctcctaatttaactcttgctttccccattcacgctccctgttatggccaacaccatctcagcaccctccttctcaactcctccctcagtccccactgcactcagagtgagttcagatccgcccaacagtggtgactgcccacctcctctggtccacaatggcaggagatggacaggagctttggccacacacagaggcatgtgattcagtctggggttcagaatggttttctgaagaaggtgatatgcgagtgagccaaatcttaaaggatgagtgggcatttctcaaatggtccacagggtagagaagagggctttgcaaaggccggaaagagcaagatgcgtttgggctgaaacgtgcagcctttggcacacagaggggcagagggagagcagccgggattgtggcgcctgtggggtctgggggaaacagtgtgcccggtggtcacctagaagctttgtcacaatagtgtggcgccaggatggctgcaggcttgatgttcaccgatgcaggcagcaaaggtgcttagcatggaagaactcctcaaagggactcgagctcctcactgctgggtgtgctgaggtcagaaggaagatgccccccccgagagagggatcagcgggacccaggcagagccctggcttggacaggccctgtcctgagacagagagcaggggctttgcgacaatgaacaggaatcggggtcctgggtatatgatgatggttaagaacaacagctttgcaactggacagccctggatttgaaacctggaatcaccacctatcagagggcagtttgtttcaattctttgagctgtaagagcttgtttgttaagcccacagcaggaatgcataacctggccatgtgtgaggatctgatcttaggactgcggagccccggctggaagaggcagcctgtgctgaacacagagatgggtcagggccacacaggaggctgctgtccacccctcctgccctgaagcctgggggggggtctgtgccttcccgtggaagtgggctcagaggtggagatggcatgtgtcctgtcctcagagctcagtgggagacatagatgtagacaaaggatgcacaggagatgatgcctgggagtatggggacactgagatggctggtg

SEQ ID NO: 2616 - DNA, 919 bp, Homo sapiens
gggagatgtcgccaacttgttagtagcagaaccagggcaggaaaacttgttgcctgctcacagatggttttcttttctttttttttttaatactctcttgcatctgaaatattctgacttcagggtttctttttttttctttcttcttctactagaaatgaagatggcatatggaaaggcgattcttatactcagaaggaaaagttcccatggaagccatggattcattcatgacaaagtgggtggcctgtttgtttgcttgaggatcccagccatgttgccctcagtagccctccctccttggactgtgacagtttctccatcttcttttgtttacatgaccttgatcgctttgaggagtacagggtgagtattttgtagactgttcctcaatttgggcttgtcatattttttttgtcatgattagactggcactgtgggctttgggaaggacaccctacagataaagtgctgagccccacttgagtgagaaatctctatgtctttgctgccttttcttctcttcattttctctttctctcttttctgatttttctctcgcaagtggactcacactctaagtaagctgaagggaaatatgattgttctctggagggaaattagaatttggaactgaagaaagcattttgcttgtgccaacctccgttatacttgacatgccaaagaccaccacagggatttaaccttgcttatttctcccagctctcacatttgctggctctatattgacacatgacatgaaattgagggttccttcagttctatgttcatttcaagttgcaggtgctaacatttcagccacatgccctgggggtcttctgcttctctcctcagcatgcccatgtctccatctctgcacgctcatattgtgtcctttctttacagcccaggtcacatg

SEQ ID NO: 2617 - DNA, 7339 bp, Homo sapiens
tgctgccgccacgggttgcaagagaagagaagcaggcaggggaacagtcaatcgtgtattcatctggtgctcagtaaattggcacttcacataagataagttgaggtctttcttggccagtgcctgcctccctggcgcctgtggtttcagtgatggggattcttccatgcgtcacttggagcgacctcgtctgttcctgtggactcactgacacactaaagacaccagctcagccctgacctctcacctgagcgcctccttaccaagtcatccagatggctccccagggatgagcagcaacaaaacgggcacgtgggtgcccagcacacgtcaggtgatgttctaagccccttgcgcgtacccagtcacttaccgttcactgcagccccgggatgagctctgcgatgagcatccttttgcagacgaggacactgaagcacaggaaagttaggtcatttgcctaaggacatgcagctggatggggacagagccaggatcgggcttgcagtggcttcagaccccacctttctgaccacagcgctcgtgctcttggagcgccttgagatagtgggacaaggcggactggaggacgcagtttccagatgggatgccctggcgggcgactcccgtgcgcatgcccagcatcctgcgcaggcgctctcgtggccaggcctctgcaaacagtcagcacagaccgggagacagaaaactacactccctcagacgctttattgtttacaaaacagatggatcccatagggaaggaacacaatcattatgctgacagcagcgaacagagaggggaagaaaaaaggtgagctttaaagtaatcgcaaatcactgcctatgcgaagaggctgcttccgggcacctgggctgtgactcaggtgctgacatgaatacatcagcaaggtctcaattcagccacagtcccaagtcccccaaccttcctgattgcatctctattttaaatgacccagcctggacatcaaggacaatgatctaggaggcgggtcaaggagacagccaggcaaagtcagaacagacttggggcttccaggctatgcccggtgacagctgagctcttcagaaatgcgtcacattcagcgttcacttccttcgcttcctccactacctatgacatagcgggggaaagagacaaccatgagagaggggtccctcctcgctgccctcctcgcagctgtgcttgagtttcaaagggggagaggtttgtgagggaccggcacagggacagccagagccggcaccctccggcccaccgtggcacccctgacgatcgcggggtggggtaggagtgagggtgggggtcggggtgaggtagtgctgtggggagggcactgtgaatgatggaaacgtcccttctcagcctgggtcgtgcctaacctgggtctcaaatcccactctgccttcaccctggagtacactccagcgaagccgaggcccagccaacgctcgtgaagtttccacagagaagagcctgcaaaactcccactggaagaggagaaataaaggccatggaaagaaaccccagggaagagacaggcctcgttcacagaccctaggcagggaataaaaaattcaagtcattcacagaagtcttgaaaggcatgaggatttctgacagttcctagaaaaaggcaacattttctttatctttgtatccattggccaagaacgccgacatgtgagacttgcttcaccagccgccaccgcttccttacaatctcccgcactgctggagcgggctgggtaactacaggactgtgctctgtgtgataagatttggtgattccactttataagaaaggaaactgctttaattaaagcaggttaataattaaaacttcaaagtactgcacagccacagaattttcttgaagggagaaagcggtcactggccatatgatgcggagatggttttatctgaggcctgagaaccaacagatgtgcctgcgccctggcctgtgcagctgtgggcagatgtgtccccaggggcctgccctcactcgtgaccatgcaataccctgcaacataaacattttcttttccaaggatctgcaggggtggacatgatgctccaggcacagagtaggaagaaaagggggtgacctggggttcccagcaaacaggtccacctcatgctcactgcgttctcagggtgaggcatagggcctgacatatggtaggagctctagggatattcactgaacaaaagaacataggaaagaaaagaaacgaggtcggatggaagaaacgacccagccagttaggcaggccttgagtcaatgcctgaagtgaccgaaatcaccaccagatggcagcatggaaagcagttcagaccgcggcctccgtggggcccgggggtccagtgcccgcaccactatggggcccgggactgggctccctgtccagacctccaacccaggcacagttccaaaaagaacaaaacaaaacaaaagtgcactcctcttgtttttataaaagctgagtcctgatggccttgctcagtgtttccgttttgagttaaatgaactcgatgccttcgtatttcacgcttccgatcttggtctccggcaacaggaagcgcccgtccagcgtgaaggccatgatgtaggaggcgactctgccgctgtcctcctcggatttgagggccacaatgatctggtcgtcggtgttggggatgaacttgaaggacgagaagccgtgagtggggaccaccgccccgacgtggctcacagcgatgtcgccgaagtcaggggaggcgctcagcagcaggttggcgcccttgcgctcgtcgtccttctcgctgtagcgctcctggctggcgcggcgcggcaggaagaaccagcgctgcagcgtgtcactccagcaggcagactcatggatgaggtagcctgggaaccgggtgaccgcgggtcagacacgcatgcggcctggtgtgcccagccccacaccatcaggccgtgcgcagtagcaggcaaggggctgcgaccaccagggcccaccagctcacagcaacccgcccctccctgctctccaggattctggaaggttctgtgttctcggttatcccatgcagggaacctgcagcacccgctcccttgaagcctcctcccgttccaccgagagctgcctgtgagctgcatcagggatttgggctcatcggagcctcctcggggctgatccagaggaacccaaggaaagggaacaaacccccattggatgtggggaggcatcggcggggaggctgccttgaggctgcaaggaagaggagacagcgtctggggccccaggcacagactcagtcacttcctcctgaacctcaggcacctaaggcctactccatcctgactagggggaggccaaagtgctgctggccctatgttggtgtggaacaccacggcccagcgccaggggtagggacagggcctgacccaccagtgcagacaaccgggccacaggctgggatgctaggaggccagctgccagggcgagtggggcaggaaagagaaaacagctcatttgccgccagaatccactggcctgagggaagccaccatcagaggcaaccaaaatcactaaaatcaagcaagaaacggccttggaggctgggtgtggtggctcgcgcccgtaatgccagcactttgggaggccgaggcaggtggatcaccagatcacccgaagtcaggagttcgagaccatcctgggcaacatggtgaaaccctgtctccactaaaaatacaattagctgggcgtggtggtgcacacctgtagtcccagctactggggaggctgaggcagaaaaatcgtttgaacccaggaggtggaggttgcagtgagctgagatcgtgccactgcactctaaccggggtgacagagcaagactatgtctaaaataaaaaacggttttggaggcaaatgcaggaggaagcaggttcccagcgactgggctgtggaagccacactgtgggctggggcaggcgtctcttacctggcggctggatgccggcagcagcccgcagggcgttgtagttggacacccagttctcgtggtccacgctgcccttgtagcccaccaccttcacccactccgggttctcgttcaccacatcacccgtagtggtcgtccactccttgcccaggccgcccacgtacagacgctcgtccttcactgccagccattcggccttgaagcctggccaagcagagtgtccttaggccccgcacccagctcccgccgcacccctgcacctggctcccacccggccccgcacctgtccttagaccccgcacctgactcccgcccggctccacacctgcctcccctccggcccgcacctggctcccgcccagggccggccggctgccctcccctcagctcctgaaggttcagtgaccactctcaagtctcctctgatccccaactccccgctcctcaagctgtaaccccaaccttaggattatccttaaaggctagaaaagctgaaaagtgacagcactctgaaggggcacgtgtgtcccaggggagtgcgggtgctgccctcggccacacctgaggtctcaccgagcatcactctaactccagtggccggagaggggcttggtgctggggctcccagtcttcctttcaatggatttgttcagaagctgtttttgctttttttaaactgatttatttaaaataagcctaactttgaaggctgccacagttcaggctgtgtgggagcctgtgttctaccgtgtattcttatcatccctacaccctggtgttctaacttctgtttgctttccccaaattttgccagcttcttgcccctgagagctggagctgtgccctctgaactgcccgagactgtagtagcttctctgcagggccctggagggacctgcggtctcctggtctgcttgtgcgatgagacattctccatgccagggtcttccatccctcccggatgacctgagtacagcccaaccccagagctccctgtaccccgctttcctccctatccaagggaaggacagaactacactagggttgcctaaaaccctgacaagtgcgaggcaggaagtaggcgaccaacgcctcagttgatacctcaggtgaggtccgtcccctgcccagccctgggcaaacactgaagattttatcaccgggtgtggggagggcctggccggccatgaactgtgtgggccgttgtttagtgcagttcctccttgacctcagaaagcctgcggtggcatttagctttctagaaggtggggatccaccgccagctcagacaaacggagctcagaggagctggcagctcctctgccagcgtccttggcacctccccagctcctctctggaggaagacactggccaccgtgcctccccaaagcctgtccctgccctgtggaagcagcacctcctttctggtgaacaaaaaggctggcatcaggctccactccaggggggttggcacagctcacacatgccctccccctgctggggttcagggagaggagggctgggcagcagtttacccttcagtaacatgaaaccaaagtctgggttttgagtgagaaccatctgtccccatggctttcagggcaaggctcctggtaggcacatcctagcgtggtcttgagaacctttgaaggtgtaaaaagggcgtgttcccagaggctccgagagcagcagcggatacagccgaaaacatcttggagagattccccacgtctcccacaggcctctagcgataagctcttcctcctagaaactgctcagtgtgaagtgacagtaggctatgctcctggctaagggtaagggggccgcaggtcagagcaagagggagacgtgctccctcaccacatccctggcttctaggtgtgtgaattctttaccatgtgcctgtgtttgccagccaggccctgagctcccactccccacccacacctccataaaacctcagggtccagttacctttctccacggtgccgtcgccgtcggacagaatcacccagggcacggctttgctgccttcgatctggtagacgacccccgtccggtcatccacggagtagagtttcccattgaaaacaatcaggtcggatagctccatgcctctccccttctccgccaggtgggactccaggaccccatggtctttgtcccattccacggccaccttgtccccactgtctgacagggtcaggtagccctttttcaggtaactgaaccaggtgttttcctcttgggcccttgactctgtgtccaggtctgcgataactgcgattcgataccgaatcccagccggtgtcctttgtgggggagacagggggtaggtgtcattgtaccagttggcgggcgcctggccgagcctccagttgtgtgcattgtgggtggggggcctgccgggggccgggcggtgggagcagagcagccagaggatggcagcacccacaaagaacgtcaggatcaccttccagcgggggcggaagcgggggtccgcggccttggtcatggacgccagcacaggaaggccccccacactgatccggagggagtgcatagactcattccattccgggtgctcagacagctgcacgggcatcagcgtgacagacaggcgggacctgcacagccagggagggaggagaggagtcagcgcctccgcaagcccagtcacatcttagttccggaagctgcaggcgctggaggctgacttttccagaagaaacagtatttcactactctgtggccattcttactcccttggcttaatgaattcccgactctagattcccgactctagcagtatctttgcttactttcattcggcaagacgtgaagtctttccacagcaaaattactccatctcccctgtcccagctggcaacgtgggaagctgagtgaggaaggaagttccatgcaggctggtgctctgtggtccctctaaagagagaagcgcaggagagtcaggtgggaggggaaggctgacggggtgaagtgggataggatcatagacagggtacaggtctgtattttactcaaatgccacctcatccaggaagccctccctgactgccctgctgcagacatcaccctccgtccctgggtccttggcccttgtccccacctgacgttagagtattgtatacagttatcggtttgtttgtttctgtctccacctctgtatcctggctcctagaacagtgcctggcctggagcagacagatgtgcagtaaaggagtctccacttcctctgggttaggctcctgcagcattggaataccaaacacatccaaaccaaataaaaacactccttctttttcg

SEQ ID NO: 2618 - DNA, 7038 bp, Homo sapiens
gtagcgtgacttacggcagctctctagcagagcgccgttgctgggggaatgcagaagcggccgcgggctagcaagctcccggagccggcggcgcaccaccatgacccagtcggtggtcgtacaggtcggccagtgcggaaaccagatcggctgctgcttctgggacctggcactaagggagcacgccgcggtcaaccagaaaggaatttatgatgaggcaataagcagcttctttagaaatgtggacaccaggcagtcttgattgatatggaagaaggggtagtgaatgaaattctgcagggaccactgagagatgtatttgatacgaaacagctcatcactgatatttctggctcaggaaataattgggccgtgggtcacaaagttttcggcagtctttaccaagaccagattttagagaaattcagaaagtcggcagagcactgtgattgcttgcagtgtttctttataatacattccatgggaggaggtaaaatttttcactcatttgcctgtaacagtgttaaaggataagtgggaattcattttgcaaacgtaagtcttgtttttagacctgtgcttgataaagatagaactattcggagggtgtgtagtttgagtatataaacatacacctttttatcttaaaattttgtggaattatgtcactattttcttttcttttctttttttttttttttaatgtaagccctcttaagagtcaacagaactatactggaaaattttttttcttgtacctttagtttcttttacagaacattcagatacttttcaggatgtatgagcttttgagaaatgctgactttctccttagagtttgcctgtacagtcctatttcctagagtgaagcatttttgacgtgctcatgatgtgtgcttgccaaaggatattaataccctttctttaaccatcttcaaacctttcttgtctccaaaaagagaaaaaaaaggaaactagtttagtcaattcctttagatcatttattacatggcaattaatcaacttgaagtaaaaataaatgattggcattgctttcttcccccagggaagtctataccttagaactgaagtattttgctcccctgttctgtaaaaatagaaacagaatgtaacttgctgatttttaaatacgcttagcaaattttaaaagaacaaaatggtcacacttttttcctccaacctgagattaagattttatattcagcaagttaggtgtatgtacagttgatttttatacatattattcattgacatagcattttaagattaaaagttaaaattgctgtgtaaccatgtctttaaaagatcctcataatcatcggttaagaaacaaatttgtttctgtgctagtataattaacctgcaaatttgagctagctttttatttgatttatagttcgttatacctttttaaaaaatacctttactacccaacatctcagaagaacatacttacaattcacttaaaatagcaaaaataaatattaatactaaaggttaaaagtaaagttcttttttccccacatctaatgcctactccctgtccttacagatgatcaggtttgcagggtctttttatgtctgttctttcagatatattctatgcctatcaaagcatgtatgtatatttttacataaacaagattatccaatatatactatactgtaacttttccactttatctctttctcagacatctttccatatcagctctctgtcatagaatcaattatacagtttaaagtgagtttgttatttatgggtattaagtgtttatggtgtttagtttttacatccaatcatcagtgaaagtctgggacaaatacttctgtatttgtgccactatagctttagacagtattcctaagaaaaagataggaccaaagcatatgtacattttaaattttggctgatattacctatataccttcctacaatattgcaccagtgcttcttactggcaacaatgtgtatgagtttctatttccctacactagcaccaatactgagtatcatgagacataaatctattatattcaaaattgtatttagttttaatttgtatttccttaattagaagaaaggttgagcatctttacttctatttgcaatttgtatttcttttattatgagttaaatgtttctatcctttgcccatttcgtggtggcattattcgtattttttgttgttgatttgtgggaactctttcttagagaaacttagtccttcccatcatatgtattgaagggtttttttgtaagtttgtcttgttattttttatgggtttttttaagtatatatagaagttttgtttatttttaatgaaatcaaaactgtctcttctgtaatggctctggtttttttgtgacgcttagaaagtccttctcattaaagatcaccccaagaatctccctcactttgacttagtatttttagcatcatagccttttaatagttatctgcatggattagaacattggtgtttaaagttttttttaaccagaatagtatgaaatacattttatatatcacaatgcagcatacacacatgaaaaaatatattaagaaaatgttatttactcatactacatctgacatgttattttctactgtttcatttaagaaaacagtactaatctgttcattagtttcatagcctactaatagttcagaacccagtttgaaaaacatcggattagaggattccagttttaagttctgaaaaatttctgaatttatgtaaatgtaacttgatgtatcagaaagttatctttaatgagattcctcgagtttctgcttttaaataagtagtgtttcatatttgaaaatttttgaaattcgaggtaggcatgcttaattgtaaacagttttaactctgtttaagttgcttgatgacatgatagtttttttcatcaagattatatacacactacactaaagctgtcaagttagttttcttaagttgcttaatatcaaatgtagactgaacaccgtcttagttgaattttttacttgtgcatgtgcaattggttcttgtggcattatataggtataacttaaatatgaaaaggagtgagatatagacggccctcccaaactcactgtcagaaccaaagatggaattcaggacttcatttcctgaatgttgccttcatttccttatccaaaattagattagttaatatataatcacagaaataagctgaaaattatttttacaaatataaattctgaccaggtgtggtggctcatgcctgtaattccagcactttgggaggccaaggcagaagcttgcttgaacctaggagttcaagaccagcctgggcaacataggtagaccctatctctacacaaattaaaaagttagccaggcgtggtggctcatgcctgcggtcccagatacttgggaggctgaggcaggaggatcatttgaccctaggaggtcaaggctgcattgagctgattatgctgctgcactccagcctgggtgacagagcaagaccctgtctcaaaaaaaataaagtttcaaattcttcacaattatattctgaatcatttatgctaatttttaaaaacactttaatcctcaggaacaggatctggacttggcacatttcttttaaaggtgcttgaagacgaattcccagaagtatacagatttgtgacttccatttatccttctggtgaggatgatgtcataacctcaccttataatagcatcttggcaatgaaggaacttaatgagcatgcagactgtgtattgcccattgacaatcaagtaagaaatgacattggaacttatgaataaatgttatatatattcagtcctgtattatgtatgtgtgtttatatgaaacgttctcttcacttttcagccttcttagagaaaaaatcagtttaaattgtttttctttctctttcctagtagaatatcatctacatccactcttcttaatagcttctctcccaatgtttttccctcaaaagtctttatttgacatcattagcaaaatcgacctcatggtgaattctggaaagttgggtacaactgtgaagccaaagagtctggttacttcaagttctggggctttaaaaaagcagcataagaagccctttgatgcaatgaataacattgtggcaaatttgctcctcaacctaacgaggtaattctatccagggatagtcaaaaaactttattgtgcttttggagatattttgaatttttgtagtagcattttttagttattctaaattgtagaagctgcttctgtttttattttgtcttctatcttttcttggagtgatcacgcagaattttaccttctatgactccaaagcagcatttccccaagtatgttccatggaatatgaacagatatcatatgatgtaaaagattttgtggttgacacacttgtaaaacacgtagacaaaattaaacattttttagctgtagaatgtcttaatcatttaaaccaactaatctgtacctcctcattaactggtccaaaagatttctgtggctttttggtatcagagattgctttgacattattatattctagattatagagtatattaagcagattcttgaggaaattagttgtttctacagttactaattattgacttatatgtgtttaactcaaatataaagtttgttttaaataggatatttttatatgtgtaatgagcaactataatagtatattgattacacttcagataatccagaaagaatgactgtagggccagccatggtggctcatgcctgtaaatctcagcacattaggaggccaaggcaggtagattgcttgagcccaggagctggagatcagcctggggcacatggtaaaatcccatatctacaaaaaatacaaaaattagccaggcaaggtgttgtatgcctactgtagtctcagctgctcaggaggctgagatgggaggcggcggttgcagtgagctgagatcacaccactacactccagcctgggcaaccagagcgagaccctgtctcaaaaaaaaaaaaaaaagaaagaaaaaaaaaatgtagatgttgtgtgttatattttattttatacatgattgttctgatactaactttcactaatatggaagaaaagcatgtgttctgcactgaagaacagtgtacaaaagaatttaagaaactacctgctgaataaatcgagctacatttaaagtgtataattttaaaattaaaaattttctcattttaatgttaactttttagctctgcaagatttgaagggtcccttaatatggaccttaatgaaatcagcatgaatttagttccttttcctcaacttcattatctcgtgtcaagcctaacacctctgtatacactgacagatgttaacattcctcctagaaggtaaggtgtaactttgtttcaattttttgaggcctcaaattactttaaaaaacatttttaagagaaaaaagtttgcaataactctagttatttaattgtatcatcttatctgtgagagttgatgacatccatttttgcattagatgaatgcatctttatttagaagtaattgttgaaaaatgccagtattaaactatttgaacttaaatctaatgattaaatttgtaggcttatgaaaagtcctttgaagtctgacaaacacatttgaatcctaactgtcgctagctacaggactttgggcaagtgacttaaactttcttagtttttctcatctgtaaaaatgaaatagtacctacctcatatacttattgggtagattaaatgagagtttgttttaaagctactgtcacagcccagtaccatagaagaatttcagatgtaactctgtatgttttccagaacaccttgctttataactgtgtgtcattgttaagcataaagattacatcagtatacttaacaaaaaatgtagttttgaaagatactcttagcatgtatactgatgatgagcttgaaaagttcacagtggcattcacagttgactgagggaaaaagtcctgccaaactctgtaaggagacagtatgtaaataagaaagggaaaactaaattggctgagtgcagtggctcacacctgtaattccaacactttgaaaggatgagatgggaggatcacttgagcccaggagttcaagaccagccggggcaacatagtgtgagaccctgtctgcacttgtagtcccagctactctggagactgaagtgggaggatcacttgaacccaggagtttgaggctgcattgagctataattttgatcctgcactccagcttgggcaacaaaggaagacagaccctgtctctaaaacagattgaaaataattttttaaaagtttttaaagaaaactaaagattcttttttataactaaagttttgacaagataattctatacttcaggaatgtcacaagtgatattggtaagttttcatctaagccaacagcaaatgaccactttgccaactaatagataggactccgtttctgcatgggatgctgatgaccttaacaagctaagcaacatacacagtgtatgcaacatggtgattattaaatgtccattggcatcagcctagcattggagtctgtgtattgttagatataaactttgtcagtcacctttattttcttttgtcttttatccttcagttaaaagacttaggttaaaagtctctacttttaggagaactactatggagtttcatcttttataggagagcttcacattgtcctttgataatttcctcctgttaacaaaatttatgatataatatactttacaaagtaatagtcttaatgttctaggcttttaattagttttagtagtttggatactatgaaataaataaggtataccgaactaagtaataataatacaagtttcaaaaatcagtactacatagagttcataatgctacagtcaacattttgtagctacctgaaatcacccatatactgcagaagccttttcccccagaaaaagaaaatattatatgatttcttctcttc

SEQ ID NO: 2619 - DNA, 772 bp, Homo sapiens
taaacatccaatggtaagagaggggagaatgatgaaaaattacttagtgggtaccatgtacactaaggcccagacttcaccactgctcaatacatccatgtcacaaaactgcccttgtaccccttaaatttatacgattttcttaaaagacagcttataagttaatagagatgtttatgcagaatgctgagtaaattactcatttatttgaacttaagccactctttggaaatcattagcaaatgccattttacttcattattgtcattgttttattattgtcatttcttttaatattaatgtgattcttataattgtatttttatatcattagaagaaaaaaaaaccctgaattatacgaccaatttgcattctactagtgattttgatgagagatgagaggaaaactccatttcccttaaggagtgcatgttactggggaggtatggtttgaaaaggttctcaaagtgattatgttgtattcacctctgtgactctgtgaagaggacatccctcttgagaatcattacttaacgccaaggagattcctcttctgttcaaagacccttccatgtgctcctgcagccttagacatgtgccattcatcactttagggaaagattattggagccaaaccggaagacaaagaggtgaaaatcttagtttgaaaattattaaaggtgaggcaaaagcgcaaaaaaatatggtaggatacttaatgctgttcgtttgctcacatggtcatgaaataggtaaagtttttatgtgctgg

SEQ ID NO: 2620 - DNA, 934 bp, Homo sapiens
aggcggtggtggagttgcttcccctgctaggcgggctcgaaccgggcgggagtcactgtccaccttgcttcgccagggtgttatcgccagccagtccccttccgcatgcccaagggcagcctcaggaagcgagcccaccaccgtcggcccagcgcctgttgatcggccaggccttctgggccggtcatactgggcccttcctaacctgaggagattgcacagtagggctccctggtctggtcagggctcagttaggacccctctccagccttaggcttggtgaaagctttagcgaaacagaaaaaagaacgcatcgtggtgtagagtgtatggcctaagaagcattcgctccactcaaaaaaaagaaagtcctaatgcaagtaattgaaagtgaagatattgcaaaacaaataatgacagctgaattgatgatatgatgacaggctcatccctccattgtaaactatgctgcgtaagatatgcctgcttcctgtttgccttatgccatgattgtaagtttcctgaggcctccccagccatgcttctatacagcctgtggaaccatgggtcgattaaacctcttttcattacaaattacccagtctcaagtagttctttatagcaatgcaaaaacggacaaatacatggattgtttttggattctgaagattcagtgctatggatttcacatgagtttggctattttgattaaaatgtggctgtttgtctttccatctctgctttgtttcatatttcagactctggctctcactcactatttatgtctctttgccctttgaaatcaccgttcttggtcctgctgctgtcccactacattctaccactcagttggtactagggtgatggtggaatcataggcctccaatgaacctcaaaagctatctagtccaatctcctatctgatgcaatggct

SEQ ID NO: 2621 - DNA, 21878 bp, Homo sapiens
gttacatcgtttggctgtgtcccaaatctcatcttgaattgtagctcccataatttccacatgctatgggagggacctggtgggaggtaattgaatcacggggttgggtctttcccatgctattctagtgatagtgaataagtctcatgagatctgatggttttataaaggggagtttctctgcacaagttctcttctcttgtctgccaccatgtgagacatgcctttcaccttctgtcatgattttgaggcctcctcagccacgtggaaatatgagtccattaaacttctttcttttgtaaattgcccagttctctgatatgtctttatcagcagcatgaaaacggactaatacaaggcatcagatgattgctcattgtggttttgatttgctttttgttactcagttgtaggaatttatatattctagatattaatactcttatcagttatgtgatacgcaactgttttgtccttttctgcaggctgtcttttcactgtcttcgtagtgtcctatgacgcacaaaaatttttaatttttgatgaagttcatttattttattcttttgttgcctgtgctgttggtgtcatatctgagtagtcattgtcaaatccaatgtccatataaagatttttgcatatgttttcttctaagagtttaacagataattttatttcttcctttccaatttggatggctttcatttctttttcttacttaattgctctggctagagcttccaatactgtgttaagtagaagtgacaaaagcaagaattctgtcttgtttccactctttggggaaaagctttcactatttcgccattgagtatgatgtttgctgtggaatttataacagacattaacagatatttaattcccttgccttggtggaatgtttcgggaatgattctgtattctttgactgtcctgggactcttgcatcgagaatgtggtctagaagaccagaacgaggtggctggggagttgggagacacaagtaacatgattttgttttatgttatagtgtggcgtcagttcacctttctttccagacctagtggccattttgtggtcttgagggttacagcaaatgccttaggttttgagtgtctttcagaggcaaggggggttcttataccaaggttctcacaacttttttccctttttgtcttaaaatgattgagaccatagggccgtggtggtgttgaaggaggtcgcctgaatagatccacatccgcatcacaatttcacttcgcctcttgtacttcagtaccaggtttaggggacacatgtgccattcaagtgaggttggctttgtaatgacttttcagggtggattttggcttcctacaggtaagaactttctacctttgtaatatcctgactcatgagttgaaacaatagatatgatgaaggcccatgccccgtttagaagagtaagtctcatgttgccaggtcagaaatagatcctctttcctcttgttaagcattgtgctgaatcctgagagtggtaatcctgcagcaggcagagagaggaggacgttgccctgaagctgtggggaggcctggggttcattcctactgggctgcgggttctggtctcttctaccagtttaaacaaaatggcacagatagccaagagcagtatcagttgagagtagcacgaatcttgggcgctgatgtgtgctgtttagttttggctcctgttttaacacagggagagggcagatggtgaagctctggccacctgtgagtgttggcaaccccaggggggcagtccgtcctgctggctgtactttgaactggaaatactggacatatgacattttccttctgactctcgctgttcgtgtggcttatgcaggaggcaggggaggaacattctaaatgacctggagctatgcatcttgccagaatcaacaagcaggacaaacctttggggagaacagttgagccacttttcaaaggcagtgaccctctgggaccccctacttcaaactggccctggaggagtagactggtggagtggaccggaatggaatgtcctgctgattgtgtggagcaggctgagtagcacatggtttctggccagtgatgttcatttgtgtggccaggtctcaaattcaatattgtttttaagaaaatctttctgaatgaagaagtctccatggactcttactccataaaaactaagattctttgcagagtttcactgggcagcagttccatgtctaggggtggaggtttggcttctgtcagactgttccacagggcacattgaagtcctgggtgctgggcagggctgagattcccaggggagcacccccagggctgggtcctagggcgccttgacactgttaaaaattactgaaggccccaaagagctgtggttatgtggctgtatatattgaaatttactattttaggaattgacaggcatttaaaaaatattttttctccatgtaaaaagaatattcacccattatatgtaaacataacatcttttatggaaaaaagctgtattttcaaaaacaaaaaaaatgggaagagtgtcattgttttgtactttttaaatccctttaatgtctgctttaagagaaggtagttggatccccccatccccctgccacctgcaatcagtcttatgctatttggcctctagaaaactccgctgtgcattcgcgacggaatgcaagggacaaggacacatcgtatcttactatcttgaagataattttggctttaccactcctggaggtcttgccataggggtgaggtcactcataccagggtaccatgtgagaggctaccacaggtggaagcacaggtgtggggatttaggcagagaccttggaggccaggggctgcaacaccccctcactgaattcagatagatgcttgggaaccaccagttcctctgcttgttctcttgtgtctgttgtttgaatcagaaactcagcagcttaggcctcagagagatcttgaggatacttggtccgtaactattatgtgccaaatgagggaacttacttcttcagtcttctagaaaaattttatccctttttgtgttaaaacgtggatgcagcctggaagtggtaatgctagatgctgcataccaccttgatggaactagatgaagtgattagcttcagtcgcctgagtctagagagcctgggaccaggcagggcagcagcatttgagggactcttgggaagcttggcacagcttgagtgtgggggctgtgatgcacaagcataggcagctgtctctctgtctcttcccccagtgtttgttgagccagtgtgatgtgtcctgtgttggctgcccaggtatatacgaccgtttctatcctcaggtcacctttactggggggaagactgaaggtttgtaaaagaaactgtgataccaacgtcattcgatcatccacccgagagtgccttggaacaaaggagtgttaatcgacagcaacgggagaataagaaggctggctttttttttttacctgacatgtaaaggagctgaggagagaagggtgttgcagagaaagcagggatctgcattctcttcctccccactgctgttgcaggctgacagtctttgagtacacacacagatgtggctgtgttgtgccctgtcagaggccctgtgagtctcaccacctcctgaagcacaaaggtccttagtgtggtgctcagagacccctgaaccatggggtacagggtgcacaaaactggccatgagctgactttgtagaagggcagccttggagggagggtgagacattcatgaccgtggacccattttcctctgtcaggaaggatgggggaagtgaagaggacctgatctatatttgccaagagaagctaagcaggtggttttggtggatatgaaggacaggttctttctcgggtcccaggactctctttcctcctgggaagcccgacctcctgtgtggctccatggctctggtcagattcctgactacttagcatcacaacagtggaggacaatggaattctaaaaagattcagaggaaacttagtaatgttaacaggagacagtttgaaattcgattgttgtgactctttcaatggctcaaattgcggagaggaggatgtgtaatgaaatgctaagagtggattttgatggagtgaaggaagtttgaattagctttgattagaacacagcctcatcatggggactccattctcatggggagtagtggatgctttaagatggattcccctgagttcagaggtgggcatcagaatgatttgcctgcataccagtcgtgtctgtggtcccgggtagctttctgttcatcagcccagtgaatggggctccacttttctccctttggctttgcctctgttccaagaagtaaacgtcctgaaatagaaaaggaggagctgttctttggccaatgatttgagaatagctagaactaaagttaccaactgtggagggcggttccctgtgggcctcatcaacagctgagggccccctttcagacacttgtgaacaagctcctccagaatccttgcatgcagcttttgcagaactgataaaagcaatggtcggtcatgcttgccacaagctgcttctgttgagatcatcattctacgatcttgaccaatgggtgaagtttggttgcacttttggcatcttgcattcacagacctacagaaaccagattagggagcatgttggaggtggctctgtaagtgacaatgctaagattgagaacatagtgatgacatggtaagtgtgtactgagtgaattaatgaaagaatactgaatttcaggactaaggggaaacatagaggtgattataaaggaagtgaaaacagaactcccagctgaccacaatgaacctgggggtttatgaaggccttattagggcaattgaagtcttaatttggggattgaaggaggtagcaatggagtcttaaacttttctacccaagttacaagagccaggtaaaaagagaattagtgcagaatctggtatttgagcttcctgcatcgatttttctaaattatttgccaaattacaggttgtttactttctttagctaaggcaccactcagggtttgcctttatcgttgcacagtttgtcgccaggtcatgggagctgaggctgtgtctaggtggctgcaggcctgagaggtgtcaatgatggagtggagctgggggtgttgggagaggtttgagcggacccagctgggcagcaccatagggctgctgggtaggtatttttgggaagcagaatgctgagctctcactcagaaccccagtgtaggaggcagatgattacctgaggccctctgcacagagaaggaaccagctttggagagcatcatgggtttctgctgcttcctcaactggtctccccagttccaggaaggcagaacaggtcattgagaggcacagcttgggcttctcgattgcaacacaggagcaaagtggtagatgggtcatgtctgtgaacgaggtgtgagcagcccagtgtaggacacagtcagggtccccaacatggcgggcctagtggctcactgctgggtctgatttaagaaagatacctggataggacgatgtaagaactgtctttgggtccccaaggatgggttgggagctgaaatgtaccccctgctggccaggagccgcagggactcttgtaggtatggagggtatggcatgggggctgccatactgtgactcaagagtgcgatgggtggatgtgggcctcaaagtgggccagctctgcccagaccagagcattctgcttcctgtggagcatccctgaagtccttgtgaccgtgtggccagagagcatggtcttggggcaggcagatgacaagaggccgtaccaggatggaagtcgtctgcatttggaggcaggaaacaacacaggactccctgcagttgttaagtgtactcttaaggtgtcccatgcttgcctgcacctgcctgccctataccttcaggatccaggtgtccttttggaactggaggatcaggagccagaggggccggcagtctggtactcctgccttgggcatctgtgcgggcattctggtattcctgccttggacttcccggcagccaggcagtgggtacctgggaggatgttgcaccagtctgtgcaggagaccaagagaactaaatactggagatcatgcacactcattaaaaaagaatactgcagaaaagttcgattacattgctagataaagtcatttttaatgtgtccataccctgtgtcagttttcaatcttgtgctactgtatgatagtgatgcatttcagagccattaatcattgtttaccaaccattcctgtttgtaggaaccctctgtttccattgtctttgcaaaattcttgattttctgagttgaggattggttttccttattcatgtttatatagacattaccctgaaaacctagaacacacagtagttacttactgaatgtactaatgatatagagaatgaaaagatatcatcatctttagaatagaatgccaggccctagtgggctctggtgtgtgtgctggtgatgggctaatgttgataactggctgtttgggggtggtgataaagcgtccaaagcacattgactgtttccctacagctttcttcattgaggagaggagagatctttatcaactgtgcacgcctctccactccaaactatttactcctcgcacagttttaacgattacaattacattatgtttcctccacaagcaagaatgtctttcctctttacttttgaggtgtatccttttttctttaacccgccccttttttttaaaactcctttaactttttttaaaactcctttaagggaagaagaaaaggaaaagaaaggaagaaaaagaaaagaaaatagaagggcaaagtctttcagtatttccagaagctgcctgtatagaaaagggcctgtgcagttaatattcatgtgacttggcctcaagcacttaatagcctcattgtgtttaggtatagagcagtgatttctctggaattcctagaaagggagggggagccctccacaagggcagagggggatcacaagggaccctgagtataggtttttgtgtgaggagaagcatataggacccttggcctgaaactggatgaaaacattctttcttagataaattttaaagttgcatgagtaatttgtgatctttattttaaatagtcgaacccagaagtctgtagagagtgaaattctcacttcacttctcatggccctcctttgaggttggtgttcagggttcttttggctccttttgctctgcggaattaactaattactttttaattgatgcataatagataaacatagtttcaaggtacatgagataatttaatgcatgcatgtaatttgtaaaggtcaaatcagtgtacttaatatacccaccaccttaaatatttgtcttaactttagaaacattcaaattcttctcttcttgctattttgaagtgtacaatagattattgtagacggtagtcaccttattgatttatttaattaagtgtacttatttcaagaatgagcagaaataaggcctagtattatataaatcaataaggtgaccatatatttgtactcattaatcaacttttttttaatcctccatacccccctactcttccctgtctctggtaaccaccaatctactctctgtcttcatgagatccacttcatagcttgcacatgagtgagaacatgtcatatgtctttctatgcctgtcttccaggttaatgcatgctgttgcaaatgatagaatttcactccttttttatggttgaatagcactccactgtgtgtatgtaccaccttttttaaatgagttcattgttgttggacacttagatcgattccatatcttggctattgtgaataatgctgcagtaaacacgggtgtgcagatatctttttgatacagatcctttcttttgggtatatacccagcagtgaaattgctggatcatatgatagttctatttttagttttctgaggaacctccatattgttctccatgggggctgcactaatttacattcccaccggcagagtatagggggtcccctttggtacattctccccagtatccattattccctttttgataatagtcattttaactggggtgagatgatatcttattgtggttttgatttgtatttccctgataaatattggtgttgagcattttttggatacacctgttggctctttgtatgtcttcttttagagatgtctgttcacatgttttgcccatttttaaattgagttacttgtttttttgctatggaattgtttgaactccttatacattctggttattaatctcttgtcagatgagtagtttgcaaatagtttctctcattttctctgtttggaattcctgggtgcagacacccacagatatactgctttcccctttttacggcagtgttgcttattcctggtgcttagctctttgcctcctttattaaacacttgccttctgtcagtgctgtgtgaagcactctgtgggaattgcatcatttcatccttgcatgaagttgggacggttttgttctcagtttacagttgaggaaattgaggcagagagtggctgagcgcttgtgcaggctgcccccaccccagctggtggaggctgggttctgagccactttcacagctgcctcccacagaccagagctcatgtccctgtggctcctttagagcttttgcgtgccttccagtgctgctttccatgctggaggagtactgtgctctactatatttaagtcggctcctgtccaggcatttttttccataagttcagcaaagatttgagccacttggccctgtgctaagagatgggatacagcagtagtcaggacagatagagttctcggcctcagagctacctcttcttgggaaagggacacaaaaaaagttggcaggaagaagaacagcactagcaagcctgatgtgttctgcagaagaggcagccaagggctgagctatagacccatgtggagagggtctggagtgggtcaggcggcctgatccctcagggtggacagggacaggacagggtggatggggagccttggttctctgaggaggctaccagcaggggaaggtggaaggcagctggggccacaggtgtttgaaaaaattccaaatacaaggcagagagcatgcaaaggccatgagggaggatagagtctgagaacctggaggaggccaggctggtgagtgaggtgactccagcatgggacagcagtgtctgggcagcctggagaggaggcaggggccacacgcgtcaggcctggcagctgtcgctgagaatttgggtgcatttgaagtacagagggcaatggtgtcacctcatgggctccccagagctagggctggttaagtgggaagcagtgaggatgcttagagacagggcagctgagtcccagttcagatgaggggcagaggcctggagttggcagcagagatggaagggagtggatgactctcagatgcttccgcagccaatgagctgggctagcggattacatggatggaaggcagaagagaaagttaggaatggagagctcttgtttctgccttgtgcagtttggtgggtgccatgaactgggggagaggagggatttgggcagccacatttaggttgcttccagtttttctgtcttaaagtgtgtagtaaacattccgtgtgtgtgtatgcacgcgtgtgtatgcatgtgagtctttctgtaggataagctattccaagaaggatgcctgtgcctaagactaaagtctgaaagctgctgcccccactccagcgggcctccccatgcctgtacagtgtgatcccacctccggtttaggggagccctgttgctgttcagccatcctcaactctgggtagtcccagtccttttaattttcagctatcaattatagctcatgtgtttgtatatgtctccctggctcctagtgaagtttagcatgtttcacatgtctgttttgcaaattgtttgcttctatcctctccccatttttatgttgggctgcttacatcctatctcttatttcagtaaagaagagattaaattcagattgttggctgtgtggtaatggaaatattttgtcccaaggcttttttttttttttggagacggagtcttgctctgtcgcccagagtggagtgcagtggcacgatctcggctcgctgcaagctccgcctcccaggttcatgccattctcctgcctcagcctcctgagtagctgggactacaggcgtccaccaccatgctcagctaatttttttgtatttttagtagagatggggtttcaccgtgttagccaggatcgtctccatctcctgacctcatgatccacctgcctcagcctcccaaagtacagggattacaggcgtgagccactgcgccccgccggctttttgcctgtcttttgatttgtctatagggtcttttgctgaacagaagttagttttttcttcatggcttctaggttgagaatcttgcttatgaagatcttcctcactcagattttataacatttttcttctgtactatctcttagtagtttagtagttcttgtaatgtttaaggcacatatggaaggtgaggatatgaccgtgggatcttactgagcataagttgccagctatccatgatcttatttttaatttatgtgtcatcattcacctctggctgcattctcttacttttattctgtaaatggacatgtctgttcctgtatctgtaaatcagcaagctgagttccttgaagacagggccttccttgggatgatattgctttaacttactgaagtggaggtggagtgtccgtcagcaatgtgagggcttccctttaaaggaggtggtgcatttctaacccttctgatcttcttttggcttcctcaaaaattttttattttcttcaaaggatctcgtatgtattcttaagtgtgttgttttggttgcttctgctaattaaatcattttcaccattagacttcctaggtgtcttggagctgctgtgcagaagggctggggagggtttgtagtttgctctgggatcgcaatcttactaaacgttcagatcggttctaattatttttcagtgcatggtcttacatttcatctgtaaatagtgacggtgtattagtctgttcttgcactactacaaaggaatagttgagactgggtaattcataaagaaaagaggtttaattcactcttgattccgcaggctggacaggaagcacggcagcatctactcggcttctgaggcgtcctcaggaaacctacaatcaaggtggaaggcgacaggggaagcagacatgttttatgtggctggaggaagaggaagagaagtggggggaggtgccacacacttaaacaaccaggtctcttgagaactccatcacaacagcaccacgaggatggtgctaaaccattcatgaaggatccaccaccacagtccagtcaccttccaccaggctccacctccaacactgggggttacaatttgaaatgagatttggtagggacacagaaccaaaccatatcagacagttcttaaaaatctttttcaatttaacatttacacctcgtttctgtttcttcactgtgttttctagaaccctagaacagttacatctgatactgccattgtgagctttccggccctaatgttaatggggatgtcatttttgcttcttcattacctgtgccacttgcctgctggaagttttggatagatgctttttatcaggttaagggggttccttatttatacctcaccactaaaatctttcattcctggcatgcaggggattttaaaagaaattctgttatcttctatgctttggatttcaggctcactctagtagattttcttttccctaaaaggaaatgataaaatctgttccagcaagtgattgaaagaatcaaaatgaagagaaactttacaattattgtaaaagttttctatttttttccttatggtagaaatgatattttattaaaatcacaaaccgtgtggcagggattcatacatccaggtatctgttgacttgcatcttcgctctgccattgattaactgtgtggccttggcatataattaccgtctcctagccttggtttctgcatctgtaaaatgaggtaacagtgctgcctcaaaggattgatatctagttgttcttaattaaaacccacctatctttgcatgttgtgttttgtgtctcacatgcctttacttccttcaatttgatcttcaaaaagccctcccatgagagattgtaaagcatttggtaagattctgacaggtaataggttgtcaatcaagggtggctgccattgccctgagtacagttatcatagctgtcaccaccatcttgggtggcatcatctggagagtcaggaatggctgtgagccctgggattctagtcccagggatcctgtgtgctcgattgtggagtgaagacacgtgcccactcttgtttcagtgtagcttgtatagcacatggtgccatgataaaaatactcatgttcgtatttgcagatttgactcttctggatgaacagtagcatgtatttttgtgccaagtacacactattttaactacttttgctttagggtgcattttactagatgatgagtaattctcccttaatgctctatgattgaccatcttaccgcttattttattttgttagttttaggattattccactagttctaagaaaaaaactgcttgaatttagatagatacatactacatttcatttataaagttgttttggatatttatattacttttaagagaattaatccttatgatgtttaatctttccatttaggaacttagcgtgtttccattcatttaggtctttttatatctcctaagtgctatgatattttatggtttgtataggattattcttagggctaacctaaaatatgcatacctatgtatataaactattgtgagtgtggtcttttctgtaggttttctgctcagtcgctgttctgtgcatgtgtgcatgtatatttatcctgcctctcaccgctctgctggcctttggctagttttagagctgtgtgctgcctctttcaggtaggcagcctctgacctccctgtgcttctggtctgcatggccgtagagggaagcacgctctctggctaacccatctttgtgcttgctcggctggtggctcctggaggccccacactgaggattattgggcctgttggtcctgcttgaccctgaaattgagacctagatggagtctgggcctgtttacacattttggctaagttttgttggtttcagtgatggtggcagttcagaagctgctcccggggtgtccgcgctctgccccctggccattcactgtctctgtggccctctcctggtgtctgctggtggacaggttagtgagggaagaagggccttcctgggattgggcagatgactgggtccctggcagctgagttgctgctgagcctttctgtatgtttggtgatttgaaagtacagccgctctgctattccacagcttgtgcgtctgtgggttccacatccttggattcaactaaccatggataaaaatattcagtccccccataaacaatcaaatataacaataaaacaataaaataattcaaataaaaacaatacagcataaacaatatagcatttacatcatgtcaggtattgtaattaatctagaaatgttttaaagtgaatggaagtgtgtaggtcatatccaaatactacgccattttataccagggactggagcatcctctgatggattttggtgtctctggtgtcctggaaccgatccgccataggtgctgagagatgatgttggcagtgaggtgggatggtttctgttttcgcttccatctgctgcccgcttctgtgggcctcctgttctatcatcttcaccaggaaaggagctgtggctgctggatttgcattactgaatgaagaggccagaagatacacctgataaaagtggtgtgaagtttggcatttcttttctttttttttttttttttgaggcagagtctcactctgtcacccaggctggagtgcattggtgtgatctcagctcactgcagcctcgacttcctgggctcaagcgatcctcccacctaagcctcctaagtagctgggactacagtcacccaccaccacacccagctaatttttaaaagaagatttttatttgtagaaacagggtcacgctatatgccataactggtcttgaactcctgagctcaagcagtcttctagccttggcttcccaaagtgttgggtttacaggtgtgagccactgtgcctggcctgtatttcatagttgttgtttcagctttaagctgtccacaggtcctggcaataacattctgaaattttataattactttttagaaatgttccttttaattccattctatttacatatttctcaatttgtcttcataagcaccctcttactctgggaaaacacagtcatctctgagtctctgatatcagtacaatatggagtttaatttttttgtttaactaaaagtattctgtccccttctgagaaggcctagacttcactccagagctctctggccgaacaggctgaataccctcgtcatgaaagttaggatttgttgagtgtctaaatagtcactgttattactctaaatatttagtgtgagaaaactaggcagaaggaaaactttatattagctcaggaatttttggaagataccaaagatactaaacagaaatcaagaggccctttgtttctgggatattttggaagtaagttaagacattatttatttttccccaggttagtatattctttaagatctcaagtttaagtcgtatctaactggaaactgcctaagaaatctctcctgactgatagggaaatagctgagtgagccctttagactctgtaacttctgtccagtggtccgggtcagcgtgtgaagtgtgctggtctactctcggggtgttggtggtctgggtgtcggtgccagatgaggctactgtaaacagagccgagaggttgtgtttgcagcaggctttcccctgtgtgttgatgggcggacactgaggttattgaggaggcattgtatcttactaactcttcagtttatcaggttcaaagagcatgttgtctttgttttgtcaactgtaaagactaatatcaacttcctagaaaatagacaaaaatggatgaagtgatgatgggtttgacaggacaagtatatttcactttacctcagtgatgtatttaatttatcgtgcccatgagaaaaagcaaacctttcaagcacatgtcttacatttgaagccacatgcctgaagatgccttgggaagtggtcctgggcatttgaatcagaattggggaaaagattaggctctctagagatgggacacacatcaggatatgagaattagcagtgattcgtatgctgttgtgatggtgaccgtaagtccatttcccagtgttcccattgccatgtcacagaccctcatacttgtttgcccatgcacccttttttcttatcttttagtcacttaagctactagaacttagaaatattctagtcgacataatcatcttgatactttccaaacttccaaattctttgagacggttaaagcgatacccttaataaaatgcttttgcataggcaggtgatgttcaactttgatcagtctcataatcatgtatcacatatctccccttttggtcctaaaaagaccagcatcccctttaaacattagcaagcttcatagcttgcaggtggctggtgtgtttcacacctgaaaatgggagaattatttggcatgttgtagttaatgatgagtatacatttgtttaacgtttgctatacgttgaaccctgtcctaagcctttatatgcattagctcatttaatcctaataaaagctccgtgagagagatactattttcatgctgattttatagctgggaacactgaaccccaatgactcaataatttgcccagacatcagccgctaaggggtggcatctggagatgaaccaagactctctggtgcctggatttttagcaagcatgttcagcgggacctgtttcaaaaaacagccatttgactggtcttcttatatctgggcccaggacttcttgatgtcaggtaagaggcaggggcaggtttcattttcaccgtttaacaattaggaaaatttagcttctgactcttccatggagggatctgttgagatcacccacgttgcaggcaggggacctcctccagcccaacagcgataggaggctcctggatggcacccttgctgcatgccagtcacactgctaagccattctctgtgtatttcatttaaacatgttggaatccagtggcattccaatgcagtgtattaaaatcctcagtgaggtgggtttcatccccatgctctgcagtgggaccagagcctgggaagaccagtgagttgcccaggtcactataaagtctcctccggtaggggtttcaattggtctccaccctcttctccatgcctagaacccacctgtgaactgagggctctgcgccttgagctctcagttcataggacttgagtgatgaatcaaagatcagagccagaattggaaccccaggtctgcctgctctgcacccctctcgtggaacacatgtgctccatgcagagtgcccagcggaatctctgctgagaacagtaccaggcattgtgggctggggccaggtctgacatggaggcaggttcctgctgggtgggccgaaggttgtagcctgggaggaccctgacctgggcccgaagtgaattctaggtaactttgccttgcaagagggcaaaggtctgtgtgctttgtaccccgcctgccttggaggcagcgtgctttggagacgcagagatgtgtgggcagtgagcgtagagcccagtgcatcttccctctgtcctctgtctctgggcatcatgtgacaactagaaacctacatcttacttagtcacgtccttgttttgttcttcagaacactcttaaatgatcttcttggaaaaaaatattctttcatgtctgttttaaaagttttattcctgggctcagagtataagttcatttgtataaattctacggaagttcagtgatggcccgtttgactttccagctttggcgctgaccacaatgctgagcaggaagcagcagctgcaggcccagtgactggtagctcagtgaccagcagcccagtgaccggcagccaggtcctcacctgggtcctctcagtgaagccagggtggccgccccagcagacagtgctacagagccaactcctgacaggtgctgcagcgcagtaaatgtaatttgaagaaggcagaaggaacccatggctttagccggctgcccagattcctttttgcaccatccgtactaccaggtatgggcgagcacatatatctgatcctggcccgatggtgctggtcgagggccagggcacacatgtcgccagcagccatggatcgtttctgtagctctcaggtcactaggacacgctggagcaggggctggtgacaagtcccatggtgcagaggcccactgccctttctgcctcggtcttctgtgtcttgctttgccttgtaagatagcgtggtcatattcccgtttgactgtgcgtacttttctaaaagagtttggttgtagtacagagttgccccctgagagccgggcttccgtgtttggaatgaagcaagcactcactgtgtttttcaccttctgggtcgggccagacactcctgatgacgggttctgcagtgatggtggttgtcgggacattcacctggacacatgtgctcacgcgtgagggagtgggaaggagaaagggcttggtgtcttaacagatgttctagagggagtcctctccacagattggctctttcctttcctgagagccctaggtggaattttgtgggagaacaagttcatttctgttccttcactttctctagctcttcttcatgggctgctagaacagtttcatctgcaagttcccttcatcttctgaaacagattttatttgaactttcacttggtgtagacagattcattgttaggggatggtctttggttctttagatttgattcgcgaatcctggttcatccttactcgtgatttgtcattggaagtacttacaccatctctcccaggcctgtgacttttcggctggagcagtcctaggtttggaagtccttttatatgttcaggctgtggtcagctttttgcacttctttgaacttattttctctcttagtctgtgaagtctctttttagctactgtgatgagaaattgcctacagcattatggctgcaaaaagatgcctttgaacattttttttttttttttggtatctaagtgaagcaagccttcgaagaaaggctgaagattaggaataccgttcattctaatcgtcgaatgtgacacaaagccaaaattggttacaagccagaaaagaggattaaaaccttagcgaactgcaaagtttggtggtgacccctgagtctgtgtagtttgtgagctctggaacaggcatctgcctctccctctgcataattgtcttcttgttcttaaagaggctgtggttgcctccccccattgattaaagctctgtgctgcacccacaggtcacaagtccagttctcgtgtggccagttagtgttagctagttgtccgggcccgactgcacccttcacccctgcctgccacttcctactcagtcccaagagagtgcagtcagtgagctcaaagaacatccccaagggaaagtctctcttgaggtcattttcgtagtgctgtcctcggctgggtatagaataggcttttagggccagataatggccacagaggttctgtcagcttcccttcccttcctggcatttccagtttcctgctggtacctacagaagtggcagacttacaagctgtgtcagttcctcccttgatggccttgttaggtgtttgtagtcaccgatgccccaggctgctttcctggagccaggaagtcaggaaggaagggtgggctttccctgctatgtgctgtcatgctttgaggaaatactcattgcttctcagggccatttgaaagcactgtcttactctttaaaaaatttgacagcaagacttggcggcatatgtcccttgttcctggaaaataagatgacagttccagaatttctcagaatatgggatgatttacaatgggttccagtcttgagcagtcgtaattatattataataattagataaatctccagagttttatagagaaaaatttattcttaaaaccttcaacatacaaataattttctaattctagctgttcacttgcagcagtggcttggattagatagatggttcagtccgtgagtcactgatgtgatttttaaaatatgcacagaagcaccaaaattactgtatgcatttaatcatcctgctgttggagggcagcagttggggaggggttctggcaaggttggggatgacccacttcacttttaagacttaagtttttcctttagaatgtgacacatcataattctctgaccttggagaaatcctgcaactttccctaccgcagtttccataccgaagttttggtagaaaagggttagtggtatctgggttgtagcagggattagaggaaatatgtctaaattacccggcgcctggtcatcctttagaagctgagtcaagggctgtgatctttaattctttgatagagcaccagccaggtaccaggcacatgttttgggctagggagccagctttgagctcggcagacagatctttggggctcctggattccagtggaggagacagacatggaacaactggcaagtgagatagctgtgaataatgatactaattctgaagcaaataaaatgggacaacggggggagagagggccggctgccttggtcttcggggggggctccgttagtagggtcctatagctcattgtctgccatttttaaaatcaaaaggtctgaagcaagaaatttcctcatttattatgccacggcagagtccagagctttgccgaacacagggtctgcctgggaagtgggatggggtttatggagctccctctgggccctgcacatctgtgttcattgatgtggacactgtgttatcattctccattccccaaaactcttaattcttaaccatgtccagcctccaggcttttgaagaaggaattatgcacctatgacaaaattatggtaaataaaagcaacatttattatctttcagaaaaatgcaaaataggaaataaaatgtgcttggctacaaacttccgtacacaatgttgaactgagcattagaaatgaaacaacttgcatgtgaattttatgtaggtgattaaatttactgttgaatttccaaaagcaatgtttttattttcatagttttctgatttctgaattaaaaacaatcatgcttagaaatgagccatcttagaaactctccttgccatcctgccctgcagagcctcagcttttggtggagataatggcaacagcattagtgcacatacacgctgtccagccccaggacaccacaagatgtgtgttgtggttccatttcagtgctgtgtccctgaagcttcaggcggggaacctactcttctagtgcagggcttgacgaactgcaatctgcttttgcagataaagttttattggaggctggtcttggtggctcacgcctgtaatcccagcactttgggaggcagaggcgggtggaccacttgaggccaggagttcgagaccagcttggccaacatggggataccctgtctctattgaaaatacaaaaattagtcaggcgtggtggcgcacacctgttatcccagctactcaggaagctgaggcaggagaattgcttgaacccaggaggtggaggttgcagtgagccaagatcgtgccactgcattccagcctgggcgacagagcaagacccggtctcaaaaaataaaattaaagttttattggaacttggccattgggttttgtattgtctgtggctgcttccaagccccatcagcagagttgggtagtgtttgaccctttacagaagaaagttttttctgggacactgactgctagaatgaacctttttggatggacagaggctcaagggggcctccttgtatcagctcatctcctccccattttctgggttagaaacagtcctcagatgagacttcatctgctgatcacatacagctttggattttctgttgggtgccctagattccttaatcttttggcagtgcgtggaggagctgaaagatgacatcatctccgagagttgatttgggctcagttcctggaaatgaattccattcccaaagtctgtcactgttgttattattattattatttttagtgaaagagtgattctgtagtttttcatttttaagtactacaccccccccccatactttggctaaagaacattttattagactacattttctttaagaaatttgttgatagtacctgccactcttaacccttgaggtgggaagttacgaagatcatttgaaatgtctctctttaaattttatttgactgttccagctgataggacatttacctaaaatggttttccaagtcatttaaggttatgattctgaacttaggaacagcagctatgttatggagatattttgtgaggtaaaacaggcagtgtgttgactactattcacctgcatggctttaggcatggtgtttaaattctcc

SEQ ID NO: 2622 - DNA, 2371 bp, Homo sapiens
acaggatccttcttcatggggacccaggctcttcagtcaaaaaggggttattgtgcagttcttaagggaggcggcagcaaaagtaagaaatactggttggcttccccaaatgctcctttaagcagtgtgaagatgagggagaggaggagaatatgagaaatggaattcctgccaaaatctaagttgtcaggaccaaaaaacagaggggaaaggtgactttccaattttaatttttaaaataagtaatatccttaggagaatgtagaaaagaggagttcaagaagaatgggacttccatctagagaagaatttttctggccttagcaaaggagagacgtgagaagtgataaaaatatttcagaaacaaaatgaatactacgactccaatgttggcaggaaattagtgagaaagccgttggacttcaagaggtctggaggctgggaatgaggagcatttcagtggctaactgcatggatctttgggaaccaaataaaacaatgaccgtttcagagactgttgcatggctggtaacccaaggctatctttcatcaaatgtctttagtacactctcaagaacttagacctaatgcccatggaaattgtaggagaaaggaggccaaaattgcctgaaattaagtattgttctcttggtttttaaaagggaaattagattaattgtggttagaagtaaaatttaaattccctagagagtagcttaattcttaacatacaggaaaaattgccagaggaatctttacacatagatactcagaggatcatctatcaatcagttgtacttcttgggacttctagtgtgatgcacaaggtggatctcttagaattgacagatattttgcctctttctctgtgtaaattagggctggaatgggaggagcagccaagagatttcatcagccacagtgtgcatgatggatgagaacacgggacacataccagtgaagggcagaaaatgttacttatcgacactggactaaaaaaagactgtgcgtaacccatagataagccaactcttattgtgataaaacatcagacaaatccaaattgagaacattctacaaaatacctgaccagcactcctgaaaactaccaaggtcagtaaaaatgaaaaatgataactaaatgtaatatgatgtcctgaacatggttctggaacagaaaaggacattaggtaaaaactaaggaaaattgaataaaagtaagaaccttggttaataataatatattaatatttctcattaattttaacaaatatatcacactaatttaagacataataataggggaaaatgggtgttggacatatatatggctgctctctatatggcccaattttcctgtaaatataaaagtatcctaaaataaaaagtttatttttaaaaaattccccacctccaaaaaaaatcttataaatctgtttcatgtactgtagtatgaacatgatttcagagggtgaacagttaataaatgtttatatgacagttcaataaatcaatccccttctctaaggttttcaggtttactttctggcactacgagatactctaggctcaccttgcttactacttgccccagtccagccatcagccattcctgtttccttttattggagaatagaagaatgtaaggactgggttgttactggtgttttgttgcttctaggccctgacagctggctgacagaacaaggaaatatacctggtatattaacctatgtatatacacatatctatgaatatttctttgtgtaatcatatatatttatattaagctaaacatcagttcatatttaggactccaactctaaatcattaccctgtgggtcattccagccttctgtctttgtatatctgcagcctctcaatccatggatgttcttttacttggtcatcctcaccccatggttcaagggtatatgacttattaagagtgaaaatgagaagaggaggtggagcaagatggtcaaatagaaccattcactgatcatcctccctgcaggaacaccaaattgaaaaactatctacataataaagcaccttcataagaagcaaaaatcaggcaacagaatcatatggaagtgtgtgcaaggtatttgtcaaagccttgaagacaggggccctaaccagtacatggaggaactatactgctgggaatactctgataagagttggacagagtctctgccttcatttagtgtgtacactttataaataaactttttaaaaagatgactactgaatggagtccatttatttaaaaatgaaccagacacagccctggacagaaacttcctgatgagatacatgaaaattctgaaatacaaaacataatgaattgtaaacatctttctat

SEQ ID NO: 2623 - DNA, 3226 bp, Homo sapiens
ctcattccctgctctcagtcctagtgactagcgagggaaacgtgtctgcacagcttttctccctggatggaagccgagtgcctctggcctggagcctgtccctcaacctgtccctccaccagggaaagctgcaaaagggagtctgtggcctttccatcctgggtctgtgggagttcatcagagcagagggtgggctcctgacccagcctgtcctcatgggagtgctgcaagctgacacctaagagagaactgcctgattcctagggtgacctaccctgtcaacagaggagggtgtctctgttgcaaaggcctgggaggaggtggccggcagagcttcagagagccattctgggcaagaaggtggctgcctacaagccaggaagagagccctcaccagaacctgacagtgctggtcccttcatcctggacttccagcctccagagctgtgagaaataagccactcagtctatgatattttgttatggcagctcgagcagatgaatacagatgttaagaagctcagaacgcacagtaaagggtgatactacttgtccaggtaagagaggtgtcccagcctacagccaagctggatggaccaatgctgagccttgccttgaggcactggaagggtgctccacaggaatcaggagctgagaagctcagaactgcaaaatggcccctagcccctgctttttcatggaggagctgcagctacctgacagctctctgttctcacaggggttaggacccaggagctgcccttccatgatcacagctggctcgggcttctgctgacaggcgaggctgggctggcttgccagcagaacctcttatctccttcatgtggagtgagtggaaggcaggggacctttcttgacacttggaagagacaaagcccagctctaccatgactgaccacgagaccctggataaatcactgactcattcctgtcctcagtctctccagctgtagatgggatggcaatgtctacctctgcggactgttggaaggatcagttgcatgttagtctaagtggaactgatgctcagctggtacacagtgctatgaccgctctgcctcccattgtcaggggctggagtcccttctggctggcagctgcctgcacctcgccagggattaaaccattttactctaccccttggaactaaatcaagtattcttaagctccaattacctgctaccaaccagcacacctggtaaatacatttctatggggctggcctcccgtgctgagcttttacttctctgtaacagggaggtgtggattctcgagtgcctccctgtgagggagacatttggtcacctggagcctctggccagtagtctgttttaagcagcaccattgttcctgctattctcccctttccagaatgcctagtgggaagcctgtacacttcccccacctcttattcctgaccatagtctgagagctctgggagggaatgagggactgggggacagtcaagcaaggggagagagccagcagggacagcctcttcaagtgaccttcccagattttttttgaaagtatcattcagtgatacatctactcacgatgctatatttatctatgaaagaggcaggatatttttgagcggatgtaatttctggctctctcccttcaagaaaaaaaaaagtgtcattcctattcatttcttcctgcctctgcttctgtctctcacacatttcttttgtataaacataccccccacacatgcacacacacgcacatacacatacacacatctgtgcacacacacagaggcaggcacatggtccaagagctaaaattccgtgactctctttggctgattcagacttatctagcatgatgcatagaaaggcagatagacaggaggaacaggagaaacaaaaaggaaactgagtttgttcatttatatttttgcctccaacttcactgaacacttaatgttatgggaaattggatgagggcaagagaaagctctgagagacacctgccagggtagcagttgggtgaaccaggtcagaaagaacacttttctctctggcttccaagaagtcacagagagcagaggtaccccatttgcaggtgacccaaagctgagacctggggtaagggaagtctgaagcaagattcaggatttttagggcaagcctgaggaagagtaagatgaactgttaccaggatgagcatctttcattctgcatttaaattaaattaccaacacaaatgcctcaagtgtgggttggaggattcctacctacagggtgagcaggtgcctcctgtgtgatctgggcgctgggactgtcagagctgcaaaggtctccaggcagtaaatcagaaagggaggaggtgggggagcacttggctccaggtctctttagctgagttacagacagatgctgggttcaggtatcaaataattgaagagagagagaaaaatgaccaaatctagagaaaggaccaaatttgagacccagagaacatcagcagaaggtgtcttacaggctcaagaaccaggggtttgggaagggagagacagggttgggatctggtagaaaggggacaagagttgacctaagggactcaaacctaaggtaatttcctagtggaacttgggctgtgctgggggctgcagagccctgagctgcccctcccaagacagcagttccagcggcttttggagaataggacattacttagtgtatggatgagtgggtaaatgcttgcttgagtttggggtggggacccttcctggaggggccaccaggtcacagaagaagccagacagtgtgggagtccctggggatagcaccctccataccaaggtttacagctattgggggcaggaaccatcactagagtcagaagctctaggcctgtcgctgactcgctggaggaccgtgtgcagctcatcaaacctctctgagcctcaatttcttcatctgttacaggagagtggtgataatattgcagagggctttgtgaggattgaatgagctgggccatggaaaaggacttttaaaaagtgctttctaaatggtaaagcacaatacaagtgttgttttacttttctctaagaaaaggcagagggcttctatggaaagaacgtgggctttgaaaattgacaggtggaatcctggttatatcccctgtaagctgtgtggccatggggaagttctagaacataagtagataggtgtatagccatcccttccac

SEQ ID NO: 2624 - DNA, 13458 bp, Homo sapiens
cagcatagtcacaatcaggcttttttggggttatcaatttcctggtgaaataattatagtaacagcttaacagtcttttcttatcctttcttttagaagaagtaagcatgttttactaaagtcatgtacacagctgtgatttgaatggcaatatttatcttacatctgtgaaggctgattttcctgacctttgcttcagcataattgagttaaacactcaggggactgtgttactatatttaagacaatatgcataacgggtgttatttagctaagtggtgcctgcccagtaggtgctcaggatccagggagagaggcagactcaacatgcaaacaactcttctatgagggaggaagagaagaatgatcatcaatggcaaaaagcagttgcagcaaagcaaaaccaagagccagctttaagctcaggagagagcgctacatctcctcctcttggtttctggtgctctccaggttcagagacacttttctagtaataaactgaaaaaagatcactgaaagtatcatctttctgagacttctttaatcagatattttgtctggtcattctattcccaaattatcttccatttctcataatttaaaactttgttttattttttactctatattataatacccagattatatttcatcttctaaagctctaattaccttttttattcttgtacaatttaaattcataaagtataatttgtttggtttatttatgtgcttgactctacctagttgctgtgtatgtgtagtttatctcctacatattctatgacagttttattaaaagtttcttcatattatttcattagctgtgcatctgtgggataacatatcctggtaattttattttgttaattttctttaaaacataaaatattatgcattacacactgatttatttaaaagaaaaagattaagatcagtttgacaattttaggaagatcattttggcaatctagaatttttgtttattattagtttttttaaaatttagtaataatttattacaaagcactttgctactaccggggtgacactacaacagtaaataaaaagtttgacttctactagaggatgtacatcatacattacatggaaatcagttcccactatgtctggtccatgcagggtgagcctcaacaagaattagcaattgcagaatttataattgcagaatttataatgttcagcaataacaaattaaaaggtgttgtgtttgagggcaaagacttaagcatttagatttagtaaagctgaattcccaaattaggaaaaaaaatctgattttaagagtttggactcctgaagagatttgtcccacttccggtcacactgatttgctcactttattttgtgacttactggcttagcttgttttcttctatattgctttccttataacaacaatagagagaaaatgggatacattccatatttgttattgtcagaaccccagtggtttagatgtgattgatgaataagatacacgaagttacaacaaagcattgaataatgtgtagttaaaatccagcaggctttataaacaggcacatgtaaatcatttcagcaattttccctcttgtttatgccaattagttcccacataaatgtctacatgtttgaagctattttaaattgattcagcatttttctctcaaaattgcagatatcaaatatctagcatttaaatgctgctttagcctgagactagaagtgagctgcaatgcaactgtaaacacattttgaatgagtggttttgattttatctaccttcatagtttattagttttataatgacatgaagacacagaatacttatcaaaataaggattattttttctgttaaccaaaatgtaaacaattaggtgagttaagttctgggtgcactagctgtgcttctgctttactagtgtctttaaaaagacagaatactgataattttgtacctgtgctactattacagcctgctaaagaagaatagtggacatgatgttctgaaatcactttctggtcattaggttactgagattatatcactcagtgagagccttttcttaacaaggagaaagaactatgtccagagtttatagtgtcttccaaccatgcactgagacaattttcaatgactaattatagcttgagggagcaggaaaaggctaccagaaaaaaaaaaaaaatccatcagaggagttaatttgtagaaagaaggaggagtgcagtttcaaagcaattttgtaaattccaagtgtaactacttgcattcttcaaaacaatttccatcctactgactttaatgataggtcattggtatagaagagataaaacgttcatttcataactgcagtgcctatgtttgtataaggtgtgcccaggaaaaagtcaactagtttttttagaaatttattggaggaatatttgaaatattaaaggctatagtctatatagtcaattcatattataactaaagtctcactccctagttaggcttcagtgttctcacattggcaatcttttattgattattctgaaactttgaaaaaaaaaaaacaactagatagcccccactctaatttttaaatactttcttgaaattataaaattttgctgcatgtttcttgtagtaaaatacattttatagatttgtttaacttacagattttagtggcaccaaaaatttaaaaatataaagtagacttaatcttgccaaatgatgactgaggaatggaatgaaaacaagtgtatacctaaatcctttggctacatttaagttacttttagtaataaagatgtaatgaaaatgaagcaacagccaggcacagtggctcatgcctgcaataccagaactttgggaggctgaggcgggtggatcacctgaggtcaggagttcgagaccatcttgaccaacatggagataccccatctctactaaaaacacaaaattagccatgtatggtgacgcatgcctgtaatcccggctactcaggaggctgaggcagaagaatcgcttgaacctgggaggcggaggttgcggtgagctgagatcatgccattgcactccagcctgggcaacaagagcgaaactccatctcaaaacaaatacataaataagaaaatgaagcaacatatatatcattccaaagctgaagccaaaatcttatcctgaaattagataattattgtcagcaaaattagccataatgatctcatctaataacttacctgatttacatgcaaagccagaataatatcaagaattcagtcacctatcacacagagcacttcatgtgttttacttgaatagcttggtctttctctttcagccatgagtgccagagtgatattttatgcttgtatgaaagaaatacttcaaaaataagaaaaaaactataggataatatgaacacttatggaatagaaagaaggatgacatcacaacaaaataaagcaaaataaatggaggaacacatttggggcagtgaaaaattagaattttctgtggttgaggaagcaggagctgtagagtaaagttgggttgcccagtgagattaaaaaataaaagggctcaaaaaactggtgaagacttgaagaagaaccatccagggattttaagagtgaataaagagataaaatcaatatttaaaaacagttggtgtgataaacagatggaaaggttagaattaaacctggaaaattaaatggctcttaaagaattcaaagtaaatagtggtggggcttctatccagagtgatggcataactaattggaaataagctagagaaaaaaaactttaaaagaaaaaaaaggtaaatatttgatgtctactgcctcagaaacgactgtgatatccatggcactgaagcctggagggagtatgataccatgataaccacaggaaaatgtaggggttaggaggaatggcttaggctgaagtcatgttaaggacaatgagcagttgttaagtcagagatgtgggattcatttatagagaatatacacaagagcagaaaggtaaaaaggtggatattctatactgcattcaattgtttattgattatcaatctattaaccaggcatagtctgaaatactgatacatgtttttttttcaaaacacatattgcaaaagttagttttctattccaagatctctcagttcttttctctaataataacacatttatgtagccaataccgattttttaaaaggacaaacattcaaattttaacctagtccaatttttctaattcatgtgtgaagattttatgaagctctgagttaaaattttcaaaaactagattatttatataaaaattgaaaaactgcctaatggttatcattttacctgtaactcaatcaaagtgttaaccaaatttggactgtggtgaagaattgccagtgaacagtgggtgggatgagaaaggtagctaatttgttttcaaatcacttagattaaaattaatattgctttgccagcataggcctaaacatatgagaattcatttaggaattcagcaattgcaaataagtataatttgctgaacagttctatttacccctgaattctaataagacccattatcataatttatcatttaggaaagcatagtgaagttaaaaaaaaaaaacctttctgactagtcagtgactttacagaaagaagtgttagaatgattatatgtgggagaaggtatccttgcatcagtgcatggttccctttaagggagtaatcattaattatttatataagacaagaagttactctaatagcttgtcaaagtgttgctggtcagaatcatagtgtcttgaaatagcagtttaaaaacaattattattattgttattactatttttacctctgggagcctttattgaatcaaagtgcattttgaaacagacaacattcttgctgctgttaagacaacattctggtgtgcttatagcttggtttctttgatgctcccacccatttttccctccccctcttcttttaggactcagttacttctggactttctaacagaaggaccattctaatatgaaaacatttcattttaggaatacccacattgtaggagtgacacttttttgtgtccattgattgatagaccaattatcaagaggtttcaggctagaaacctcttactactctagggaaaggccctgctggtgaatgttttcatgaacagtaactagctgcatccatctgatttcttatccatgaagatacttggctacacgtgatcgtcctgtaataattgtggtagactgaataatggccccaaagacatctacaggcataccctgtttcattgcacttcacttttttgtgctttgcaggtactgtgatttttacaaactgaaggtttgtggcaaccctacattgtgcaagtctattgatgcactttttccaacagcaagtgctccctttgtgtctttgtgtcacttggtaattattacaatatatcaactttgaaaattattattattatatttgctatggtgatatgtgatcagtgatctttgttgttaccactgaaatcattctggggaaccacaaacaatgctgatataagatggcagactcgatcaacaagtggtgtgtgtgttctgacagctccactgactggtcatttctccatctctctccctctgcttgggtctctctatttcctgaggcacagcaatattgaaattaggccaatttataatactacaatggcttttaagtgtttcagtaaaagaaagggtttcacatctctcactttaaatcgaaagctagaaatgattaaacttagtgaggaaggcatgtcaaaagctgagataggcagaaatctaagcctcttgtgccagttagccaagatgtgaatgcaaaggtaagtccttgaaaaaaatgcaaagtgctactccagtggacacacgaatggtaagaaggtgaaagaccctcattgctgacatggagaaagtttcagtggtctggatagaagattaaaccaactgcaacattgccttaagccaaagcttcatctagagaatggccttaatgctcttctattctatgaagagagggaaggaagctgcgaagaaaagtttaaagctagaagaggttggatcatgaggtttaaggaaagaagtcttttctataaagtcttctttcactttgcacataaaattgcaaggtgaagcaccaagtgctgatgtagatgttgcagcaagatctagctaagatgattaatgaatgtggctacactcaataacaaattttcaacgtagattaaacagccttctactgtgttggaagaaaatgccatctagaactttcatagctaaagaggaggcaccaattcctggtttcagagcttaaaatgtaagctgattctcttgtgaggggctaatacagctggtgactttaggttgaagccaatgctcatttaccgttctaaaaatattaagatgcttaaggtttatcttaaatctactctgcctgtgctatataaatgaaacaacaaagcctgatgacagcacatctgtttacagcagggtttactgaatattttaagctccctgtggagagctactgctcagaaaagaggtttctttcaaaatatactgctcattgacaatgcacctagtcacccaagagctttgatggagatgtgcaagattactcttgttgtcatgcttgctgacacaacatacattaggtagcccgtggatgaaggagtcattctgactttcaagtcttatatttaaaaaatacattttgtaaggctacagctgccatagatagttatttctctcatggatctggcaaagtaaattgaggaaaggagtcgctcttctaggtgccattaagagcattcataattcatgaaaggagatcaaaatattaacattaacaggagtttggaagaaattgattctaaccctcatggatgacttcgaggagttcaagacttcagcagaagaagtaactgctaataaacattagcagaatggaaacagcaagagaactagaattagaagcagaggctgaagatgtgactgaattgctacgattacatgagaaaaaaattaatgtaaaaggagttgctttttatgaatgagagtaaaaaagtgtttttttgagatggagtctactcctggtgaagataatttaagcattgttgaaatgacaaaaaaaattataatattacataaacttagttgataaagtagtggtggggtttgaaaggattgactctaattttgaaagaagttccactgtgggtgaaattctatcaaacagcatggtatgctacagagaaatattttgtgaaaggaagagtcaattgatgtggtaatctccattgaagtcttattttaagaaattgccacagccaccttagccttcatcaaccaccaccctgatcagtcatcagccatcaacatctgaggcaggactctccaccagcaaaaacgctacaacctgctgaagactcagaagatttttggcatttttttgcaataaagtatttttaattaagatatgtacattgttcttttagacataatgctattacacatttaatagactacaatatattgtatatatgttttataattactgggaaacaaaaatatatgtgatttgctttgttgtgacgttattgttattgtctggaagctaacccaaaatatatttggggtatgcctgtacaatcctattctctggaacctgtaaatgttgacttacatgacaaaagggattttttcagatgtgattaagttgaagatcttgagagaaagagattatcatggataatcagggaaggacctaaatataatgactgtcttctatgaaaagggagacagtaaaatacatgattagagagaggagagagaggcaatgtaattatagaagcaaaaggttgcacaggtgcaaaaaaggcgtcatgggcgatggaatgtaggtagcctccagaagctaaaaaaaggcaaggggagaaatcttctcttagttcctccagaaggagctaacctctcaaacaccttcacattagctcaatgaagataatttcagcctcctgaactgaaagagaatacatttatgttgttctaagccatgaaggtgttggtagctggttatagcagccataggaaactaatgcatatgctaatcatgtaatgataaaactagtaagcatgcaatgtttatacaggaaaaagccttcctataaggaatggtagtatatttcactagtagagtactttacagattttagagttcttttaaattattactcccatttgattctcaaaacaattctataagtaagcaggaaagatattattataatacctattttactaatgaagaaattgaagctaagggagcttacatgtcttgtggtaaaaaaaagttatttgactctttgcctagtaatttcttctctatagggtcctgtttctttaaaaaggagctcagaaaagcatctgtaaccagctatatagaccacatttctttaaggaaggcaaatacttttctggtccatagtcagacgcattatccattgcaacactggcctgtgcttgcaaatgttttcttaaactggataaatagaaaattcatcatggaaagacaaccttctaccttaaattcatgttaagcagaagtttattgattggtagatgcaagatcctctctacacaagaaagaattaagcagaatattcatatgaatttatattacttaatatggggtatgccattgaaaggagttagcaagcttgctttaggcaaacagtaaggaaagggtcctggagagcctttgacctgccctgtaggtgcttgcaccagatgttttgtgcagataaaggaacttgcaaagggggcttgcctaaacgtacagactaagggcccacatacaactaggggaatgggatggagccaccagcaattcatgccttatataaatagggaacccaccttcatcagcttgtatgtaaaggcccttgtattcaactctgaagggggcaaccagcaacctgctattagaacccctctttttgctgagagctttccttttcacttaataaattctactccactcattttttcaatgtccgcatgcttattcttcctggtcatgagacaagaacctggacgtagctgagctaaggcacaaaaaacctgcatcattttgggggctcatctgggatacctggtgggtgagtaaatgcagtcccacagcctttcactttcatttctgagccttcttgtcctcagacttttcctgaaggcagatgcagcactgaacctctggtgagccaattaggaatgaatggcacagctacagaggacaggatgcaggagaggaccatgacacgcccacccccgtcatcctctggggttgggaatgtcggtctcgtcccaatccagtcttttctatggcgttttacttctttttttcagtactgtcacggcacctatctcttcttttgtaatgttaagggtgttgctgcaaactgcggagatattactaggtagaatgagcctttgacccagccatcagacatgcaattcagaataatgcgatttccttctgttcttagaggtgtcgcccacccccatcctgatggacatgtggggtgggaatgagctgtggctgccacctgggcccgggccccaggacagcctcggtagccaagggccccatgtggccagctggccagtgtttcctgcttaccatccccccgacgccatgcaccaacagagtctttcctcccgtggccaagccaggaagagggtacaatgattgaaagtttctctccctgttggaggaacccatttgcatagagctagaggattttccctcaggcatcttccctgccctgcccttaagctgttttttttttttttcttttccccacactgtcaggagttaccttttatgcaagaggtttttttttttcctttggaagacatcttattaggccagtaccccaattcacaagacatccttttctctcccttgtttgaggaggactcagctccatagctttaccttagcatgactaagtcctgctgaatttcatggatagaggaggtcatggtagcattcatggatagaggatgctcccacttcatggatagaggtcatgctagcattcatggcatagacaaggtctagggaactcaaaggctactgacagcattgggaaaaggccacatgtggataagtgtggataattcccaccccctcggccccctgttaatgtgggtgaaaacctctgttttccttatgaaaccccaggaattgaaagcagaaagatccctctcaaaacctttagggttcctaacctgtggtaagtaaagaatgttactttctaataggcccaggagacccatgttcttgagacctcaagaaaagaggaatttactcaactcataggtatttgaggctaccaacccatggctggcctcagctgtaaaaggtcttatctgagattccgtggggaacagggtgtcattaaagccgatttaaaggcctgtgtgaaaaacaattactcatgctgcactttacgcaaataatcaggccaagtataagactaaggtttattttacaagcaacttagtcctatcatgatttgtttttgacaaaaatggggactagagagagaaaaattatgtttcaatgcttaccatatacttgttattaaattctcgtctcatctgttgtttttaggtttttgcctacattctagactaaccctgtttatccccgtgaaccaaccagtgatctctggctgtatctcagaagaaacagacagatgggtaatataaagatctagatcaatagtctagttctggacaattatcctgcaaagcctgcaaggtggtaagaataaatggggtgcccataacccagaagtttctttgttatggaaaataagaccaagggagctaaccagagccaagccccatgcccccacatcttggcaggcataactatagccaccagttttctgggcatttcagcagccttggggtttttttgagctgcccttacccccttgtttcattttgatgtgcatcttctaataaccctaattgtttattcttgcttagcggccattaaacttcaaatggtgttgctaatggaaccaggtatgaatgtgtcatttttctggagacccttaaagtgacctcaagaggagccctaactgccgctttcctaaaacagtgccccctgtcagcaggaagcagttaagagctgtcattgaccactttccccaccagcagttggggtatccactcctcaagcggggaatgaaaggcattagccaccttgctttaggtagacagtaagggaagggtcccggagagcctctgacccaccccacaggtgcttgtaccagatgttttgtgcagataagggaacttgcaaagggggcttgattaaacatgccagcagccgactaagggcccacatgcacactgggggaatagggtggaggcaccaggaattttcaccttatacaaataaagaagtcagccccatcagtccgtatgtaaaagcccctgtattcagctgtgaacagggcaccagcaacctgcttttagggcccctctttttgctgagagctttcctttcctaataaatttcactccactcactcttcgacatctgcatgcctatttcttcctggttgtgagagaagaacctggaactagctgagctaaggagcaaaaatcctgcatcacaacttagcatagaacatagtgaatcctaaaatgaaaccagaaatattttagaaaataataatcttaaatatatagacagctaaatagaataaaaaactaaaataaaaagtataccacaaatgtgaaagtgatggtttcatatttctaaagatcacccaaggagacagtttagaaattaaaatgaaaagtacatttttagaatgtattaaagatattataactatgtccagctttattttcatgctgtgtctgcaatctccactaggatgacaatatgcctataaccaagaattttctcattttccatggtcaacattataattactgtaaaggcaaacagcatggctgagtacaaagtacattcaacaggtaaagcatacagtataaagtctatactgtagctatgcaaatgccatcatcctcaaaagcacaagtaaatattgattaagaactttaagcactttgaaggttgctggagcaaaatgaatacgtttagaagtttttagagattgttttgactctattgggttcctggaactgagttattcaatacttctgaaagaagggggcaacatattagatagcagaaagtggttcaagaccacacctcagagaaactttaaaaaaatgaaggattaagaaagtcattatttgatatttttaaaaataaataacctcagtagaaatccattttaattttaacctttatattactaactagaactcatcttttattctatttcctttcatataattcagatctgccctagtacgtcactgaagagagactaaagaaaaaattgtctaatttcataggacattataggtaagctgatttttacagaaatcctttacaaattggttagggccaatgttgttagacctgaagacaacattagaaattaactctggcgtttcatagcataaaaaagagaggcttagaatgatgtgtgatggtctcaccatccatgctgttaatcacattaaaaacctgaacaacaaacagaccccaagaacaccttatgtcctcaaaggcaatttgccatttaaaaataaattctcaaatctgtcgactatattctctcaaaccttgatagcctaagcttccaatttttctcctttggaaaacttcaatagcctacttactacccttgttcttcatcatcctatctcctttccctctaacttttgccccccataaagccagagtgattttgaagtttatatgtcatcatagaacttcgtagtaaaattatttcagtagcttctcactggtcttgtgatgaaggctaagttccctggcctcagccctggctgtttttcaactaaatctcacttcccatccagccccactcatcactcctttgcagccacaccagcctcctgtgcgttcttctcaccctggaggctttccttgcccagtccagttactccctcagacctcaactcaagcctgacttcctacaagtcttccctgactttctgacttatttactaaacccctgtcgtagactcttatagcgacatgtagctttctttcatggcacttatgacagttgtgatttcacatctgtatatatggcgtagtctccccatgaaactataagttccagaaaggcagtattagaatcatagtgttttctcaccaccagttactaaaagctgatcacaatttctaggccaataaaatgataaaagtgat

SEQ ID NO: 2625 - DNA, 1427 bp, Homo sapiens
cagttattctaccaaaaagacatatgcacttgcatgttcatcgcagcactattcacaatagcaaagacatggagtcagcctaggtgcccatcgacagtggattggatcaataaaatgtggtacatctacacagtatgattaggccattcttgcattgctatgaagaaatacctgaggctgggtaatttataaggaaaagagatttaattggctcacatctctgcaggctgtacaggaagcatggtgatggcatctgcatggcgcctgtggaggccccagggagcttttactcatgatggaaggcacagagggagtaggcacatcacatggtccgaggaggagcaagagaaaatgggagtggggctctttgtcctgggaagagtttgctgcatcttccagtttcagtaatcaaagaagcaaagttccctgcagttcttcaaggaaccttgagaattcagaaggtcttggggtggctgcatccatcctgcagacaaatgccaatcagcagaggggccattcccagggacacatgtctggctgacttgggccttggccaggtaagacacacagcatgcatgcctgcatttctgaatgccatagacctgacaagtcataaaatagcaaccaataattttatgttagagtgctcccttcctcacagaaatctcagcatatgtgaagataggttggaatgtgtaaagaaaagctaagaaagcagatttctgataagaacagcgtgtgacttgtacagcagctctgaattacagcccgtaggatggaatgctgacagttccttcttccttacctgtgatggctagaattttatttagcacatcgtttttgagccaatctcaaaatgagaaaacttttgaggaattatgcatagtgtgaagtatattctttcccttgttgcccgtggagattccactgtgacagggcagatttcccactgcagggtcgatggagatgctgctgctgtctttggacataatagtttatgacaaagagaccaaaataattcctgtttagccatgcggttgtctgtaaatctgcttagttggtcatccaaagtgatgacatttaagatatagttgatacactgtttatcttaaagaaacattttaaaattaattcttcagacctatgtaatattttatcttttctgtttaataatatccaaatgtgcttttgtgaagcacaaaacacatgtgtatttcttcataaatcagtcagatagctttgaaaatatatttcaagtatgtagcaaagaccctcaaaacacaattattgaagcattataaaaaggtgaatttgcttcagttttggacttttaatagacttcactgttatgtagtaaagatagaaatatgccataaaagtctctggttaagagccaagactttttctcctgtatcatttcagatccc

SEQ ID NO: 2626 - DNA, 2023 bp, Homo sapiens
ggaggcgtggggctcaaggacgggatgggcctgccttctgccccacagtgaccgacctggagatcaagtttcagtaccgggggcggccaccccgggccctcaccatcagcaacccccatggctgccggctcttctacagccagctggaggccacccaggagcaggtggaactcttcggccccataagcctggagcaagtgcgcttccccagccctgaggacatccccagtgacaagcagcgcttctacacgaaccagctgctggatgtcctggaccgcgggctcatcctccagctacagggccaggacctttatgccatccgcctgtgtcagtgcaaggtgttctggagcgggccttgtgcctcagcccatgactcatgccccaaccccatccagcgggaggtcaagaccaagcttttcagcctggagcattttctcaatgagctcatcctgttccaaaagggccagaccaacaccccaccacccttcgagatcttcttctgctttggggaagaatggcctgaccgcaaaccccgagagaagaagctcattactgtacaggtggtgcctgtagcagctcgactgctgctggagatgttctcaggggagctatcttggtcagctgatagtatccggctacagatctcaaacccagacctcaaagaccgcatggtggagcaattcaaggagctccatcacatctggcagtcccagcagcggttgcagcctgtggcccaggcccctcctggagcaggccttggtgttggccaggggccctggcctatgcacccagctggcatgcaataacaaggctgcagacggtgactggccctggcttcctgggtggcggtgcggactgatgtggagatgtgacagccccgatgagcacctggctggctgcagggtcctacctctgggtttcctggaagtggatttgggccaagaaggagagggagaaaggcccgagcccctgccttcccgggcctttctctcctgggctgtctctggtctggtcagcctggctctcgggaaattcagccatgagcagggaaagaactctcccaaccctggggcctagctgtataggaggaattgcctaagggtggcccactcttgtgattgccccatttcctctggcaacaaaagccagagtgttgtgggccaagtccccccacagggcctctgcagggcatggccctgatttccctggtttgagactcacttcctcatctccctgtcctctgagataatatgagtgagcacttaggtatcatatcagatgctcaaggctggcagctacccccttcttgagagtccaagaacctggagcagaaataatttttatgtatttttggattaatgaatgttaaaaacagactcagctgtttctttccttttactactaccagttgctcccatgctgctccaccaggccctgtttcggatgccaactggcccactccccaagcacttgcccccagcttgcgaccattggcactgggagggcctggcttctgggctgatgggtcagttgggccttcataaacactcacctggctggctttgccttccaggaggaagctggctgaagcaagggtgtggaattttaaatgtgtgcacagtctggaaaactgtcagaatcagttttcccataaaagggtgggctagcattgcagctgcatttgggaccattcaaatctgtcactctcttgtgtatattcctgtgctattaaatatatcagggcagtgcatgtaaatcatcctgatatatttaatatatttattatattgtcccccgaggtggggacagtgagtgagttctcttagtccccccagagctggttgttaaagagcctggcacctacccgctctcacttcatctgtgtcatctctgcacactccagcccactttctgccttcagccattgagtggaagctgccccaggcccttaccaggtgcagatgcccaatcttgatgcccagccatcagaactgtgagccaaataaacctttttctgtataaa

SEQ ID NO: 2627 - DNA, 1194 bp, Homo sapiens
agattggtgacctatgtgctctctagcagcacatttatgggtggcctttgctgctcaccttttaaatgcctggaaaggttctaacatagagagaagggggtagatgcaatattataaagccaatacttcctatcatttattgagcaactgctaaatgttaggctatgctgagtacttggtattttctctatttctcatggcaaccttgtgagagagtcattatctctcattttacagaccagccaaaggatctcagagaaacacctgctcaggactactcaacaagtatatggtggagccacctgccaacctgctaccttaaactgtcattcaaactatctacatatcaactgtcatctgctctatattgttggggcttaaggtcactgcacatcttttgcattcgttagctcctcttcactttctgccatgaatggaagcagcctgaggtccacaccagatgcagacactggatccatgcttcttgacagtctgtagaactgtgagccaaataaacctcttctttacaaattactcagccttgggttctcctttgtaggaacacaaacagacatagacagtgggtttaaccatcaaagatggatccttgaattattttaataagtgaggtactacaacgttatcacacattataatctcttttgcaatattaatatcacttccaggcagcatgtgcagaaagtcattaagatggattagctcaaggctgccaaacccttggtacacaggttgtcacttccccacctgtgtccaaagcagacatcataaatgattcactcatgtccactggatccagatatggcctcagaatatttctggacaacagcacttcaggaaaccatgaccaatgaattaaaagctggcacatgaagtgcatcctgtttgtcactgctggatgagaagactgccaaaggtccttcattcttgacactcatgatccaggtggtgtaggaagtggaactaattgtgagctcaacttgtgagtcctgggtctagcctgactctgacacttgttagctctgtgaccttggaaagttagtccctgtctgcaggcctcggtgtcttcatgtatcttttagctctgtagttccatctggctccaataacttgtgattcatgacagatcacctgatgggggttggacgtgaagtgatcctatggcttttgcatccc

SEQ ID NO: 2628 - DNA, 1123 bp, Homo sapiens
ttctactgctgctcaaattctttccttacgtaagaggttatggcagaattttgggggccagtatgtgtgttggaggtggtgggggcgatctggggaaacggtcttgaaagagctgtatttccaaaatgtctagaagttggtccggtgggacacccaaagcagttacaataataaaatgtttcatgataagaaattaaaatattctttatattattttaatttcttaaaattaagaattattaataatcattaagcttataataaaaaattaaaaaccagactaggaaatgaaccacatgagggtgtgaactggtaaatgtaataaacaggaaaattagccccttaagtatctgagacaatagaacaatttgaaaaagagtatcaaatagttatggtcaaaatacagagataaaatgataggacataggactatgaaaaaagaacaggtaaatttgaaaaagtacagctataatatgtagaaataaaaagtttagtcatttacatataaaaaacctcaatgattgaagtcaaaaatctaataaaaatagctcattgaaaaggggaaagaaaagtaatatattattgtttataaatatagaaatttaaaataatatattaacaaatagaattccagcagcttacatcattaatagatcaaaagagaaaaatggaaagatcatcaccatatatgctgaaaagccatcagataaaatttggcatcgacatataaacaaaccctctgtaacatggtaaaaacaaagggtaaagttcagcccccaaaccagtgttagaaatactagttctaaatgcaagatatgaatgtcctccttcacccctattctttttaaaaattataaattaggaatatgtttggctgcaagtaacggaataccagactgtaatttttatagtgtctaagactataaaaggcttaaacaaataaggatttgtttttctcacatcagaagcttgtatataggtggctattttgggtcagtgccttgatagtttcagggctgatcaaaggatatgtgcatttactattttggtatatattacaaaattgccctccaaagagatctcaccaatttgaactatttcccatagtatgatgattgccttt

SEQ ID NO: 2629 - DNA, 1045 bp, Homo sapiens
gttaccttttaaatactatgtttgttctcacgtttgcttaattatttctttaggatgaattcccaggaatgctattcctgaccctaagtatataaaccaccccctgggtctgaagtgttgtttccatttatatgtgtactagcaggatttttcattaaacatcatgtaacttcattaaaaaaaacacgaattaagttttggcttgtgtgatatgtttgttattacagcacaagtaataagtagatttactattgtgagatggggaacaactggattaaaagaatgcaagaaaaaaagcagcatgtgactaggagttgtattatgatgatgagaggttcctgttaacagcatgagaaaatattcatgaaccgatgatagaataatagtcacaaacagagtctccgatggagaatgccattttggaagacaaagatggctccatcttcagcaggaagcctgggctatggtttgaaagaaagcgagacaatgtcatctggactgtcccataacagcgagtccctagaatcccaatgccattccacattttcccaggaagtgtaagctcattaagacctaaaatatctttccccatccttgtaccactgctatcaatcttcatgaaagaatctcccagctcttcaagatgcagctcattggcacatacagtatattctccaggtgacaaagagacaactgagggggatacctggaagtaccaaccaccgttatcatggccaatcttctcagccggttaatcatgtggtccttccagttaccaaggtctttttaaatttagagggagagggttagagtaattagccttaccaggatcattgatcttaaagagatacactcgctcaaatgcttttattcatcttatacaattcgaaaaaagcagcttccaactccaaatctcctctcttatcttcagctcaaaatagcattgagttaaggttaatatcaactgggtttcacagaaatggctttcacactgaattaaacttgaaaggaaagaagttttatgatgaataaatctatgtgcctg

SEQ ID NO: 2630 - DNA, 546 bp, Homo sapiens
gggttgcggagggtgggcctgggaggggtggtttttgtctaaccctaactgagaagggcgtaggcgccgtgcttttgctccccgcgcgctgtttttctcgctgactttcagcgggcggaaaagcctcggcctgccgccttccaccgttcattctagagcaaacaaaaaatgtcagctgctggcccgttcgcccgggacctgcggcgggtcgcctgcccagcccccgaaccccgcctggaggccgcggtcggcccggggcttctccggaggcacccactgccaccgcgaagagttgggctctgtcagccgcgggtctctcgggggcgagggcgaggttcaggcctttcaggccgcaggaagaggaacggagcgagtccccgcgcgcggcgcgattccctgagctgtgggacgtgcacccaggactcggctcacacatgcagttcgctttcctgttggtggggggaacgccgatcgtgcgcatccgtcacccctcgccggcaatgggggcttgtgaacccccaaacctgactgactgggccaggcagg

SEQ ID NO: 2631 - DNA, 48858 bp, Homo sapiens
gtctcactctgttgcccaggctggagcgcagtgacatgatctcggctcactgaaacctccacctcctgggttcaggtgattctccttgaactcggcctcccacgtagctgggactacaggcatacgccaccatgcccggctagcttttctatttttagtagagacagggtttcaccatgttggccaggccagtctcaaactcctgacctcaagtgatccacccaccttggcctcccaaagtgctgggattacacacatgagccaccacgcctggccccattttatatacatgctgtatgtttgttgcatgtgtcaatcattttgaagttgcatttccacttcacacactctttttttttaaacggataattaggaaattcagccattttgaagttacttgactctggttatggttgttttctaagctctgttaacacacctggtcaaaagtttggaagtcagacatgttttgtttgtcgtttttttttttttttctctgtcagacatggcctgcaccataagcttctgaaaaactctttgaggccagagacttggcttcattgatcttagtatctttggcaatgttttgttcgtagggaagattcagtaaaaggacatttggcatcagactaaaggaaatgtgttccattagatgtttaaatcacggtggtttattttcaaagccatagttttgtagtgtttctttacaacgtgattgaatttaaatgcactgggatgacttcctccaagaagaaggaaactggggggccgagaagatgtggcaaaagcagaaacatgtccatctctcattgggtagggacatcattcatttatttgttcccgtatcattttgcagattccttttcaacctgtacactggctgtctttctctcatccccaagtttcaagatctctggtggtatttcttttccatatcctttacctaccttgccttgctcctccacattcccaattccttcaatttttttttcctctctaatctgctgttttatggatgtcaagatatactctagttactcagctcttaccttagaattgagacttcagagtttcccactaagttccctttgcgatacacaggaaagggaacattaagaggagcacactgagactttaagcaggaaaatcggtaaacgctgaccatactgaacaattaagtctactattacttactggttttcttcttcagagcataaaccgggcttccctttccccagacttggctactgtcccctggcttgcaataacccctggctcctcaaaactctatgccttatacatatgcctttccaagtactcttgccatttggaggatgggaagatactatgtcagagaatcccaggatctgattggatggatataattgtgactgcctcttcctccactgtcaggtaagtctctgaatgtgcctggctgctctgctttctctgagtgccttctgccatgagccaagcttttctgtcaccataagcaatccactcatctcttcaagcagggacacgcatctacgtgattggtggccagatcaaatttctgccttctagaaggcatctttcatatccagtctttcacccttaccagtaatgttatggtctagacttcattgacatggttcctccatggaagatcataatactgtttcccaacccagacatagcatctttctcaacacagaactctaggcaactgctttcattgattggagttgtcattcaaattcaaaatgaagcctacttggcatccctagcagctagtcttctcttgcctagatcattcctcttcatttatttctagccacttgcctcaaccccctcgagtttaaccattgccagttttgattggaaaacctatttattgaacatctctggtgatttttctgctgtacccagttacctctgaatgtgttgcccatctctggaagaagaggtattcctatatacacaccccacattcactgagggcttctctgtggttagttcataactctctttcatatgtggtagccaatgctccattaattaggaatgatgttgaccattctttcttctaaagtctgcacatattccttctggagttgtctgtcatgatagtgtcacacttcaacaatgttgaggctcctggtaaattctacagaaacatttccattttcctttgttttatgtacagaaatatagttattaattaggtccttgggcacaaaaatggaggcaggcatgtgccatttaacatgtgtgttagggttctccagagaaacagagctaataggagagagaaagagagatagacagataagaggagacttattatgggaattggctcatgtgatgatgaaagctgagaaactccataatctgcagtctgcaagctggagaaccagaagagctggtggtttaactcagtctgaaggcctgagaaccaggggagttgatggtgtaactaactcccaagaaccaggagctccaatatcccaggggaggaggaggtggatgtccttgctcaagaagagagagagtgaattccccctttccccatctttttgtcatattcaccttttcattgtattcaggcaggccctcaacagattgggtggtgtccgcccacattggtgagggcagatgtacttgactcagtctaccaattcaaatgccagtttcttctgaatacaccctgaaagactcatccagaaataaagttttaatagacatttgggtatcccttaacccagttcaactgacacataaaattaaccatcacaatatgcttcacatatgtttttaaaatagcttaattttttgtctataagtcttgtacatgggtagtggttgagttagtatcttatcccttgagtttgccaaccccttggatagggtcagtgtcttgggttctctgaatggcatttaacacatggtcacaaaaaccttggtctgaagaactttataatgataaagttcaaggtactttggtgtcttgaggaactccctggactgtgaggcagagactcgcttggctctagtcctggtgctggatctaactggctgccattgtggggctcccctaaagataaaggaactcagtttcctcatctgtgaaatgtgaggatggaattcatcaccatgtcccctcccagctctaaacttctctgagtcttgtttttccctgctctgtatcctccactttctggcatgttttttatatttactattataaatgtgtccctattttataagttgttacagcacgagagagaggtaaggaatagttaacaaaattgtattctgagtagcctaatattcttttttttttcctgctaaacttctttttcctcaccttctcctaacatttttgtgggggtgggtggactggtgggtgactgtagtgatattgatattcagagaggagtgaaaaatgcaaaattgcaaggttaacaacagatggttatatggtgccattttaggagtgttattaaaagaacaaatctattttcctgaatagtaggatgtcttaagtgtttaggcttaaatctactgttgaaatagaaaaagaggaggaagaggaggaggagaggaggaggggaaggaggaggagggggaggaaaagtcaaggaaacacttagaacatttttgcatgatctcaattttcttcttgttccaaggtttttaatttggacagtggtatgtgcttcagattgaatgcaaggaaatttgttgcaccatttgcctgacagttatcattttccttgacgaaaagtttttctgaatcttgctttgctggagctacctcttcccttgccctgaataacctcacttgcttaagtcatcgatgcagtggactgacaccacctttctcttaaggaattaccctgttctctgggtaggtctaatttacactcccactatcacccaaagaagagacactctctatattgataactagaaagaaggaactgagactgttgtccaaggacatcttatctttagcatagagcgaatatgtggtttatggtaggtgttcaacaaacttaaaaaaaaaaacttgtattagtctgctctcatgctgctgaataaagacatatcgaagactgggtaatttaaaaggaaagaggtttaatggattcacagttccacatggctggggaggcctcacagtcatgacagaaggcaaaagtcacgtcttatatggcagcaggcaagagagaatgagagccaagtaaaaggagaaaccccttataaaaccgtaagatttcacgagacttactcatttccatgagaacagtattggggaaatcactccccatgactcagttacctcccactgggtccctcccacaagacgtgggaattatgagagctacaattcaagatgagatttgggtagggacacagccaaaccatatcaaaacttaatcaaaaataattgaaatgtcaggaaatagagaaacttattgagcttttttagggaagtggtctttgaacctgttttgctctgcccactggagtatgctgtccatcaaattgttagttcagtgaattatggtacaaacactcagttacattaatatgactattttcttgtatgctaatttgagaacctactccctggagatatgttatcccatgtaatttccaagtgaaatggagagaggatgccttagactgttacttctcatgtttttcattccaatcttcctcagtgcccctctctataatcccaatcctatacatttttaaacaaaggaaagccactcagatcacagtagctcatggacattggtgagaaacgtgaggaaatgtagaggatccccaaattctcacacataaactaaggtgcagccactgggtatcaagcaaggtttcctcactggtttaatgactccagttttccacattgacatttgtgctgggagccttacatatatgattttgtaaaaccctttctgcagcccttcatggtaggtagcagaatatttaaccctattgtaagagacaggagaaaccaaactgctttttctattctcacccgccattctacacagttctccagcagaatcccactggatgtcctatagtttggcccggttctaacactgtctacctggagatagcctcagatctcacaggtaaagggctcagccccacaagactgcccttcacttaaaatgccaatcgcaagtcccagattgtggtctgtacttctgagcaactggccataaattgggggttcccccaggccctttgtcatgtttgattaatttgctagagtggctcacagaactcagggaaatgctttacttgctactgcccatttatcacaaaggattttttaaagatacaagtggacagccagatgaagagatagatgcatagaacatggtttggaagcatcctgagtgcaggagcttctgtccccatggaattggggaacactaccctttgggcacatggatgacatgcatgtgtttttgttcacaaactgagaagctctctgaacccagtccttttgggtttttatggaggcttcatcacataggcacaattgtttaaatcatttacataaatatgattgatcaactcttccctctcagatgttgaaggtgggactgagagtcccagccctctaatcatatggttggttcccctggcaaccaacccccatcctgaggctatccaggagcccccagccacaagtcaccctaatactatacaaaaggacgcttattttggagattccaagggttttaggagttgtgtgccagggatgaagaccaaatatatcttattataaatcacaatatcacacctattataaagcactacatataaagtttacactccaagaataaaagatacaaatatggaatcttcaaatgccaagggcctactggatactgtgaatgacaatataagctacatcacctgttattgaaaaccagaatgcaagtgtaaacttgaccagggaacctgcggagatggagaagtttgacacctctccagcagcatcatagaaatgaacatcatgagcgcattgagggggagggttaatgtcttcatcgttcttcctctggtagaattatatttgcatccttcctggtggaaacttgatacttcactgtagtgcacctgtacctgtttttttttttttttttttttttttactttcttggagggagagttcttctatctcagaagatagaagaaatagctggaaactctatattcctgtgccctagcacaggagaccaggggtctccaactggtctgtggccttttaggaactggaccacacagcaggaggtgagcagtgggcgagtaagcaaagcttcatctgtatttacagtgactccccatcactcatatttccacctgagttctgcgtcctatcagatcagcagcagcattagattctcattggagcacaagccctgttgtgaactgcatatgtgaggaatctaggatgtgtgctccttatgagaatctaatgcctgatgatctgtcactgtctcccatcacccccagatgggactgtctacagatgggactgtctagttgcagaaaaacaagctcagggctaccaccgatttgatactatggtgagtatgtaatgataataaagcgtacaataaatgtaatgtatttgaatcagcccaaagtcacccccaccgacccacccagtccatggaaaaattgtcttccatgaaaccagtccctgctgccaaaaaagttggggactgttgccctagcaggtagagcaagggtatttcacttaggcttgaccaatcgaatgccttcattctggattttggatctgggagaagtcttgcagagacgaagcaacatttgagaagggttttaaggctagtttgagtttagtgtgctggtcctggctgccatgcattgagcagatagttcctgtggtaagacctgctgcccaagccacccttggtttctgcctagttttctaacacttctgtcaattctccattcttgaatagtcttctaatataggccttttctgctttaggtagccagacagaactgttccttgcaaccagtgactgtctaattcagtcacttaatgttttgtagctttgttcagttactgggcacaacccactttctgctcaggcggcttggagacagccatgggccatatgaatcgctattattttaactttcatagtaagaacttgctccatgtgggaaagcataattattttggtttctgagtttaataagcagaaagcaaagaagaaaaaaaatactgtttgcactgagcattaaaatataaggaagtaaagttgtttatagatagagtttcagctaagcaccaaaggtttatttatattttttgccatttatattttctgcctagttctgcctaggaaccagggaaatccatggcaaggagaaaataaagcatcaaagaggatgaaaatgttgaataaagtattagaacccagaacacttaaatctttaacatccatagtaagagtccttcacattactcaggcagactttttttttttccacctcttggtattctgtgcctacacttgcatgtttaaataacgatttaaaaatcacatgagaaatgatcaggctttctttttcccacttgactctcagttatttcaattctttgagacttgttaaagaaaccgtttagtgttgtaaatgccaccaagtctctacctagtagagattagaaatcctctcaccaattccaagttaaaaaggtcctgacatattttgatggaattggcccatgttctcatttaccagtgaccagctcatctccatgctatgatgctccccaggaaatgtgcatggtttttgtagaaggtggcgagaagcttcatgggcaccagcatccacaacccacttcttgaaaaacaaaatcagatttatatttagctgaccacctggcaagatctcctgtaggaagagaaggaactatacccctattactatttcagcttttattcacaaagtctttatatttgaaaaatgctttataatcattttaattagtggtttctcaccaaagccctggatgtggtattattggcaccattttctgagaagaccgtgtgccattgagatggaattgacacaagatgttaatgggttagaagctggtactagaatcagaatgataggccataggactcagcaagccatgctatttactgtcatcttagagggctaggtagggtggagggaaggagttgatgactgattgttataagtgaaaagggcagcagtgacccaaaacaccattgcaaatgttaacagaggcctgttacagagttaaagctgggttttccaaaacaacacatctgagtaaaagcgcccttggtacattagccagtatggagccagcacctgagatcacactgtgtttgcccctttctgcaatggctattggtgctggttgcttgtcttggcctaagagttttcagctgggcttttgagcaagctgcatcttgaatctgaggatgcgggcaagccaggcacagaactgtgagggtccttgcaatgggctgctggtgttcctgtcattcataagcttggacttggtccccactgtgtttgatttgggagaggttctttgaccatacaactcttaccgtgtaaatgtgctacaatccttgtcaagacatagcaaactatatttgaacattgttttaccatttactgttgtgtgcatgtgggccatattttcctagtcagatggtgagttctgtgagggcaaaggctgagtcattctctatttacattttaagtaggcatccagagacttggttatattctgagtctgtattattgatcaaagccctcacctggagtttctggggccattcactgacccagaatctggtgacattgacacagggagggaataacatccagctacagatggttaacacaggtctttagtgccccaatccccattttgctgactcatctatgcctcaagaactccaatcttcatgcagattctgttgcccttgagtactcagttctgtctcttctgcatacctctgtggagccttggatcctgtcagactcttcgtgttgctgaagttctcagtcctctctctcagccgagtgtaatagtgccccagtgggcactgtagggacagaactgagtttcttcttttcttttaggagttgattctctccgggtaatatctggagctctctaaagtttcagagagaaatacgttccttataaaccttgtggttgtcatgctggtgactccttgagcctgtcctgtgctggaccgtgaggaaggacacaaggccatccagactcctggactcacagtgatttcttgtcctccccaaagatgcctttgcctggtgcactctttaatagcccatcacttcttgctggctgtgtccccagctgagttcctccaggatatggcatcaactctgaacacatctctgtatattccctcttaggaccataagattcatgttaaacttagtgccagaaataaccttgggtagccatgttccttatggttccttagattacattcctagattacacattttacattaaaaaaaaaaaaacaaaacccaaagcacctagaaccgtgctggattcttgataaatgcttgtatccattaaatacatattgaagtaacttctactccagtgacccctctcttgaggcttactgtttacctcctcactttggggagctacccagccaggaccttctgagagagaaaagtggtatatttagtagtcaccagatagttactgttaacggtgctgagttcttaaaaaaacctgttaattgtactagcttaagactaaagtatatgttcctctcctcgtagagtgatgatgatggttttataaatactggttggatagcactgtaattaatgggcacaccagcttttattttggtaacaatgtattcttataccacatttaagaggtttctctttcctgtggtcataaagtgattaaaaaaaaaaaagagaggagagagatgacatcctttttaataaggcatcccaagcagtctaagtacctatgaattataaatgaaaacttttcagtgattaaaataaatataccaatgcagtccccttctctgcgtcattgcttcgccaggcctgcatgaaaatcactcagaggaagtcccaaggggccctgagatcatttgcatctgttccatgtgtttctctgatttatatcagagtgcatcaagggcagtggccttccagctggtttgggaagagggattcttttatccagaggaggcatcagctgatggtcagttagggctctggagtgcagctccatgtaaacaactagcctttgtagtaatggccatataatataacctagtccatgttttgttccctcaagaaccaatttacaacatttaatgttcaaggatggttccattcctttctttgtttacacaggtgaggctttatttagtagtgggaagtgaagggcagatggtttaaggggttcttaatgctgcaggagaggcccataaactgaagtatccaagaaaatccattctaaataagaggcaaacagagtctcagatggatataaattagtattattcttaggaatccttccttcccatttctcagacttatagcaaagctcttactgatatcagtggccattgtgcaagtgggtagcagggaaatcaccctcaatgaccaaatggaagtacatgaggaaaaagatggagaatcctggataaagaagacaactggctgggctccatggctcacatctataatcccagcgctttgggaggctgatgcgggtggatcacttgatgttaggtgtttgagaccagcctgaccaacatgacaaaaccccatctctactaaaaataaaatacgtaaattagtcaggcgtggtggtgggcgtctgtaatcccagctgctcgggaggctgatgcaggagaatcgcttgaacccaagaggcagaggttgcagtgagccaagattgcaccactgcactccagcctgggcaacagagtgagactccatctcaaaaaaaaacacaaaaaactgtctttttctagccctatttatttcaccctacactccatttaccttttatttgttgttaattaaataacattaatttttgttgtaggattatacgtaagaaactattggccttttgctgattgtgctggaatttaaaagttgtagggattgtgggccattgttctaaaatggctcattttgccaaacatgattaatggcttttggggtgcagtttatgtcaaggcaaaattagtggacacttcagcaaactggaatgtggttctgagctaaggggatattcacttagccattcctagacctttcttctatcagaacacgtctttaaggttgaatatccaacattttcaaacattttagtcttaaattctacctttagagtattattgatggtctgattagataatgaaataaattttctctcagcaatgtctgtaataaaacataatgcaggaaagatagcatttaataaaatatttgtttaatgttaataatatttattaccatcagattagaatcaagttaacatcaaattagtaagagatatgtcagtcacaggacttgtagggatgcgagaaaaagaccaccagagaaactgaagaaacaactggaatcatctttgaagaatttcaaactcatcattgagacattggcgagactgggaaaattatttctgaatcttgaaagaatgatgccccaagaccagatcatttaaccattatgtgtctggagagccatcatgcttcctggtatatttactgtggaaaaccctgactctcaaaaattaaaggaaaattacaactgtaataaattggcctgaattgcatggattcataagaccactctctttccatttcttcctacttaatgttgttttcacatagtgatcacttagcagagtttgggaataataactggcaaaaaagctaaaattcttagtccctaaaggaaaagtttgcaaacttattatttaatgttttaaaacccctttcccccgatgaatgttaccctgtccctaggagaagcttctctttcatgagttcatagatcaacagtggaaagatgattgtatttttgagccttgaggttcaactttttctcttctaagtcttttattctgcaagagcccttttgaatgatttaaaatggcattctccatttattcgtatttatcgaaaatctatttggagcaaggtattacatttaaagacagagaagaaatggttcatccactcagctaatatttattgtgtgtacactatgtagctacaagctgggaacagagtggagagcaaaagaagacaccattcctgctcttctacagttgagtctggtagaggagacattcatgattcattttttttttttttttgaagcggtataaccacccagtgggttcacattgcctgctgccttcacagagccaatgtatcgagacaggggaattgcagtgaagaaagagtaattcacacagagccagctgtgcaggaatgagagttttattattactgaaatcagtctcctgaagcattcagggatcagagtttttaaagataatttggcaggtaggggctcaggaagcgaggagtgatgattggtcaggttggagatggaatcatagaggggtcgaagtgagtttttcttgctgtctatgttcctgggtggaatggcagaattggttgagccacattactggtctgggtggtgtcagctgatccatggagtgcagagtctgcaaaatatctcaagaactgatgttaggttttacaatagtgatgttatccccaggagcaatttggggaggttcagactcttggagccagaggctgcatgacccctaaactgtaatttctaatcttgtagctaatttgttagtactgcaaaggcagactggtccctaggcaagaagggggtctacgtgggaaagggctgctagcaattttgcttcagagtcaaaccatggacagaattccttcccaaagttagttcagcctacgcccaagaatgaacaaggacagcttaaaggatagaaacaagatggagtaggttaggtctgatttctttcaccatcataatttcctcagttaaaattttgtaaaggtggtttcaatggagcctcactctgttgcccaggttggagcgtactggttccatctcagcttactgcaacctctacctcctgggttcaagcgattcttgtgtctcagcctcccaagtaggtaggattacaggcatctgccaccacactgggctaatttttttgtggatttttagtagagatggggtttcaccatgttggccaggctgatctcaaacttctgacctcaagtgatccacctgccttggcctcccaaaatgctgggattacaggtgtgaaccaccacgcccagccatgaatctttagattactcaagtaaatgtaaaattataagtgtggtaaatgacaggagatgtatagtagaggaatctcatctgtctagggataaagggctcccctgtggaagtgatatttaagggaagattaaaggattaagaacaattaatttgggaagggatggtgtcttagtctgttctctgttacctgagactgagtaatttattttaaaaactcagaaatttattttttacggttccagaggctaagaagtccaaagttaatgggctgtcatttggcaagaaccttcttgctctatcatctcatggtggagggcaggaaagcaagagagcacacatgccacagagagcaacagagggccaaactcacttttataacaagcccagtcttatgatacaaacctactctcacaataatgacatcaatccattcatgagggctctgccctcatgacctaaccacctctaagttctacctctcaacactcttgcattgggggttaagtttccaactcatgaacttcagaggacacattcaaatcatagcattctgcctctggtattcaaaattcacattcttctcacatgtaaaatatatttatttcataccaattgctctaaaaatcttaactcattccaacatcagcttaaaagtccaaagtccatagtctcatctaaatcagatatgtgtgagactcaaggcatgattcaccctgaggcaaattcccctccagctgtgagcctgtgaaattaaacaatttatctatttttgatacaatggtgagacaggcataggatagccattcttattccaaaatggagaaataggcaagaaaaaaagagtaactagtcccaagtgagttcaaaacccaacaggaaaaacaacataaagtcgtaaatctggagaataatctccacacccttaatattgtctcccaaacatgcttttttcattctttacatggccaggctgaaaattttcaaaacttttactttcttcttcccttttagttacaaatttgtctttaaatcatttccttcttattttactgtaagtggctgaaagaagccatgcagcaccttcaactttgctacttaggcatttgctacttagcctagttcatcactcttaagttctgccttccataaagtcctaggacatagacacaattccaccaagtttgtaactgtatcacaaggatggcctttactccagtttccaatacactgttcctcagatccatctgagacttcatcaggatggccattactgtccatgtttctaccaacatactgatcatgacgtcttaagtaacctctaggaaatcccagtttctctgcagttcttttcttcctctgagttctcaccagaatcacccttaatgccccattcatgacaatctatgcttcttaaaatcttgctcctccaaattcttccagcctctacctattactaaattccaaagcttcttccgtgttttcaggtatttgttactgtaataaaccctcttctcgataccaattttttgtcttagtttattttgtgctgtttataacagaataccagagactgggtaatttataaagaaaagaaagccagcgtctggcaagaaccttcttgctgcatgatcctgtggcagaaggcagaagggcaagagaacatgtgcacaagagagaacaaaagagggccgaactcacttttataacaaaccactcttgcaataatgacattaatctattcatgagccctcatgacctaattgcctgttaaaggtcccacttcccaacactgttgcatggggattaggtttccagcacataaactttggagaacacattcaaatcgtagcacatggggtacagaattatattgcagatacagacagcagctcatgccaatgctgtgtggtaagagaaagcacagggctattgaaagaatgaacaagggtaagggcactggcacccagagggcaaggaagagtacaggtgggatgaatccagagtgggaggtggagactaccaccaggctatgcaggaccttataaccactttaaaaatttgagaagtctgggtgcagtggctcatgcctgtaatcccagcactttgggaggccaaggcgggcagatcacgaagtcaggagattgagaccatcctggctaacatggtgaaaccccatctctactaaaaatacaaaaaattagctgggcatggtggcaggcgtctgtagtcccagctattcaggagactaaggcaggagaatggcatgaacctgggaggcagagcttgcagtgagccgagattgcaccactgcactccagcctgggtgacagagcaagactccatctaaaaaaaaaaaaaaaaaaaaaaaaaattgagagataggagggtcacttgaggccaggagttcaagaccagcctgggcaacatagcaagaacccatctctacaaaaaaatagaaaaaaattatttgggtatggtgatgcaaacctgtagtctcagctactcaggaggctgagggtgggaagatcacttgtgtccatgagttcgaggctgcagtaagctggtattgtgccactgcactccagcctgggcaacagagtgagaccctgtcttttaaaaaaatgagggttttattcaaagaacaatggaaaatcattgatgggttttaagcagtaaacatgaagggaacacatttgtggtttgcaaagattgctttagtgcctttggagaggagtggtagtaagatcatccagggtgctattgttcccaggtgaaagatgcaataattcaggtggaccccttaaagaaagagatatggatgagttctagagatgtggaagaggcagaatcaatagaacttggtattgattgaatatggtgtgggggcagggttattagcatggcccctagatttctagcctgctgagtaggatgaatggtcacaccattcactgagatagaaagctgagataaaacaagatttaggaggaaagttgacttttactttggacaggttgaattcaaagtatagtatggtgtcataaagtaagctgttgttacatagcctaaaaatgagtggatttttaaaaggtcaagatgggcagaagtagagcattccagttatctaacattgcatgataaagtcccaacagttatggcttaaaacaacatttactgtgctcattaatctgaattttggcaaggcttggtggatagcttatctccgcaccacttggtgtcagctgggggagcctgaggctggggttggaatcataagacagcttgctcactcaaatgtatggcagttgatgctggctgttggccgaacttgagcaggggttgtggctggagcacctactcgtgtcctttacatgtggctgcttagcttcttcagagcttggtctgctgggtttcaaggtgagtgtcacaagaataaagtgagagccagacagagactatcacctttcatgacctcgcctcagaagtcatctagcatcacttccatggcattctgttcattagacatggcccagccatattcagggtaaggggaattagagttcactcttcaatggggggagtgttgaagaatttgacaacatgttttaaaaccaccacatggcggggcagagaagaaatcagttatcattccagctggaaggaacaggttgaaacgggaaggtagaaattatattcaatagaagtggagtggttgctgttggctggcctggagcatgtatgaagggttatgaacagtgtgaaatataggttaaaggaacgtttgggaccaaattatggtggagcccaaatttcctgaaacccattattttgaatctggaaacaaattgtcagagaggaatacaaatcagatttattaaataaagataaaaagtagaagcaaacagtgactggcatgggataggaataattctacttgctgataaaataattcatgccaattttggggtgtctagtctacagatttggggtcatatatctccaaatttaaattgtagacatattcaaatgtctttagttgggctttgtaccttatgccagtcaaaaacatgagtcaaaaaaatcatgcctgtatggttcccttcggaggtatctctcctttatcctttagcagattaagataagaatcttggtctttttgatcctggctgtggcttcaaatttttcccatcttactattgggctacccaaaaggactgcatcagacaagactggtgagttgaatagtgttcctcccaaattcacgtctacctggaacctcagaatgttactttatatggaaataggaactttgtagatgtaattagttaaggttcttgagatgaaatcatcctggatttagggtgggccctgaatccaattattgttgtcattaagaaattgagaaggcacagagacaaagcaaagaagcccatggggagatgcagaagctgaccttggagttatgcatctagaaccaaggaatgccaggagcaccagaagctggaagaggcaagaaaggattcttccctagagccttcagagggagcgtgaccctgtcaacaccttgattccagacttcgggcctctaaaactcagagagaataaatttctgttttaagccacgtagtttgtggcaacttcttatggcagtcctaggaaattatacacgaagttagagccaggcatgatgtattagtccattctcacactgctataaaaaattacctgagactgggtaatttgtaaagaaaagaggatccccaggctctatggaaagcatgcctggggagacttcaggaaacttacaatcatggcagaaggttaaggggaagcaggcacgtcttacatagcccaagcagaaggaagagaaattgctgcgaggtgctacatacttctaaacaaccagatctcgtaagaactcactcactgccaagagaacagcaagggggaaatccacccctaccacccagtcacctcccaccaggccctcctccacattgatccaatcacctcctaccaggcccctctttcaaccttggggattacaatttgacatgagatttgggtagggacgcaaatccaatccatgtcacgtggaaaatatgggtgttggtttgccagatgccaaacagaaacaacatttgatctgttgataattgtgtatcctctttatcaggtctatcttaaggaaatcagagagtagagcatattttcttcatggaatggtgagacacatattagcctgagacaggagctaaggagagtgagtggtgggctccaccaaagtgccttcatacaactacactggtaggtgatcagaacaaagggacacgtagaacgaagacccgggtgtgtaacccaaatgcctaacaaagtccattcaatgtatgaggtgttgctgctgtgtgctgaaggaggaaacctgggtcttagtctctgttatggtaaatagagaagaaatcaagccttcctacgacaataggggatttttaatgaagtaaaggagacagaagaaatgtcccaaaggagaatgaagtatgtcaaaaacagattgcgcatgtaattactttctcaggccttcctgacattatcagcaggacttgtgttttgatgaaaaaacttaattaaaacttaatttttttaagtggaaaatattcagcatggttacaggaagactgaaatcagggcactgtgtaattttaattgccttcgagagatgcacttcacgtgaagactagcatgggggaaaaaagctagaggcacaaagtctgaggggagtggccacgctgaatctctagctgtgtgcttgggcgccattttccccactcttacagttgacgggatggcatctcaggtttcacgtgtaggggaggagagtgggtctgttctggagtgtgccggtcaggccatacttggcatacacattgtagaaagtgtcttgatttttattctcctaaaaagggtaaaaagagattgaggagattacatatcccatgaggcagcagtttttaaatgccactctctggatcagttctatcagaaccatctggttctgattcatttaatctgttttaggacctgtgcacagtgtttctattttaaaaataaacctgtcctactcattcttggagtcaggtgtgggaactacaggtttttaatggaagaaacatgaacttgaaaatgagtaaatatgggctacgtcctttacttcccaaggagatttgggttgactgcttagtttcctccatcaaatggggataatatgcttatttgatggggttttgtgaaaataaaagataacacaggtaaagtgactgacacatacagttaagtggtctaaaaatgataaaactgtagaagaagagttggatcaggctgcttgctaaattgggaagggataaggtagtgttcttcagatatttcaagggcagctgcatgagagagagagagagagagagagagtgtgtgtgtgtgtgtgtgtgtgtgtgcgcatgcagcctttagaggtcagactcaagtccagcaggtagaagttatagggagataaatttcaacgcaacagaaagtggaactgtctagtgaatggtccagggatgtcatcagtttgctccagagggtagtacgttccaaatcactggagcaattaaagcagctgccatattttgaggatgtacagggctgtggggcagcaattgaatgagaccacttggttcagctctgtaatagggtttctggcttcctgtggggctgtggctgacatacagttgttttgtaaactaacaacacttgaagaaggttttagcagaaaacgtttaccagtaagatatgtcaggtcaagtacactgttttaggtattctttactggggacattcttgtgaccttcatcccaggcctttcagaaaagggatggggcatatttagaagttattaatgactgagaagctcctctggcacttcaggggagggaactagagctataaaatgtcctgtgattgttctaggactttctccttagtttagctaacatctgggtccttgtcacacggctatgaaatattaggcttacagacactttgaagggtgagaaaaatggaatttattgggtaaaaaggaaaaaaagggaaacagggatgctctgcagagccagattcctgctagtgtgcttcctgcctcacagactgaatcccaggtaccacccaggaagaggaggggccaggctcctccccactgcaaatggcatgaacttcccaagacccctcccccagtgtgcaggccacttggaggttctctggtgacccctttatatttggctgtctcattatgaatgggacaggagtgcgaaattatcccacttcaaatgtcacttgctctctgttgggaaaccctatacctcactgaagcccagatgatctccctgaaccagcctttgagggtcctttttggagccctttggaaacctggtattggatgggttgggttacagggctgctcagcctgacagcctcgcattatctggtgaccacagagtttaaagcagaacattgggaagaaggtagactgggccagttgcacaaagcagagtgtgaagagtgatgggagatgaaggctgtttgcctgcttttcactggggaccagatttggatggatgctggtccaatatgagtgacacagttaacttatcagtgagatccctcattcttctcatcagtgagatagctgggtattgggggaacctgcccccagtatttcaatgtaggttctttctattttccataatatcagctggctgagaaataaagagaaagagtacaaagagaggaattttacacctgggccgccgggggtgacatcacatatcggtaggaccttgatgcctgcccaagccttgaaaccagcaagtttttattaaggatttcaaaaggggagggggtgtacgaccagggagtaggtacaaagatcacatgcttcaaagggcaaaaggtagaacaaagatcatatgcttctggggaaacagaacaaagggcaaaaggcagaactcctgataagggtctatgttcagtggtgcacgtattatcttgataaacatcttaaacaacagaaaacagagttcgagagcagagaactggtctgaccaaaaatttaccagggtggagtttcccaatcctagtaagcctgaagttactgcaggagaccagggcgtatctcagtccttatctcaaccgcataggacagacattcccagagcggccgtttatagacctcgccccaggaatgcattcgtttcctagcgtattaatattaatattccttgctaggaaaataatttagtgatatctctcctacttgcacaaccgtttataggctctcggcaagaagaaaaatatgtctctttttgcctgaccccgcaggcagtcagaccttatggttgtcttcccttgttccctaaaagtcgctgttattctgttctttttcaaggtacactgatttcatattgttcaaacacacgttttacaatcaatttgtgcagttaacacaattatcacagtgatcctgaggtgatgtacctcctcagcttatgaagataacggtattaagagattaaagtaaagacaggtatgaattataaaagtattaatttgggaactgatacatgtccatattaaaatgaaatcttcacaatttatgttcctctgctgtggctccagccagtccctctgtttggggggggtccctgacttccaacagctggggaccacttaatcagggtaagggcagtagtttgtgttcacagtttgatctccctgcatggtgctaaccaggctgcatggggatctaatgtctgactttggccacggcatcaggctccagccaactgacgtgaaagcaagtttccaaatcgtctctttctaaatagataaatgatactcagtgttcctttagccttccttattttttgcaaatgcctgtccccagtggttctgttgtttgctctgattgccgttttccccagtaagtgggaaaaccccacatcttttccccatcagtattccctaatgaggcttgttccctcaaggggaccttgatgagttacaacagcatgaccatgttcccaagcagcatgctaagaaaaacaatccccagtgatgccctgcaggcaccatttaggagcgggcggtaatgaatccctgagagaattcagtcctccgtatgaaggtgatccagagtgaagtaaacaatttcaccgttaggtggttcaccctgcatgcctcattgctggctttctggaaagccagtaaataaggcagaaaaaatgtatcattccctccagagtgcagggtcccctgtcacccacacaggactcctgcctgtcactttgagtcacagctgggctttctggaacccggattcttgtctctggttagctcaggtcttgcagccatgccaaatccaaactgtgacattgtctgaacagtagggcatcctgttccctggtttggctgagctctgcggagcagaacagtggccgaggttaacatcagataatttcctccaccattcctgagtaccctgagggcttgttacctggaatcaaagacttgtcagaactcaagatgaccttaaaggccagcttattcaacctcccacccaggatatgacttccagaactaaccacccacaatgcagattagtaatatcatacgtggttactcaatgcaattgtgtcatttcaggagaaatgacctgttaccaaagtgtcatgaaacccacattaatgagctgggctgtagtggaggtttactttgatttctgaccttaattattagtggtttggattctttacgtttatgatggattttctgattaccaattatgattcactgtaagccatttttaaaaatatgacatgaagctctgacccacttttaacaacacagtggcaaatgccaaacaattggcaatttccccttctaatatcagctgtttgaatcatcacatctactgtggtggctggggaccactttatcttcattctctggcttcagtattcttttctggtattgtcattactgacctaggtgcatatctgtactaggctgggacctcagctctatgccagtgagaaaatgaggttcaactgggaaaacggcctggagcagttgctctcaggcttgtctgcagattagaatcacctgtagacttttaaaaaatactgacacttgggttccgctcttggaaattctaatggatctggggtgcagcctgggcatctggaattttacagtctacctgagtaattccaatgagcaggtgggtggccttgcaaaccggggtctgaaggggctggtcagcaaggagtatgggcaaaatagtgctggctggctgggcgcagtggcttacgcctgtgatcccagcatttgggaggctgaggcaggaggatcatgaggtcaagagttcgagaacagcctggccaacatggtgaaaccttgtctctactaaagatacaaaaaattagctgggcgtggtggcacgggcctgtaatcccagctacttgggaagctgaggcaggagaatcacttgaacccaggaggcagaggttgcagtgagccaagatcccacttggctgccactgcactccagcctgggtgacagggtgagactccatctcaaaaaaaaaaaaaaaaaaaaaaaaatagtggtggccaaggggtgtttataaaacagagttgtgatacatgttcatacattcacctttgaggtctgatttggtggtagcaggagtttcaggggaaatgtttactgatcaggttgatgagtgtccagggacaagatgtgtctgctaagagttagattgatggcaaagattgggcagattgatagttctctagcaaataagatgagatctgctatttcagcaggaaacaagtaaggaagttgaacaaaaagctagtggtatgggccatgtccacaagctgtggttaaaggcaaaggctgaagcctgattggcgtgcccacactgggctgggcactgtcagggacagccaggctgactccagagcctgccttctggttggcttctcccggcttaagtctggccctgcaggaaaaccgacaggagttttcatgccaaccaagactgagacaatcagagactggcaggtttggaaccaggaggtctggatggggaggttggctctgaatctgttgtcattatcaggtgagtcattaggaccacctggaaaagtgaagctgttcttcaccttctcttcttgtgaaagtgattcaatctcccaaacccaggttgatcataccctttaggtctaatataggaagtgttgaattaggtgatgtctctaaagaactctctctgggttccttagagaaaaatagcatttgaacattgtgcctcagcaggaaagaagatgcaatttaagtcctgcaccaaggcattcagggctcacctcaaagtggactcctaggaacaagaagcaaatgattccgtggagagggttagatgtctggccaatggaaacggggatgtagttcaggttttctagccccagaagttcagaacctttgggttcctcggtggacatgtctgttactcgcttgaaactagggaaagtctcttgtgtagaaaacctgttgcatgtcccttgactaccagtagcagcagaggtgctatgtgtggctgaagaattttcctcctttttctgagagatgatttcccaggtttccttctccacaattctgtgggcgtgtactgctgtgataagatgtttgttctctggcttataaattacaagatattttcaggaccacttggaagaaattggaacattttcctggaggcagtgggggagctgctggaggttttcggacaggcgggccacatgctgagagaggtattttgggaaaatgcacttggcagtcatgtgtgggtgaggataataatattaatacttaaccactggcttgttgggaagagtaaggggaacaatgtaagtgagtgtaaagatgcaggaccaccattcctttgttcattctttttttttctttttctttttttatactttacattctgggatacatgtgcagaacgtgcaggtttgttacataggtatacatgtgccatggtggtttgctgcacccatcaacctgccatctacattaggtatttctcctaatgctatccctcccttagccccgcactttgtccattcttttagtttctctgagacctggtgccccaaggataccatcttctcctgaccagtgtatcagtttgcgagagttgccataaaaaaatagcacagactgggtggcttcaacaacagaaatatattttctcatagttctgtaggtgggaagcctgagaatgaaaggcatcggtagggctggtccctcctcagggccgcgagggcagggtctattccaggccttcctccttggcttgtagatggtcaccctcttccctgtctcttcatgtcatcatctctctttgtgtccgaatttcttcttctcgtgaggacaccagtcatattggattagggcccaccctaatgactgcattttaacttaattacctctgaaaagatcctgtctccaaagatggtcatatgtgagatactggggttaggacttccacatataattttttgaggggatacaattcagtccataacagccagtctttttgaagactttctcttttgggggctttacacttaggtaattacaggatattttaaggggtatttcaagacccagcaacccccttctccacccaccatctcccccaaattatgttcgtcacctcctggtacctgttatatcatcactagaattgcttggttgaatcaagtaatgtttcaagataatttccgtaaacatgcactctttttatgtaagaggggtaataatagagccagtgaaatactggatgaattcatttaccaaactacgtaaaagtactgatatatgacaactacttagggaacctaagatttgggacatagagcagcctatttagaatatccggtataacattgcagggaatagcaagggctctagagctttccgcctgggttgaaatctcagctccacccttttctttctgtgtggcattcagcaagttacttaacccacctgtgattcttccttcatctgaacaagcagcataacaatagcatttacctcatgattctttagaaggtgaatgagctaatacctaatatagtgcttagagtagtgtcttgtctgtggttggctttcaataaatgttagctgctattgttgttgttaaactatttaacaaactacgaagcacattcctatctgctttcttctttgcccttgtaacagccctgtggagtagaaggagttagttacattttacagatgaagagactgaggctctaagacattatgcgaaccatctcagggcatatggcagtgttattcagaacatctatcggtaaagaacaagaattccaaaaatataggattttccccaggaaggagggccagagtgtgggctactgtgggatggcctccgggcagagtgtgagggtaggcgctccaaagagtaaggcatctggagaagagaaacaatgaaagaggcaaacgctggatgagaaggacctcaaagcagaactttgcctctcggcctctcagtcaattgtgatctgactgacatccagattgtgatcttgttcaggtggctgaactttgaacccttcttggccatttgatgctaaaggcagtctttgaatgtgatgttttcctagatcgtactggtggaatttagttgcctcagatttcccagtcatgtgccagcactgccaagtgatctccatgtgtgggttttatgatgtgtttccagtgctccacatatggcctgtgatttttttttcctatggctcctaatgaaacactcagaacactgcactgaatagaagtttctccctattctccagagtggggatccttattgcatcgtcaagcatggacaccaaaaataaatggggagaaatctctattctcttagtgatgaggcactcttggaggaagatattattaacatgactacgtcttgccaatttgaaactttgcaaatatctgtaaggttgaccagtttttataatttcaagattttaagttcaacttaaggtactttacaaaattatttttatcataataaattacagttctttacacctgtgtcttttaccgattagattgtgagctactttatgggtgagcaccagtatctacttaactttgtactaaatggctcaatattgcctggaaaatagtaggtgcccaataaatagtaaatgttgttcgatcaaatcataaatgtagatataagctaaacctcttccctgggcaactggaaatgcccatgttatgtcttaaaacacattgaattcaggtgggagaataaaaatgattttaacaaatccagtgtgctttttgaaggcagaactacaattacttcttttttccctcataatcaaatcaacctgtgaaattggaagccaataaatatgtaaaaaagtcatcaaatgtcataggagaggactactatttgattcacacgtgatctttgtcgtttaattgcgtgtggcaagaatgaatggaagtgatattaagtggagaaaaactcagtcccattggtgagttatttaccttgaccactgtgatgggctgaattgtgttcccctaaaattcctatgttgaagtcctaacccccagtatctcagaatgtgactgtatttggagatacagtctttcaaaaggtgattaagttaaagtgaaaatgaggcctttgggatgggtcctaatccaatatggttgttgtctttacaagaagaaaacatttggccacatggagagatacaagggatgcacatgcatggaggaaagaacatgtgaagacatttacaagccataaaaagagccctttcagagactaaccgtgctgacaccttgactttgaacttccagccctccaggactgtgagaaaataaatttctgttgcttaagtcacacagtctgtggtattttattatgatagccctaccaaactaatacaaccacctactttttagaatttgtagaatccaagcacttaagattacaaaaatgcatgtttattgtggcactattcacaatagtgaagacttggaaccaatccaaatgcacatcaatgatagactggataaagaaaatgtggcacatatacaccatggaatgctatgcagccataaaagaggatgagttcgtgtcctttgcagagacttggatgaagctggaaaccatcattctcagcaaactaacacgagaacagaaaaccaaacaccgcatgttctcactcataagttgaacaatgagaacacatgagcacaaggaggggaacatcacataccagggcctgttgggggctggggagctacaggagggatagcattagaagaaatacctaatgtagatgacgggttgatgggtgcaccaaaccaccatggcacgtgtatacctatgtaagaaacctgcatgttctgcacatgtatcccagaactttaaagtataataataaaaaaaagcaataaagaggaggtgatggtaataggcacagacttttgcttgcgttgaggaaatattctaagtttcacaatggggtgtggaagaatctgtgcgaatctccttctgacctctcgtggtaccatttcctcattactcagtgatgaccccagagccagtcttggatgaggcggggtggaattttccacacaggtgccatgagctagggggctcaaaacagacactgtggtgaggttattactgaaatattctgtttctatgaagtttctaacgtaattctgggccctctttctacaaccttagcaagttgctgaactacaggagtgcggagtaacaatgcctttcatgtcaattctgtttacagccaggcttgcttgcattaaactggacacatccatcaactagagtgctggataacagatgagaaaaagctaagtttgagttgtcttttatattgtataatggtgcttctattttctttgttttcttcttgttcttaagttctgtgggaaacccacgggaagaggagtctatccagggtatttgacttcaaatcatttcatctcttctgttcttcctctcatctagtcctctgtgttcttgtaatatacgcaagggcaagattaatagtagaacagaattctgctatgaaatttaagtgatgtgaattctttctcaaaattccaagaatgaaaactttgactatgatatagccaataatttgcacttgtttgcatttgacattgctcatttacattaactagcgtaaaatacctaattagtacagcagaaaaaaaaaaactatatgaggaaaaaaagaaatgattgctcttttactcactggagggaaaggttggatttatttcagctctgtgtttagaaaaatacctttgctgggcttcttggagtgtgaaaagagtggaccctgacccacctctattccctgctgggccatctggaaggattttcacaacaaagataaggctaaaccactctgcaaaatgaaaccagaggaatttcatgagttctggggagtagaaagaagtagggtgagctctgacaaggatgatggggttgggcatgtgatgtctggagttggggctaaggaggccagtccaggagatggtccctgaggtaggatgggagtggggccaggcaactgtaagacagcgatgtctcatgttattgagctttgctatttcgtaacctctatctgccacactttctaaaacctttgcataactactgggtatctaccgagaggaaaagaagtcattatacgaaaaagatacttgtatatgcatatttatggcagcacaattcgcaattgcaaaaatatgtaaccagtccaaatgcccatcaatcaatgagtggataaagacactgtgagatacacatatatatatacacacacacacatatatatacatatacatatgtgtgtatatatatatgatggaacaccacacagccataaaaaggaatgaataatggcatttgcagcaacctggatggaactggagaccattattctaagtgaagtaactcaggaatggaaacccaaacatcatatgttctcactcataagtgggagctaagctatgaggatgcaaaggcataagaataatacaatgaacttcggggacttgggagaaagaatgggaggtgggtgaggaataaaagactacaaattgggttcagtgtatactgctcaggtgatggatgcaccacggtctcacaaatcaccactaaaatacttactcatgtaaccaaataccacctgtttcccaaaaaccaatggaaataaaaaattaaaaaataataaaaataaaataaaatctttataagactactgtacctgttagagcctcctttctgggaaattaaaactctaattgtttccacattagcttatgaggtggttggtaaaagagaatgactacaggaaatgaaatgccaatgaggttgataattcagtgggaccaacaagtcacagtcaaccagtgatggagatggtaaacctactaggaatccacagaaattttgaggcaggtaccggactctcaagagtgtgtgagattggtgaggctttggcctgagccattgaaaataaatgcataaatagcaacacttagcagaccggaaaacatgggggaaaacccagacaagagacacttgggatttgtcagtaaaaaatggagttgtgaggctgggtgcagtggctcacgcctgtaatcccagtactttgggaggctgaggtgggcggatcacgaggtcaggcgttcgagaccagcctggccaacgtggtgaaaccccatctccactaaaaatacaaaaattagccaggtgtggtggcactcacctgtaatcgcaactactcaggaggctgaggtaggagaatcacttgaatctgggaggcaatggttgcagtgagccaagattgcaccactgcactccagcctgggcaacagagtgagactccatctcaaaaaaaaaaaaaaaaatgcagttgtggaagctttgaaatccctgctgtgaggttatggaaggagaatgtttctgttcaagtatgaatcttttttgggaggggtggcaagaggaaggtatgcaaagggaatggtgaataaaatgaaaaggttcgactttttggtggttagtcacctaagaaggttttgtgggggaaataatgtgttttagccagcaaggggattgtttaacctgccctctaccagtctgccgtgcctcacccacttgtctacagctgtcctgttagttgtagcattttgttttcttttatgcaaagggattttcttatgacactcaaggagaacccaggagagggaaggcatctctgccttccagggacaaagtttcagaactgtactgctctacagtggtaaaaagacaacaaagtctttgatttgcaggttgcttgtttcacttaccctgtgaagtggagctcagttggaatatttcatctggccactctttagatgttcacggcagccctgcctggccagccatgaggtcgggcggagaaaggaagcaaggatgagtgaggagggagagaaatggccctggagtttgttgttggagatcttctctgtgtcaaacatcttaagggaatcacctcatggaatcttcgccacaacccattgatatggggattattttccattttataatgaggaaatgaaaccttagaataacagcaagaagctcagacaactatgaagtggcagggtgcagttatgtgactcaaaaccagtgttattttcagaagtgggaaatgtcatgactttgccctcccctccccttctctctcttccttcctttttgttggctatcttgagctgaatggtgataacgcttaactagtggaggtacattttgaataaacagcgactgacttaaatttataatcataattttattctagagttttaacaaatggtaaaacatttagagttatttttccgcagacttgacaaaggtgatgcctgactgtgcctgccgtcatttttttctatttataaaatcagggtaaatttgcaaacttctaaagaagcagacatggcttcagcaaccagtcagggtggaggtgagaccaggaaggttggagctcatgaaaggtcctcctcttctgtctaaggggcacttacttcattggtagctcagctgatactttgggaattccaagaaagagccaggaaccctgctaggaatagagaagcaaagaatccagggctctcactttgaattgctcaccacgtctagaacatgagtcaggcacagacacagaaaagtcagcataatgcgtatgtgcagtgattatgagatgcccatgcagcgtctttacaccagccagggatgcaaggaagaatctccggagaacatctacccaacaggtggatttgcttgtggggaacagaatctgtcaaggagaaacaaagcagtgcagtagttgcatcatcatgaggaaggatgatgtgcagagttagtttcctaagtggcatcgcctataatgagcagcgtgttctcctaccaccttagctgcaagcagttatgctgtatagccaacatctttctcctagctcacaattcaaaagcacattgctgggattccttgggggctttgcgtttatttgttgtggtctagtggtttattctggcaaaatacactgcatggatttttacagtttgctttgtgcttggacatctttccacccaagcaaaatgtttacaaatgccagcacgtcgttttctgaaaatattgctgaaaagaacaaatgtgttgtgatgtgccatgtgtttgaagagaccaggcaaccaaacactaagattgcctcttcctgtcagtgtttttgctcggaatcattctttattgtgcctgtttctccagaactctgtaatccaaaatggtcctgttctctgtggacatgtgtttattctgcaagttaaaaccctttcaagcaattcttgctgtgttaaatataacaatgcactgataaaattctgtcatacattctagaaaatacctttgtataaagtactcatattactgaatttaccaaaacagcataggtaacagattctaagatatcttagagttaattgataatatgtatctgaatgttgtaaaatttatctttcctatgcaaatcccttcaaaccatcccttctagtcccatttttgagacacacacacacacacacacacacacacacacacacacacacacagactgactttgttattccttactggtttttactgatggtcatagacgtctttcttctctgctacttccattatcttcctgccttcaaaatctccactttagttgcagttttgttttactatatttcttatttttaaaaatatataggtaaatagaaattgaaaagctcccattttttgttagattcatgaattcctttatgtaattatttttccaaaattaatcctgaatacagactagtaaatttatatgacaaagaaaatttctatgacaaagcaaaattaatgctgaatacagactagaacatttatatgacaaagaaaatagggaactgtgttgtttcacatactcaggagcttctgaattcaggaattttctagatggagaagatctcattatatggtgacaccagctagccaggtgtactactgaggtctgtctgtgttagactttagaaatagaccaaggatggagggaggtttgagaaatctaagtaaggaagcataggagaccttcttgtttgaggtcaaagaataattggaaggagtggttccatctcacaatttgaaaatgttctaaggaacaaaacgtacttttttatagacctattgatctcagaagatataacacagctggtggagggtaatgatcaatcgccagactaccaccattctattttcttctctgtcaaacgtactcactatattgtgagtgttttcactgcctaatttttcatggcaatttttgaggactggtagctgaactaatttaattctcattctctcacttgttcaccaaatcatttcatgtgtgtttttgccaggtattgttttaaatattgggcactattttcggttcagtaattcaacctattttaatcccttactagcccagttgtaaatttcaaataagtcattttttttcataccagttccctgctttcgagtctctgatgaggctacgctcaagtattacccaggattaggtcctatctgaaagctcaactggggaaggatccacatttgagcttgtttatgcagttgttggtagaattcagttcccttaggacggttggactggggggcctcagctcctagctgactgtgggccagagatcacccttggttccttgacagatgggcctgcccattagggcaaattgaagcatctaagtcagtgagggagagactctactggcaagacagaagtcacaattatatataatggaatcactgaagtgacatctcattatctttgtcatattccattggttagaagcaagttacagcacccacccacatacattcaggagggtgtgtattacacaagcacgtaaacaccaagagatgggatctttggagaccatcatagactctttcctccataccatctgaacatttaatattaatgtagtctgtatttctacataacagttctctgaaaggaaactttgctgtgtgccagataatactttttgatcttcttattttacctttccttaccccacccatgattattactatcaaagctttagggcataacatagtgctaaaatagaacacttactccaaaaatttaattaacaagcaacatgaaataaaaggccatttgcatattgtaggcaaataaaaacattatcaccaggagaagtgagtcagaatatatcaaatataatagctaatattaaatagctgggggtgagagttggaataatgagcagcctctgtacagagggcatgtcaatcaattactctggccctattggagcacctgcctagaagtccttgctgtgcctggttaacccatcagttgctgaatagtggggaggtctctggtggggattctgggaagaggggctgagcagtaattgcggagaaccctaggggatcccagcagtcactatttactaagacatttttattacctaatactctatggctaaatagttaaaagaattaaaaattctcaaatgctttcaaggttggagccagttcatggggtcaggagagctatctccaggcctgcattctactccccttctttttccatccctgccccatccctttcaggcagcacctggtgcacactcaggtgacccagcctacatgtcgaggatccacgtaaacacccctcaaacagatggtcccccgcaggcctcggaatgtggcaaggtctaccattaggaatgtaggctcaggaaaggctccttcaggccctgagagtggacgtggaatcctgatggcggggaatcccagggtcctgtgacccagagcatggtctagaactgtgctgggcagcacagcagccgcacattggctccagagcactggtcgagatgttccttaaatgtaaagtacacaaccaatttcgaagacttaatacaaaaaataaagggcgtaagatatctcatcaataatttttatgttgattatgtgctgacacggtagtgttttggatatactattgggttaaataaaatatataattaaattagttctaactgtttttttctaatatagctactaacaagtttaaagttctatgtgtagcttccatttgtggctcccataacatttctgtggaacagcactgctctagaagggagaagtacggctctgctaggacacatctcctgctaccttggaccccttgccctgtgaggaggaggagctagagcagagccctctaaagcgtggagtcccaggcaggagcctttcttgccccagggtggttttgctttaaggtgatatttatagtctatttggtctcactctgtcatggctaaatgactccaaatctctctcctttgcctacttctgggttttgcccaaggcaagaaaatagtcttcctcaccttccacctgcccacccccactgccactgccaccaccaccgcttttgaatcaatataaccaggcacagaaagtaaaattgttctgtattgacatgtatctttcaagaagctgttattctttgggtgaaacagaatctaatcactaagcaatttttctacagagagagggagacttttcactccccttccccttggtttgtagagtacattcatctttgataattgattcttcgggtggagtaatgatgtaggctcaggaatacgttttttgattcaaagggtataaaaagtgctatgtgtgttaggggttaatgtaagctctgtggaattacaatacggatgtcttctaaagaaaattcactaatctaatctctagagaaggaaacttttagagagtcccttatgactcccttaagaaattattgtggatagtatgttgctgtatgatggctttaagaatttatggtgaatgcttcagaccatggctttagtgtttcaacagaaacagtggcttacttagggtggtggtgcatcttgctcttgaataaatctgatctgagcttacaagtaggaaggagtaatgatttagatgtctgaaatctctttagtttattgtttcttttcttatcgtggcagagagtgactgttaaaactttttcctcctgggcacgtagctggcctacatttcccagcatcccttacagatggctgtggccatgtgactgagactggccaatgggatgctagtggaggtgatatattcttgtccaatcatctactctttctccttttcttctgcctatgagatgcagagtataggggcacatgggcaccacctgagaactctttaggaatgcagaatctttaaccttctcctaggtgtagggaatcagaatctgcattttaccaagattcccaggtaatacctatgctcattaacatttgagaaatattgccctttgagatgacagagccagtagatggaaagatcttgggtccctgccttgtggcttagaggagagccacccaggagtgtggcttcttgaagcagcctgtttagattggtacataaacaggaagtccaattttatcatgatgaggtcactgagattttggagttgtttgttatagcagttagtcttccctggataatatactcacaaagtatttaaacaatgccatgtacctacaatgtatccccttcttaccaataaattctgccaaccaaaatgatcatattgtacctacaatgtccaaaatgtttaatacagactgaggtagaccttataaatggtattggtgaagcctagtggacaattttaagaaatcaccaacattacaaaacgttgactggcaaacttgcgttcaccctatatatgctctgtaaatgttcctagctccctcacttttttgtctttttcttcttcaacggcctccttcacttttcagtagcagcaagattaagaggtgaaaactgccattactccagtgaatgggtgaggtcactgatttgcacaattcctatgagagcccaattaaaagaagatacagagataagcatgtacgttttcatctctcttaactccattatcttattgtcatttggctatgatttatttaggtcaacattgatttctgtagcttatttagatagctagaatgataaaaatatctttttgttatcacaaggagtacaattatttacatatttacctattcatccattcattcttagtatacagaacagtccaatcaggaacaatctgtagtacctatgacaggtacagaaaagcccttaaagattagcctctaaggtgttaatgggagagatttactgatttatatttttccctatggatctggagatacagggtattaacaagatggatgagttattgggggtgcatttgtatgtctcagggtgcatgctgtctctgataattgctgtctgtgtttgattgggcagagccagtatcttaaaaccttcactagaatttcctatattgagacatctaaagttaagaaatctaggtaatttttgcttatcggtttaaattgtgcatagaactaaattattaaataaccagcatgtctaagccttacccttttctttaattacacacatatccatgcatgcacacacatacatgcacacacatacatgcacacgtgctgaggaggaaaaaaaagctgaagggattttgtctgtgcatacatgcgtacatatgcacagacacacacaagaggcacatgtacacatgtatggacctgtgcatgaacacacaaatcccatcaacttctttttttcagccagtcattatagagaggaatgacagcttttatttgctgcaaaaattcaagtggaagaacgtcatatacaagaactaccagcctagtggtagagaaaagaggattctttgaagctctttttagtcagtctgtactagcaatagtccagtgtttcccaacttgagggtgccctcaaggcgttgaaaacataaggtaccactgtgatcgaggttttaccaaattttaactttccttcacttctcacctaaaatatcttgagggtgatctgtgctcagatttgttttaagggttggggggagtattcaccttctgaagtaaaagaaggaacaatttgtcctctgtctggcttctatcatgaaacttcataacccaagagcacatcttgacttcagctttgttatttttagtggtagaggagaggaaacagtaatctgcaaagtgtgagttcaattaccctgacctttcatattgaaatctgaattcttaataagtgttttatgtgcattttatcatttaacccttacaacaaccctatgagataggtagtgttattataccactttgctgaggaggcaactgagacacagaaattaagtaacttgcccagcatttcttgggattctaacctaggccatctggctccagaagctgaactcttaaccacactgctctcctgcagggtcgatgagcttgccatgcctcttggtcattccctaaggtgtggcattttgtgattcgggatctggctaactcatttaaatatggaagtttcacaaagattcaggctgctcagggatacaaaatggctcattggcagggtggggcttccaaggaaatcgatttcattcctttcctaatgggctgcgctagtttgcaaaaatcaagaactgtgacgatttaagatgcatctgaactcttttagatttccatagaacctcactcagcagtcctttcgagatgatgtcatagttcttttgtgtaatctagtaatgccttttaggggaggaagccggtgtattttacaaatgttatcttatccttacaacacccttgaagcttagtaagtgatattagttactgtttgggggattacaaaaattaggttgtggtttttaatgtttatttttatagcaatgagaagtggtacacacacacccatacttatatgcatatttgtaaacatgtgttatgtatattattatatacacgtatgcatcctccccccagcattgatgtgtgtaattcaggtggtatttggttgactccctcctaatattttgcaactgccactaattgtgatggttgttgcactttaaaatgttaaacttttagaatatgtgagaagtgagcaatttggcattggatctagcactgtgtcctcaagtccctttcatgtgctcagtggatttttattgagtgccaattgtgtgccaggcagtggcattacaacagtgaccgaaacaaagtcactccacttgaggacctgaatgtctagtcaaggagctagagagaaaacaaatatatcctctgtcaggtgggggtaaagcgcttctgatgacaaataatgttggctgagctatggtgacatttcagcagaggactgcacgagctctcccaggcttttcttgctctaaagcagtagttctgaaccaggggtgagtttgcagtaactggagatatttttctgccctacctggggcagggctgctgccaggatttcccattcagagtgatttgagaggatctcagtccacctgtaaagaggaaaataccctcttagatttgtagggccacagcctcttttgctgtgcctggaacatactggcagacacctttcctgctggggattttgcaaaatctggggacgtttttggtggttatgcttcggggaagggtgctgctagcatctagtgtgtgaggctggaagtgctgctaacatcctgcagtgtacagggcagctgcccacaacagaatgatctggctcagaatgtcagtagtgccaaagtggataaacctctagaaccacactccccaggggttcagtagactttcccgagtgggcatggaaaggtaaactcaactccctttctgcacgacccctttttctggcccatgagagcctatgctgtggccagtcgctgtgacagaatggttttctgcagggcatccatgctcacagcaggatcagatgccatcttcatgctttgacttgccaaggacattcaccaataaaatgcgcgttcagggagacagctgtcatgacacaacacgtttttcccatgacacacatttcttccgtccctctccaataacctcgactcttgaatgggtgagggacatttcctcaagagctgtttatctgggctttggggctgtcttgtgaattctatttaaaaatactcaaagtccctgagatctttggatctaaataacatactggaaccttcccgtcccctcctctccttggggctatggtaccaacagaagatgaaagctttatttcattttcaaaagtattttatatttctttattttgtaccctcttgataattgatcctcagctgccaggatttcccattcagagtgattcgagaggatgcccaggccacctgtaaagaggataatacactcttagatgtgtagggacacagcctcttatgctgtgcctggaacacactggcagacccctttcctgctccgagtatgcggtaagggggcaagaagctgtatggtggcttctccctggagaagcagcttcagccccttgtgctcctgcactcctgtgctttaagggcgagaacacattggattctttttttttgaggtggggtttcactcttgttgcccaggctcaagtgcaaggcacgatctcagctcactgcgacctctgcctcccaggttcaagcaattctcctgcctcagcctcctgagtagctgggattacaggcataggccaccatgcccagctaattttgtagagatggggtttctccatgttggtcaggctggtctcgaactcctgacctcaggtgatctgcccgccttggccacccaaagtgctgggattacagttatgagccactgcgcccggtgaccacatctgatgctgaaccaaaggcagctcttgggaggtggctctgagcctcccagccgcaaggtaggggagctcaaagatgttttaggagtaagcttgacaagagggtatcaggaaaaattgtttttctttgaatctccccggaatatatcatgtaattcacctcttgaggggtcctagaaagaccacttgccatcccaatatctagccagtcctggagtggacccagtcagagtgcatgaactgtgatacaaggcctatgtcttggtttttttcacctcctgcaagctaggagcctcccaactacccacagattggaagggacttggtgcagggatatggcttcgggtgacaacccacctatcagagctattcaaccattgaacagcatggctgtcagtctgaggtcgcagtgatgtcaggaggtggcagttttggcagctgacagccctcacagatgcccttgtgcagaatgaacctatcaagcattttctctactggctatgaaatggaaagtgaggcaagacattcagttgctgcacaggaaggaaagcagtcagggtggttgcctgagcgtccaggtcccagacaggtctgttctccatggaatacattaagggattgatttacctgtcttggagctgcttcacattgcagtagagggactgtgccgagtgtcatgcaatggccagttatcttgcagaacttgtttgtttctgcaattattaaaagttttcctggcagtttttttgttttgaccgagagtctttcctccaaaaatcattctctccatcctctcagaaccctggataattctctcctgtttgtcgtttgcataccatgtacctggaactcttatgttctggttaagtattctagcataagagagaggaagcaaaataagtcagcagaggatactttcagcatactgtgacttttagaatgttcagttagtgatactaacgtttcatagcctgtaccaataatcaacttttctttcccctgaagacaaagtagcatggttgtgacctatctatactgacttgttttcttcatgcatgcattcaacaaatcttaattgagtgcatgttatgttctaggcgtggggctgggctgaccctctgggaaatgacaagatgaaatgagacacattcctcctttcaagaaagtttgtgtggaatgtagaagatcattcattggttgaggagattgtaaactatcctggaacacagtggtttaggatgaaacaaagcagtgcacaaatgaacgctctagtcagtgaggctccattagaggttcctcaagggtggggactgcgttgagtgtcacgagactcctagggtcagcacagtgcccagcggctggtacgtgctttctaagtatcagctgaaatgctacagcagcacggcctagtggggagggagagagaaagggaggaagagaggggaagggattgaggaaactgacctagattatgggcagtgctggtcccccactctcagcccatgtggcttgggagaatgagcctgtctcttgatgctgtgaactatcaccaagagatcccctaccttgctccccaagttcaccaccaggcttctctccatctcagagcttattgaaaggacatggaatcctctggagggagttctccattgaaaacaaagacaataaattccaagtggcaaatctcataggtggccctgagtccctgtgatttttccagtccaccccttagttgaagtaaggcaaaatttgttttggggtttcataacagtgatgtaagtgcattgctttgaagcagtttttgagggagaggggaaaagcctgagttttggagaactacatttgtggaacccaagaaagtgatacatcttccctcctcccacccctcattgggggagatgacatggggcatacttccctatgtgctttagggggtctctacagaaagggggaaatgggattttgctccttgagtttgctgagggtaggacctgcagacttgctgtggtgccttcagagcaagagggaaagaacacagaaatagataccaccaaaagggatgaggatttcagatggcacacagagcctgctgagcgcatagccatgcaccgctgtgctgtgccttttcctctgacatccctttgcccacatataggagacaatccccttacaaagagccaagagcaagcctgaaggcttctgggagtccagtcggcttggaagtgagggaggaagctgggaaagagtgagcttaggtccgtgaacagtgatgagttcatgaaaatatttgaatctacctgaatagaaagattattttaaactagggaaaatttattttaaactggaagaggctgaaaatataaagtccactaatcttgtctgtctccatgagcttttacacatacgcacatgtgcacacacacgctcgcccatgtaatgttcacttaggtcaagatacagaccaacccaccaccccagaaggagctcttgtgcccctttccaatctctccccaagataaccattattctgacttccatcaattaatcaattttgcctattctttaacttaacataaatgaaatgatatgtgtacttttttgtgtctgactttcttctcctcaatataacgtttatgaaatttatccaagattttgcatgtatcatttttttaatgctgtgtataattccacagcatgaataaaccacaatttgtttatccattcacctgttgatggaaatttgagttatttctaatttttgtttttttcaaatgaaactgccgtgaacatcttgtgcatatcttttggtggacataggcacccatgtctctcagatggataagattcgaattataggttccataggccacatataggtaggcctatttgtatctttatatttgatttgttctattcttctgcccatgacaaaggtagtaaacagggtgtctttgagcagggaggctgaaaatgctctcttgtgagcagggtaagtagatggcttgtgctggtgcagaaaggcaggatgctggagaaatcccaggggaagcatggcaccagtccaaccagagactagggaagactcattaagaataactttttactacatgtaggtccagggaaagctgacatgggaataatgattaaaaggaatcaagtaaaggggcagagaggtagatttaagtaatggaaagatttttggtctgctttctagttttgtcctctagcacaatacgaaataattggctgtgggtatattacaggatcccttagatcttattgtctcatttataaaatataaaggctgtacagggtagttcctaaatggcctttgagctttcatcttctcataattgcatcaataatggcttagttgtaaatgaccaattctagtaataggagaaaatcgcatggaaattactgagaaaagcccagtttacttcatgctgttatcttaacatccacaactacatgtcgagagaatacgaaaatgtgttcttaggcttttccttgttcaaccagtctagccatgtgccattggtccttcaagggcagtggctgagcctcttttcttcctcccccactttttgctccctaccagacaaccttctcccataggtgctagtctgtttcctccctgactcgcattcctgcagccaatgcacctgctggtctgctggctgttgtttctcactcactgaaaaccagatctcaggatggacataggttggtggaccattttcttccagtcattcattcattcacttacagattaactccagttacagtcactgtagctagcatcacatacactaagctatctctcatactcttccagacattgcctaaggctgtggccacccagcccctgccctactgggtggagcccacacttgtgatatctcagagtgcttcctccaaccaaagaacccagccttctgcaggagggacacccctttccccctcagacagtcctgattctggcatattaccagaggccagtctttcctgatctcctcctatcctgagacgttctaggcctccttgagttccagttcgctctttcaagagctgcaccaaaacatctttacaacttgtgtttattatttgctgaagtttagctatcttaataaagaattatacttgtgatgaagtcagggccaggtcagtttgtctttctattcttggttcttagcttgttatctggtatatacaaaatgtttcatgaaaattcttcgtattgaagaaagggaagggttttgccaaaagccctactcaaggctgggaggtactgacgcattactgacacctagggataggctacctaaattgcagggtcatggactatgacaaaacagagtgttagtagtgaacatctcaggtaataccacataactttttaaaggggaaaggtcttcctaatttctataaatagttcaaactttcagacttagaatagtcctgcacttgtggcagtgccctcatagatccagaaagaactgatgttatctgatcttggggaaagtccccgccttgggtttgtaaatatccttactgacggtttctagacatttatgcacgacgttttgtcatgtgggatccagcacatatttctgacctggcgaaaactaagaatatctcaatcataaaaataaccagaaaatcataaaacagaaatctggcccaagattttctctggaaaagtaagaagctgctttgaaaggtgaaaatagaccagtgagcccccgcattggaacagattattccaaaaattgtgagcaaaggtctttttctgtattgtgcaagttaatctcctttgcccctttttgtggctgaaatgcatgcctaatctgcatatgagtgcctgccccaggtgggatggggcatgctgggattcctaaaattcagctggcttgcttgaagagggctatcaggctagatttcatgtctcaacaatttctagccggtctccctgagctggcaagcaccgctcagtttataatagtgcctggcacatggtaggtccagtgtttattaaactaacagatattcccaacaggtgtgggcagcagtgctgctaattagcagtaacatagccgcatggcagggacaggaaaggggagccttctgtgtgtccctactatatgcaatgtatgactccaatctcaaaagaagcagagaatactcagccaaatatttgcattgattcctgccaacaccatttttttgtgatttgtatgttcccttccccaccccccaccccctgtactgttaacttcatatttgaagggggttatacttttaggttatttgtgaattgagtcagctcatgtaacagtgattctcaaagtgtggtcccaaaaccagtgggatgggcatcacctgggaacttgttacaaatgcagattattgggtcccaccccagacctactgaatcaaaaatcctggaggtgggtccagcaatcagtgttataatgagcctaccagatgattctaatgcacattgaagtttgaaaaccaccattgtttaaggatcacaacaaatccaacagcactgtcagaagaacaactccttattctaatgggtcaggtgctttctgtgttggctgtcctgcagagcatctctagtgatagttgtattttcaggattagaggtgcaaaactaatgggagtttaagaaggaagtttgagcctttactgctgggagaatcacaagccaagtttatttctcttccattatttgtatggtagctaaaactgccaaggactactgtgatccattgaaacatcagtgtatcacatctcttcttacatctgagctggcattttgggtgtagtgcttcagtaacagttgtattcccaagcaaataaaatcttagccaccagaaatcttgagttggactagacaaaggcacctctccagatagcagctgttgttggaattgaatataagagatgcttaatcaatgtttgtgtaattgaatagaatgggaaatgaatggctcactccaaactttatacaagacagatgaaggcaacttcgatcttaacctttatgatacatagcattttgtactacccttgagaaaatctcagtctcgggttatcatagactcaattggctatcatgggaaattctgtctcagtgatgctccatatctatttaattgaggtttattatcaatttgaaaaatggaaaattcacctcacatattttaaatagccaagatagccagagtgtatgttgtggtttcaatatgtccccaagagttcttgtgttaggagcttggttgcctttgcagtagtgttgagacgtggggcccttgggaggtgattgaatcgatgctgttatcatgggaatgagtttgctatcttgggagtggggtcctgatataaatgatacatttggctgccattttctcttgtttcatgtgcttgcttccaccttcccccttccaccatgggacaatcctctccagatgcctgtgccatgctcttggacttcccagcctccagaactgtgagaaataaatttctttataaattactgagcattctattatagcagcacagactaagacagtattgaagacatcattacaaagatgcaagatgacaagacagggggtgtgcccatcagaacagtcaagagctttctctccaaaatccccagtgtcgtcacaggactgagatgtagtgacctgactctcgtaagtttctggcttcttccttttggagccacaggtaagcaccagtctagaaccttcc

SEQ ID NO: 2632 - DNA, 1280 bp, Homo sapiens
ggaagttcagttggcaggatggcagcagcagacacacagggtggttaagaacaacaaacacaggagtcctcatgaaactagcgtggacaacactagattgaccactggctaccaaccggcgtaggaattcaacctacatgaagactcagagtcaggacccaccctgcacccccaaactgttgcgctttcccagagcccctgccgtgccgtccttccctgactttctagttcccacccctgaccagctcttgggctctctgcactgagctctctgccctgcaactttagtacatgggatacaagcttcatcagctccctggcccttgttcagaacagctgctcgccgtgaagtggacatgcatgtgctagaacatctttccttgtactgaggaatgataaagcgctggatgatgcccatcctgcttactgtctctggggacaaattgggaacatacaaggtgccaatcccagatgaaatggcatgatgctagcgtctgtgtcttgggggctctgaatactccaggtctggttctgcccctgaggactgaggagatcaatatctccactcagaatgtcctagtagtaaaactagtagtaaagctctgggccagggtttctcaaacttcagtgtgtgtcaggatccctgttaaggcttgttgaaatagattgctgggccccatccccactttctaatgggtaggcctggggtgctgcttaagaatctgcatttgtgagaagtgtccaggagatgttgatgccactggtggggaagaatactttgacagcgactgctacagaatatagcatttctaataggattcaatgaaaatttccactttcctttgatacatttctaaaatcaatcttttcgaacctgtatcccaagaaaatgtggtgcatatacaccatgggatactacatagtcataaaaaaaaaaaaaacaaaatgatgtcctctgcggcagcatggatgcagctggaggccattattctaagtgaatcaatatagaaacaagaaaccaaataccacatgttttcacttataagtggaagccaaatactgggtatatatgggcctacagataggaacaataaacactgaggactccaaaaaagaagagggagatgggcaagggtggaaaaaccacctattgggtacgatgttcactatttgggtgaggggctcaactgaagcccaaacctcagcatcatgcaatatgtccatgtaacaaacttgcacatgtaccccttgaatctaaaataaaatgaaaaaatccctac

SEQ ID NO: 2633 - DNA, 11505 bp, Homo sapiens
tgagtgttaagtgagaaaacttagatgaatgtgctatgataatgacatacaattgttattatcagtaagaatgacaatgattttcttccatatcctaccttacaactgttcatacctgcatgctgattatattcactcctcccattctcagttatcagtgctcccatggtagacattgataattcatctctgctctcttttcctcctttctcagtggtccagagggcccagcagcacagctggttgcactctgacttctgactgcttagcagtgggtaccaggctacttatacagcatagatcatgcatagatgagtgagatgagtgttcgcttatgatgtgaatggcaccacttagaatggtgcagtgcacaacttgtacaattgtatgtggaagccttggcatctacctgtccatccacagacatctagaattttttccctttagagcggtatttaggccacagttccagctttgccagtagggtttgtacaatgttagaggctatgttagacagtttttctcatctgagatatcaggagattccaaacacatggcagcatgtagagagaagaactgtgaataaggctgacatctaggagactggaatctagaagcaagcaggtaaatctaggtggttgcctaaatgaaggggtatgatgcagttagggggagaaatgagcaaccccagaacaagggaaaagaacaattgtaagtagacagaatgcacagggagcattgagttaactttctggacaagacagtatttgtctgagatttactttaatgtgtggaccataaacctgccaggttctgacgtggatgggctctgaagcagactgaattttgtttgcccccagattcatgtggaagctctaaccctaatgtgattgtatttggagatagggcttttaggagataattaaggttaaatgaggacataagcgtgggctcttaatctattagtattggtggccttacaagaagaagaaaagaggccgggcacaagtggctcaagcctgtaatcctagcactttgggaggccgaggtgggcagatgacctgagctcaggatgttcgagaccagcctgggcaacatggtgaaaccctgtctctactaaaatacgaaaaaaaaaaaaaattagccgggcatggtggcgtgtgcctgtagtcccagctgctccggaggctgaggcaggagaattgcttgagcccaggaggtggcgttgcagtgagccgagatggtgccactgcactccagcctggcgacagagcaagagtccctctcaaaaaaaaaaaaagaagaagaagagacaaagagaggagagatctgttttctctttctgctatgtgaggacacagtgaggaggcagctctttgcatggcaggaaaatggggcccttgtgagcacctggccatcccggcaccctgcccttagatttctagccttctgttgcttaagccacccagtctgtggtattttgttacagcagcttggatagactaagacagactttttataatagaaacctttaagcaacaatttattttaaatcttatgtaaaagaaagccggagtaggcatagccttataggatcattaagaagccagcctccttctatctttctgcttcagggcttccatctcaagattacttcatggctcaagactgctgtcagagctccaactataagagcagcatcccaggtaacatgacagaggatgggaagaagggcaaaaggaatgaaccttcctggctgagtctgctctttttaagtaatcctcctggaaggccctcatgctctgctacccatcattggccaacatttgtctcatggctatgtctaattaagaaggagatgaggaaacttggaattttagctgagtgcattcctgccgccaataaaattagagtgttgtttccaataaggaacaggaacaagggtattatagacaaatagcaggctttgccccaggggccttttgcatatctcttcatattactattttttttttggaactacctttcttaaaagcaactggcaaacacaggtgattgtgctgggctcaataaataccaactgggttattgaattagaacggctgttaaatcattatcctgattgaagggtaggggaaaatgtgagctcttctttttgaagacttggtagtcagggccagaaaaaacattccccaccatgtcaacctggcttgcagaaagcccaactgttccaaaacctcagcatgggtcagaacttgatctttcctttgttgctgcttcaaatgacagttttccattattatattgtgtaagatagctactggtgccatagaaaagaagttggtgactcatgaaattacttcttagccagaaatatattaagctaaaataatgaggcaatgacattattttttcacctatatcccacggcatcacttgccagtgattgcttaaggaaacttggccttgacatggcataccagtctatattgaatattgcaaacttttagggtcactcaataagtgcaaaagccaaaccatatgtgttagatcactagaagttcggcttggttgatttatgctttgaagtgtcaatcattacagcaaaaaaaattattgagcatatactgtgtcataatgttgtatgccggcacactgacaaagaactaatatttggtttttgctttaaagaccttaccagttagtgagggaggtaaaaggtgaatggtagagttaaacaaggtagaatgtgaggaggacactaatggagaagcagtgggaagccgagcagaggggtggggactccaaggaaagctgtacaggagaggtaaagagttgaaccttgaaggctggggaagctttagccccagatccatggagacagaggttgagagaatggagggggatttgcccaaaaaggaacagcatgaagacgggcctggagagaaggtgtcctggggcggctcagaaactgctgagaaatcaagctgtgctctgcggatgtcaatatgggaaaaagggccctaaaagcaataagtttggggaaatgccagagattttgattaaatgttaacatattgagaactttttttaaaggcaaactgacatctatttaattgtgttaaataagcaaaccaatttacatgagcaggaaagaagttgttgtttttttttttttcttttcctggaactagtatttcctgaaagctttcctataatattagtttgagaaatactaatatgcttggcataatggttttaggatcattagaaatgttgcctaacaatcatagttatactgaaggtaataaaatagcaaaatttaatttttgctggaatacaaggagcataaatgtagtcttgagaaatcaatgctggaaaggcacattgggatcagattgtaaagaatcttgagtgccacgtgtattagtcaaggttctccagagaaacagaacaaatagtagatatctgtatatctatctatctatgagataaattataaggtattggctcacatgattagggaggctgggagtcccatgatctactgcctataaactggagacccaggaatgctggtggtgtagtttgcaggcctgagagccagagatttgatggtgtagattccagcctgggtctgagggcctgagagccaggggcaccaaaggcaggaggagatcgaatgttcctgctcaacagtcaggcggagagtaggtccagccttcctctgcctttttgttctattgagaccctcaaatgattcggtgatgcccacacccacactgggaaaagccatctgctttttcccagttcaccagttcagatgctaatctcttccagaaacaccctcatagacacctccagaaataatatttcatcagatatctgggcattttatggctcattcaaggtgacacatgaaattaaccatcacaccatgctaaaatgtttggattttatgttgtaggcagagagaatactactactgtcacactgtgaatacaatctgcatagatttgcctcaataatgtaatgttaaaaagatgaatacctggattagacttcatggggtttagagatcacaacacttcccgtcatcatgtttggagtcttcaaagaacaaagcttaagatttcgttataaactaaaatgaatgtttgattacttaagtagaaccagtttggacaatatacaagttaactgaattaattacagccatggttttgatgttcctttgaaattcagactgatcaaaatggaagtggtggtttaaatgaagccatccatgtgtgataagaggacaccttccaatgtagcaagggcacacttctgaatcaaatcatggttaggatattagtagatgtgtaagtgaggataattaatggtttcatgtacacacacacacacatgcacatatatacacgtatttcttgcctatgtcaattttattgcagttattctttgtcaggaggttcttccgggaagctcctccaggcggttactcaggaatccatctaccttgtgctccaccatgtttaacacattgtttcaagtttgctctggtgtcatcagctgacagatgagaagacagaagcatggagaagaatgaaagaagggagaagggacccggcttgttggcttaaggtactttctcacacagatcaattttataaaataatgcacctttgataattatagatttggaactcattatatttgtgcccacatatgcctagggaggtctttatgaggatgtagctcagtttgaagattgctaatgtatggatgataaaaatggccctagagtgtggatacctcatttcgctcatagctggccatgctctcctaaataagttactgcacctcaaggcacctggtctcctgtttcaaagaatttggagccactttggcggccacatgctgattcccaggtatccctctgggggtgaaattaattgtataatgtaggctgtacttgctactgactgtatccaccaaattatcttttccaagcaattagattctgcagccgtcccatctcaacatatcaaacagatttatgaaagtaatctttgacctttgcaacaaccagaaaggaacatagacgaagagaacagagctttaaggcatttctttcctttccttttttttatggcttgattagatatttggtttccacagcttgcaagactaattctgtgcttcaatgactctcttataaccttagtacgtagagatggaaaagttcccccaacattttcaggagacatttattacaggctattttatgtgtctggtcagaatgggctaactgatttttcacaagaacagaatttggcagaaagcctggcctctcttagtcctccttttgccaaaaatcactctgaagccagcttggaggcctcttgatgtcccctgtgaggccaggttgagaaacggcctgggcgagagtaaccctttcaactacagtcagaaaaaaatccatggagaggtagagaacccctctttacctgcatttgaggaaaatgcaaggggaagcttagtggctctatctccctgggaagacctgatgacaagtcacacatgcgagttgggtagggcagagagaagccaggacacattcatcctcctaactagcaaggacactgtaggaatatggctgcccccacttctccttcaaaccttcccaaataccatggttcacctggctcagcagcttcccagcccttgtgtcacctccttccccctccagtgtggttacttggtccccatctgaagatgtagcctcactctgcctctcagggcaaatactgacaagagacaggaggtccccaagtctcaggaaggttttaaacgggggtgtgccaggctcaggtttcagttttcgatttactgctctgactgcagctgtgtggaggatgttcaggttacactgtggtgataaagttgttattctgctggagaactccaatgggttttacatgtgtgtttcctgtatgatgtggtgaaccctgatggcctctatggcttgcggcaggagctgttgtctcgtcatcttttattggagatgagcaaaccaggctgagtttcttaaaatgaatatttttaagaggttcttcactaagccggcttggtagactctgagctctggtctcagatggtccaggctctgatctcccacacctctgcttacttggcgaaatttcttggcgaaattactgaacatctctcagcctgttctttatctgtaaactgggaaggatccttgtgtctatttacaggattattgtgatgattatgctcctggtctgtataaatattatactatctgttttcctttttgaactagtgctgaggatagagtggagagaactatggttagaggaagcagagaaaaggaacgtggatatagaggtggcgtggaggatttgatgtccctgagttggatcggcagagatgctgcagttttgactaagaacagctcctggtttgatttgtctcagttctcgctgaaacatcccaactgatggcccagaggttggcagtggtctaaaaacgttttcgtttggtctctagagttagttgatctgaatagtaatagctgctctgttgaggtgggtgtgtaagtcagtgttttccagagaagtagaaccaataagatatatgtgtgtgtatgtatatatacacacacacacatatatatatagattgatttattttaagaaattggctgacatgatcacatgattgtggaggtgcaagtgaaaatctacaaggtaggctgccagatcagggaagagttgctgtcagagtccaaaggccctctgctggcagagtttcttcttgcttggtggaggccagtctttgtttaactaactggacacagtccacttgcattatggacagcaatttgcttccctcaaagtccacttatttaaatgttcatcttgtccaagaaaataccatcacagaaatatctaggataatgtttgaccaagtgtctgtgcaccatggcccagacaaatggacacatacaaataactatcctagtgggtacccgtggcagttggctgcaacctggattgcctaacacctgacccatgccattcatttacttatattcctgactctgatagatgtttgagtttgtggtctttactctagcttccttattcatgattatgtatcagattgcatcatcagacactacatgatgcaatttgacttgctggtcttgcgtcccccatctatcattatgaactggctaaaggaccactgtgtggcatgttggggggtctttgactctggtggatgtgctgaaacttatatgagcttaggtgtgaggcatgttgggattgcaacagcatggccctggatggagagaaagctaaagatagcaggctgggaaaactaattggcaggagcaaatgccccatggagcggcctaggggcctgacccctagtgtccaaaggatgtgacatgttcctgtgtgtttgggcgggtttgtgtttgggcagtgaggtccaatccaaaagtgaggcctcccttgagtgggagggtccaggaggctggcaatactctcaggcttggggcaactggtttcttcacaacaggctctgagccaggaggaaggcagtgtgaactaccttggttataggtttctcattcaaaaagctcaggttcagggaagtgttaagctctagcaggaaatggagctaggacccaggtgtagggaatggccaaggcatatgacagaggctagagtgaaggcttctgtggtttagaggccacatggtgagccctagttgatcctggtgtcgtggaatccagaccacaggcagcaggattcaccttagacgttgcctgctgctgctgctgaggctgctgccctgacttaaactgacaaggggatggggttgaggcggattgagagtggtgtggacatcactgtggactgcatagggccctcatccctgtgtgagtggcactgatggggcagtggtggatttccccatgagatggcgctcagagtttatctttctgtgtgcttttttttcttgctttgattaaaaataatgcatactctgcattgtactgttttagaattcatagaaatatgacttgtctttcctaatctcaaaagcagatttcatgtactttcatgattcccaggggattatatttctgatagttatttgtttttccttctgggatgtggtgacagaaggaggcagggcataggttataatctcttaccctgacacccttggatcctaccctctccctgagaagctcacagtcgttataagtaaagatccatctgttcttctgatacaagaggcgatgaaatgtgctatgctagagataaaaacaagatgccattattggacgagagagaaaaagactaattctgtgtggcatctccttgaggaaagattgggacattaataggccatagatgcagcttaatatttaaggtgaaacatactgtttctgaagactgggaagtagggacaccacaaacaactcaggtctccctgtgacaaagttgtccagggaaaatcttttcctaagagtcctttgagacagagaccttgtttgtgagtctgaaattaaagaaaagaagaagagacaaaatttaggaagtacccccaacttctggagacaagagggaccaggtaaatactagagcagggtcttggtaattaggaggtaatatgctcttttgaagttacttcaggcaagagctgacaagaggtagtaaaaatgcacagcctgggaatcaacaaataactaatagtacctttatattatactttatggtttagaaagcgggatcacaatgtaggaattttttgatatttctgtttaacaaatgaggaagcagaggcttagagaagttaagtgaattacttaaggtcatgtaaatagtaagtggctaaatccttttgaaggaacggatttggaccagtctgtttttatagccactgtgaaacttcaatgtttccctcttcaataaacatttattgagcacctattatgtgtacatactaggtatctgatggtttctgatacagttccttctatctgggagctcacagtctcatgaatggttctcaactgaggtgatgtttcccccaccaggggacatttggcagtgtttggagacatttttgttgtcatgactggggagtgggtgtcactgacatctagggggtagaggccaggaatgctgctaaatatcttacaaagttcaggacagcgcccacaacagggagcaatccagctgtcctagtcagtttgggctgctgtcatagaataccatagacaagtggctcaaacaacaatatttatttctcatggtctggaggctgggaagtgagggtgctggcaggtttcgtgtctagaaagggctacttcatggcttgtagacagctgccttccccttgtgtccacgggggagactaatctcattcatgatcatctcatctaaacctaattacctctaaaaaccccacctccaaataccatcccattaggggttagagtttcaactcattaattttggggacacaaacctgcagtgtgtaaccctcacccagactgtcaacagtatggcaattgagaaaatctggcctagctcatcattcattcatgtattgtatcatttttaaaataatatttctgaattattagacgtactaatgtacctacaaggggccaggcacagttggaagcacagaggatatggttccgaacaagacagagaaagcccctgctctcctgtcacttccattctaggtgtggggtggagggcagaggagaggcagagttggacattaacaggtaaacaaattagtaacaaggaaattgtcaggaggcgatgactgctatgcagaaatttcaggtgtgttggcacaattacgtgtaaccgggtggtggctttaggtttgctggtcacagaaggcctttctgaaggggtgataattaagattacatttgaatggcaagaaactgtgcaaggaaagggcatgttgtgctgagggaacagcaagtgcaaaggccctcatgtgggaaagaggttggcatgttctttcaagggacagaaggcaggtcaagatgttcggaaggtagcagcagagggggagagtgtgatggagctgatactggggagggtagcagggactccgtctgattagggctttgttggctaagataaggagtttgggttttcttctaaagccttacatgtagcttttctcagggtgaaaaatggtgagggttatgaagaaaacaaaatagggttttggggacaaagtgtgtgagagggtgtaacattgaatttgatggcgagagagagagtccctctgagacttggatgttgagatccagacagttgtgggatggcctggggaaacctacgagcttcctagggttatgggccaagttgtgtccccaccaccattcatatgttgaagccctaacccccccaccaccccaaccacagaatatgactgtatttggaaataggccctttaaagaggtaattaaagtaaactgaggccatgagggtaggacttaacctagtaggactgatgtcctttcaagaagaggaaacttggacacaaaaaagggacctcagggatgcctgagcatgggggaaaggccatgtgaggccacggggaaaggcggcagaaggaaccaagactgttgaaaacttgggcttttaccttcctgaactgtgagaaaataaatttctgttaagccccccacctgtggtattttgtgccagtgtcctgagctgactagcaaatctgaggttcagttttcttatctgttgaataagaagcagctgtgaatctttaagtttaggttgtttccagttttaagagttgttgactctaagaaatacatgggcttagtgttggggctacctgcaccccataagccttagctacgtgtcccttaatcagagaataaggacagagcagtcctgacgggaaacagaagagcccttgggaggaacttggaatttgatataaattttccatcaatttcaaagaagagggctcaggctgggagaatagcccagtcattctgctcccacataagagggatttaaaactccagatgggactctgcgagatcacaatggcgtgcatgtctccactggggacaggcagaatttgtgccagagtttccagagagaagatggaacgtcaagaatttttccttggaaagagttcactagagcccgaggggccccatggggaaatttcagtccccttggtgctggctggatgcaccattccaggcgtaggggaatccctgcattccatgtgaaaggagcctcattggctcatcacgtcctttgtggctcttgtctctgagagggaaggtcggaggatgcgactggctccagggctcaggaacgaggtggtcaaagctctgcaaaattcacaggtgcccaacttgatggaagagaatctgacctaggaaatggc

SEQ ID NO: 2634 - DNA, 5712 bp, Homo sapiens
cccagaccttcattgctggtatgggcattgctagtcctgcctcaactagattgttgaatttaatcacagggcatgagaatactaacatatgtccattccaaacatacatccccctatgccctttatgtggcagcaactcaattttgtcatgacaggcaggagtgattccctcagtgtattcagcaaaccccttttcggcctattgattcacaggcacaagggatcccaaaatggccagatggaagtttccaattccagttcaatgaaatcattgttgtgctattagaaattctcccttcagaacgaagaccactagcccagtagaacccaaaattgaggggacaggaagcacaatgttgccaatggatcactagagacccaggtaattttagagtcactctggagggaagattcgtatcttgaaaaattcttccaggtgatttggacatacctttctgcctcccagccacccccccccgccatggctcatagccacgtctccgggattcctcagctctatttctggatttggtcagaaaacagcctgctctgctggattagctcatctctccatggaaatgccaccctggagttatgagagcacggcctctttctaaggctttctggtgcaatgcaaccctcctcgatggccacagctgattgactggagtgaacctgtgacctgaactgggccagtcagatttttcatactggaaatttggcgtcggagccctgagaaacaagtcaggtggtctcgggggctgaagctacccctgtggggtgactagtggaactcctggtagtgagaaaaagtgagatgagactgatgatcttcagaaggaaaagtttggactaaacacccagaggaaagctgaaatgagagaccacatggaatgaaggagaacaaagccaatcactgagacaagtattgccagggaagaaggcttttttgggtgctacagctgaggagctgggaggtcaaaacagtgtgggaaaagaaatttaaaaaaatgttattaaagaagctactgtcaacctaaaggaagaaactgaggcaaaattaatgtaagtaaagagtttatttgggccaagatgaggacagctgctcagaagattcaggcccaagtgatcttggataggagctctgtttggcctttgttaccagcaggtttttaaaggcaaaagcaaggggatacgtagggggatgatacaaagttgcttgtcaggaattctctttggtttacagaaatgtcattcattagttattgcctatacattgttgacatatagattatgacctaatgatatctatcatgtggtgtcattaggttaattttgagctacttgtgagaaaaggcctagagtccacatagcaagcaaattcaagagatgattatttagctcaggaggggaagtgggatgtgactgtagcctcattctcatgcctcactgggcctgataatttaaaggaggttcacattcctcagatagaaagtttcttttctttctcgctataagcctctgtctttcttgtctctctattgctaagtggtttggcataaaatcatgtgctctggtagaaacctaagggctttttattcagctgttgaaattcatacccactggagattctagagccatcagtggccatggttcctgccactggaggaaactgtctttagagagtgaaggtgaagctgacatttataaacagccacggtgagaggcagggctggaaagcaggcctggctctgttccagttcctgtgtccattttggagacgagtttccgtttcctatggtttgattacgtgatcccatgaatctccatctcctgcttaagctgttttgagtgtcttgtccatacatgaagtgtcagggtgtcctaagaagacagtggaaagtgatggggtccagcatctgggatgttgggcatcttagtactgggggagtgtgtcagtctatagcaaaatcttcacttctgggctgggcttcaggatggaactcaagtcttttggagggaggaggagttcctagaggaactggggtcgcaaatgagttccaagtcaaggactcaagaccatgagtcaaatatagatgcctgagtgctgtcctcagcaagcagtcaagggtgttggacccagacgcccagatggagtccagggtaggcatcacttacaggtcgtctttgatgcatagaaataaaaaaggcaatctaaagggcagaatttgggttgaagccccataataaaaatcaagcagcttgttctaagtagcagttgtcatttggaagaggctaggcagaaagggtgacatggtaacatttacagatagaaagaaggataagcagatgagagaggaaaacttcaaagaaaaatgaaggaggtagaatctgaaaaaaaaaagtcctggactgaagagaacatggtgttgctgcttttgtaagttatctgtgggctaggttgtggatatagagaaagctgctaaaggtgatagttcactgaagatggcaaaagcaccatgagcagaactgggacacaggatcagggccagatgagactacaagatgacaaattttgggggtcaggaggggaagtgagatgtgactatggcctcattggtagacttttccattcatggcccccaagggaccgtgtctctcagtattcatgctcttgtgcattgtctcccatattggactctgggcttggcaaggtgacttgctttggccaataatatgaacaaattaaatagggataaattagaggcctgataggcatttgcatattggacctatgctctttgaattctgagattgccagaggatggattgactagctgtcattaccttactacaagcctatggatgaagccagcacaggaggtaatggaaggaattgcagagctacgaagctgtgactgtaatgcagcatgcctagtccccttcctacctctagtcttcttgttatatgaactgataacttatagtttaaacttctcagtaagttcactttcttgcaactgaaagtgtcctaatgacacagtgtattagtccattttcatactactctaaagaacttcctgagcctgggtaatttataaatgaaagaggtttaattgactcacagcttagcatggctggggaggcctcaggaaacttacaattatggtggaaagcaaagaggaagcaagagaccttcttcataggcagcaggaaggagaagtgctgagcgaagcagggaagagccccttataaaaccatcagaccttgtgagaactcactcactatcacaagaacagcgtgagggaaactgccctctgattcaattacctccacctggtctctcccttgacatgtggggattatggggattacaaatcaagatgagatttgggtggggacacaaagcctaaccacatcacacagccttttgtttttaattttttgaggcaaattcccataatgacatggttttttttttgaagctgggaattctataagtaaaaatatttgcaaggcacttaacagcttcgatggggaaactctatccctgtgtccatgctttctacttacctgatcccctaagtaccattttctgaaatgctgtccactgggatgcagcaaggagtccagttggtgattttagagcatcacagccatgaagagttactgagttgtgcgtactcatctgaaactaagacagcctttttggttccagttgtcagcttgtgatctatttatctttgctcccagggggctatataaaggataccagaaacaggtacttctcatgtcccttctagctcaatgagtaatagacttgatggtttttccctctgatgtctgaaactttaaaaagacaataaaaacacacagatcaatatactgaataagtatatcttccaaacctcatactctgtttctcattataaacatataaattagcctcatgcaaagaaaagaagcatagcttgtaacatcttttctatctgacatgtgctgctgcctagaagactccttaacatgctccctttattacatctcccatcatattctccacttgagtatccagcaactggaatacagtgttatagaaatgagtagttatatatctgtaattatttccagcttcaaccgtgtctataataagccaatgtacttaggtcactaagctctaaataggccagagggtatggaagacatatctatccccaccactggaagaaagctcaaagcttgtccttgttgctcacgctgtgatgttttcccaaagggagggcagcagggctgttatttggggacagctgagacctgcgaatgcataagagcagaaatgatcaatggagcatccccattgtccatcacagggaaaacccagagagggaaaatagggcatattttccctcactgccctgaatgcaatacaaatctcatcactccatctccctttttagcctgtgctggagcaaatagttttagaacatgcacaatttgaagcaaccccattaagtcaggatggcaaatgctataatttatccatgctccctccttggagaagttgaacaaatattgcagatgagctttataggtaaagactgtagcagagccttattaactaggtttagaacagtaggttgaagccctttctcagacaagaaccacagactctgtttcctcttgatgtgatagatctgttaggggtgcttgtgtctgcactaagattacagctctaggcagggtagttcttgagacacttagaccacagctctgctctttgaggaatgaggcaattcaagtgttaaatgggctccatgttttaatctttagcacttgaacttattctatttctgtccccttctttgcaatgttaggctcagctgtctgtggtgacaggacttcttctgcagccaaccagcatacagctggtcactacagccctaggtgctgccaaaggctgagaggaatgggaaatgctagtactttccttcgtgcaagagtgggagatggtgcaagggcatttctgtctagttcaagtaagcatatattgagttctccctactggctaggccattagagacatagaaatgaataaagcatggcccctgcctcaaaagctttcattgtctacagtaaggtttggcaaactatacctgtgagggtgaagatgctgcctgttgtaaataaagttttatttaaacacaaccatgcacactcatttacatatcgtctatggctgcttttgtttctacaatggcagagtaggtctaacaagatcatatgggcccaacagcctaaaatatctactaactgatccttcacagaaaatgtttgctcacctctgcacaacttagtaatttttggtatatttacagaattatgcagccactaccactaccaaatttcagcattttcatcaccccaggcgacatctcatatccattagcagtcagccccagcccttgataaccactaatctattctctatctttatgaatttgtctattcctgacattgcataaaagtgtagtaaggcaaaatgtggccttttgtgactggcttctttcacttgcaatactgttttaaaggttcattaatgttttagcatgcatcagtgcttcatttctttttattgcctaatagcagtccattatatgtatataccatatttggtttatcttttcctcagttgatgaatgtttcggttatttccac

SEQ ID NO: 2635 - DNA, 31618 bp, Homo sapiens
tatatatgtattttttttttttgagatggagtctcactctgttgcccaggctggagtgccttggtgtgatctcagctcactgcaacctccacttcccaggttcaagagattctgcagcttcagcctcctgagtagctgggactacaggcgcatgccactgcatccagctagtttttgaatttttagtagagatggggtttcaccacgttggacaggttggactagaactcctgacctcaggtgatccacccgccttggcctcccaaagcactgggattacaggcatgagccacggcgcctgaccagaacagataattttcaaaacaagacatacaagtgaccaaaaaacatgaaagaaatgctaaccaggttgttaaccaggatgcaaagaaaactgaatgcttatacactgttgttgggaatgtatatcataacaacctttatggaaaacagtatgaagctttctcaaagaactaaaaatagaactgccattagattcagcagtctcaccactgggtatatacccaaaggaaaatctatatataccatggaatactattcagccatagaaaaggatgaaatcatgtcttttgtagcaacatggatgggactgaaggctattatcctcagtgaaataactcagaaagtcaaatacagcaagttctcacttattgttgggagctaaacaatggatacacatggacatacagtgtggcataatagaccctaaagactataaaaggtgggagggtcaaagttgggagagtgttgaaaaactacttactggttacaatgttcactattcagacaatgggtacactaaaagcctagacttgccctatacacaatatatacatgtaggaaacttgtaactgtaccccctaaatatatacaaattaattaattacaaaaaatattatgttgtagtgttaactggtatatcttgtcttgggaaaatatggcagctcctatgaaacatctcggaaaatttgtaactgatgttacaaaacacccagaagaaataagtggtctggtgagaaaacttactcatctttgcctacatatgtatacatgagtaatttgattacacatttgtgcgggataatataactgaaaagaaaatgtaaaatttaacttaaattgtatttgtaagttgtaatttcattaattctgcattattgaagtacatgtaggaaaggtgcagaaatgcatcaggcagttaatacaaatacgttttttttttttttttttttttttttgagatggagtctcgctctgtcacccaggctggagtgcagtggcgtgatcttggttcactgcaagctccgcctcccaggttcacaccatcctcctgcctcagcctcccgagtagctgggactacaggcgcctgccacctcgcctggctactttttgtatatttagtagagacggggttcaccgtgttagccaggatggtctcaatctctatacctcgtgatccgcccacctcggcctcccaaagtgctgggattacaggcatgagccactgcgcccagccaatacaaatatgttttgctcaattttgtaatgtttatgctaccatcagttttttgaaatatgtaacttttactttttttcttagagtcctccaaattatgtttcaggctccttaaaaactttttatctatccctgataaatattcctcaataataattttaaaaatccatttggttaaatgaacatgaactctaagtcttttaaccagaaataagctattaggttgatgcaaaatatttgcattttttgccattgaaagtagtggcaacaaagaaataaaattgtatttttggaatagttttctcttaagctcttgataataaacctgtaagtattaactgccttacaaatggcaaaagaggccacttgaaggaaaggaaattccttaacaggactttccttagcaggaaagttagttgcctgggtcatcatttggataagaaaaaaatccattaaaaaatggcagtattattagtatcatatgcataattacatatataaaacttgccatatattgtgtgaaatatagttctttagtataggaaaaatatattgatatctataaaggtaaaattattttaactctttcacatacatgttatttgataaaatttgctttcgtgttttttctttgtcaggtttcattgatactcaaaattcatttcctttgacatagctcaggagatttgttagtaaaaatctcacccaaattcataagaattttccaataaaatatttcagaaatgaaacattttgaaagaattggtcaattatcactttctgctagatagagcatgatagtttggtgtatattttaatatatcagtgatatagtttggatattactccccacccaaatctcgtgttgaactgtaatccccagtgttagatgtgaggcctggtgggaggtgtttgggtgacaggggcaaatcccttatgtcttggtgctgtcctctagatagcgagtgagttctcttgaggtctggttgttgtaaagtgtggcacctccactcccaactctctctcttgctcctgctttcgtcatattaagtgcccactcctgctccaccacctgccatgatgataaggttcctgaggcctccccagaagcaaatgccattgccaagcttcctgtacagcctgcagaactgtgagctaattaaacctctttacttataaattacccagtgttgggtatttctttatagcaatgcaagaaaggcctaatacagaaaattggtactaggagtgaggcatggctattaagatatctgaaaatgtgaaagcaaattaggaactgggtaacaagcagcagtccaaagagtttgaatggctcagaagacaggaagatgaaggaaagtttggaacctcttagagactggttaagtggttgttaccaaaatgctgattgtgatatgaactttgaagttcaggctgctgaggtctcagatagaaatcagaaatgtattgggatcaaagattatgcatattatttcttagtaaacagcttggctgcattgtgtttatgccctagagatctgtggaagtttgaagttgagaatgatgacctagagtatctggtggaagaaatttctaagcagcaaagtgttcaagatgtggcctggatgcttctaacaacctatgctcagatgtaggcacaaaggaatgacttacatttggaacttacatttaaacaggaagcagagcctaaaagttcagaaaatttgcaggctgatcatgtggcaaataaataaaaaccttttacaagagagaaactcaagcaggctgttgagcaaccatttgctagagatatctgcataactgaaaaggagccaaatgctaatagccaagacaatgggaaaaaggtttcagtgacatttcagagaacttcctggcagcccttcttaccacaggccctgaagcctaggaggactgaatggttttgtaggccaggcccagtaccttgctagcctgcacagccttgagacacggctccccaaattctggtcactctggccccagcctcagctcaaaggggcactggtaaaacttgggccatcacttcagaggacacgagctataatcattggcagattccacatggtgttaagcatgtgggtgcacagagtgcaagagttaagaaggcttggtagcctctgcctagacttcagaggatgtatagaaaaggctggtgttcaggcagaaggctgctgcaggagtggagccctcacagagaacttctagtagagcagtggggaggggaaatgtgggtttggaagcccacagagtccccagtggggtattgcctaatgaagctgtgagaagggggccaccatcatccagaaccaagaatggtagatccattggcagcttgcactctatgcctggaaaagctgcaggcactcagctgtagcacttgagaggagccatggggctacatcctgcaaattcacaggggaagagctgcccaaagccttgggagcccaccccttgcattaacgtgccatggatgtgaggcatggagtcaaaagagattatttcagagctttaagatttaatgactgtcctgctagttttcggacctgtgtgagctctagtccctttctttgcctgacttctttctcttgtaatgggaatgtttacccaatgctggcaccctcattgtatcttggaagtaaatgacttgttttgattttacaggctcacaggtggaaggaactcattttcagatgggactttggacttgggacttttgattgagttgttgcagaaatgagttaagattttggggaattgctgagaaggcatgattgtattttgccatgtgaaaagaataggtaatttgggggaagacaagggtagaatgatatagtttaggtatttgtccacactgaaatttcatgttgaattgtaatccccaatgttggaagtgtggcctggtgggaggtgtttaggtcatgggggttgatccctcatgtcttggtgctgtcctctcaataatgaatgagttctctcaagatttggttgttgtaaagtgtggtacctccacccccaactctttctcttgctcctacattcaccatgtcaagtacctgttcccactttgccttccaccatgattgtgaagttcctgaggcctctcggaaagcagatgccagcactatgcttcctgtacagcctgcaaaactgtgagccaattaaacctcttttcttataaagtacccagtctcaggtatttctttatagcaatgcaagaacagcctaatacaatcagtaaatatgtcagattctacaatgaggctactataatgtgaagatatttttcttaatcatttacatttacaaatagactaaaattcttgttttatgttattgtcttagttcattttgtgctgctataacggaatactacagactggtaattaataaacaacagaagtttatttggctcatgtctctggagattgggaagtctaagactgaggggcctcatctagtgaaggtcttgctatgtcataacataacatggtggaagtcatcacatggtgaaagcatgtgtaaaagaggaagacaggagaactcatactcttatcaggatcccactcccacaatatctagccctctcccaggataacagcactgattatcttagaagggtctcaactctcaggactgttgcattggggattacatttcaaacacgtggatcttgggagacacatttaaaccacaacagtgatgttttgaataataaatatacatctacaaatgtgtttcttccacctggcaatgccttcttctgatagttttattctgcaaatttcaattattcaaataaaatttcctcattggccctctttaacactttttcctctgaaatcttatattacttgttgctttacaaatactctttaaaaattattccacactggtatctaaattcttccttttttcccagtcttatcttcccaattggcttttaatttccatcaggaaaggatccatgtgttttgacttcttggtactgctcacagtaatacgtaaataattaagatttaatataattgggtttaatttaatttcatgtagattccaattgatttttccaattagatgtgtgagatttttattcattaaaatacgcaattatactagcatccatttttacttgtccaaagaatgagctaagatttaagttatattttgcgatcttgagatacatttcatatgctcttcgttgaatcacttttctattcatcttcaaattccagctataaaatatgatatgcaattgtcttagctcagattgatcacaaatccttgttctacaagataccatgtattcatatattcataaaaatatcaacagaaataatatattaataaatatttaagtatgtaatttcagaaagagatggtaatgtatcaggacagattttagttaggagacacaatatgcttatccgagcacaaagttggtttttatcaattgatgttagtttttgattatatactatatgtaagttctctatttataattataattttctcattaataataataataaatcatacctatattgtaccttgaaattatcaaagcccctttcatttccacctcattttctctctttctctttttctctttctttttccctgttcttttagtctctgtctctccttcagaaaaaatatcagttacttagcaggacatatattattgtttccatgttacaggttggaaatgaaatttcaaaggaataagttattttttatggtcttatagctaataattattaataattgatatatgtaggattgggatcccaaggtttaactcctaatcatgtgacttcagacaaaaaaacgtagaaataacagtttttctggattgttacatggggtcttaggcaatttgagtcattataacaaagtaccataaactgggtagttttaaacaacagagatttattttgcagagttctagaggctacaagtctgacatcagggtgccagcatggttaggtcccagtgagggtcctcttttgagtagattgctgccattttattgtctcatcacagggtgaaaaacaatgtgagctagctctttggcctatttttataagggctctaatcccattcatgagggttccaccctcataatgtaactacttcccaaaagccctatctccaaataccaggatactggggattcgattttaacatatgaattttgggggaaaatgaacattcactttataacacatagagagtgaggtagtctggataaatgatctagcgtgttcactcataaatgttattttcatgctccttttctaagccttttctattataacagcaatgcagtttgtaactttaagaattattccatgtagaatgtaaattgatatagccattatagaaagcagtgtgaagggttgggcatggttgctcatacctctaatcccagcactttgggaggcctaggtgggaggattgcttgagcccaggtgtttgagaccagcttgagaaacacagaagggcctggtcactacaaataataaaggaaaattagccaggcatggagatacatgcctgtggtcccagctagtcaggaggctgaggtgataaaggctgcagtgagttgtgatcgtcaccactgcactctagcttgggcgacagagtgagaccctgtctcaaaaaaaaaatcaccaaaaccaaccaaccaaacaaaaaaacacacaacaacaaaaacagtgtaaagtttcctcaaaaaataaaaaatacaactaccatatgatccagaaattccactactatttacccaaaggaaatgaaatcagtactttgaagagatatctacattcctatgtttattgcagcagcattcacaacacacaagatatggaatcaacccaagtgtccaccagtgaatgaatggataaagaaaacatatataggcaatggagtacaattcagctgtaaaaaataatgaaaccctgtcattttcagcaacatgaaggaaactagaggacatgttaagtgaaataagccaggcacagaaagacaaatagcacataatctcactcattgcggaatctaaaaaaaatatacatcaatagaaatagagagtaatatagtgatttccagaggttggggagggttgggaaagagggaatggggacagattgatcaatgggtacaaaattacagttacgtgggaagaatacattttggtgttctatagcacagtagggtgaatatagtaaacaatgttatggtgtatatttcaactacaagagaggattctaaatgtctcatcacaaagaaatgataaatgtttgaggtgatgaatatgctaaataccatgctttgatcattatacaatgtatacatgtgttgaaacatcacaccgtactccataatatgtataattactatgtgtgaattataaacaaaatatcattccatgtaatgtgaggaaattgtttctctttgaaaaaaatgtagctatcaacaatactggtaaaagcagatgaagaagcaaaatatcaaaaacccataatcctgcaagagccttaacaagattaaatatttgattatttctaggacacaggaccttttaaaacatttcctgttgttctttggatggtccactgtgggtagtttgaaacagtctacgagacttctctctgtatcaaaggaagcaatgagatcagagtaaaaatatcagagaaagattttttaaaatgaattaaggaaggtaaatccaagcagagtttttataacattcacaaaagcatgtagctttgtgttaaatcgtgtttttaaaaaatattctcttcttgcttcgtatctttgagtcagaaagctggatgtgtgtctaaacaaactaggcaatgctaataccaagaatcccggaaaatgtgctaaattcactattctatgtaagtttgctcagatggtggagaaagtgcattaaccagtactgcaaactgaatcttttgtgtgtgtgtgtgtgtgtgtgtgtgtgtgtgagagagagagagagagagagagagagagagacagagagagagaaacagacagagaaagagagagagagaagatatttgaaaaaaatacaagaaataaagaaagaaatattcaaggaaatagatagcatgaatgaaaagcaatctaaacttcaggtagcaatgaacacacttacagaatgcaaaaggctctggaaagtctcagcaatagaattgaacaagtagaagaaagaatctgagctcaaagacaaggtctttgaattaacccaattcaaccaagacaaagaaaaaagaataagaaaatacaaacacagcctccaagaagtctggaattatgttaaatgaccaaacataacaataatcagtgttcctgagaaaaaagatgaatctaaaagtttggaaaacatatttgggggaatcattgaggaaaatttccccatcttttctagaggcctaaacatcctaacacaagaagcacaaagaatacctgggaaattcatcacaaaaagatcatcacctaggcacattgtcatcaagttatctaaagttaagatgaaggaaagagtctaagagctgtgagacaaaagcaccaggtaactgtaaggaaaacctatcagtttaacagcagatttctcagcagaaaccctacaagttagaagcgataggaaccctatcttcagcctcctcaaacacgacaattatcagccaagaattttgtatccagttaaactaagcttcatatatgaaggaaagatatggtgtttttcagaaaaacaaatgctgagagaattggcactaccaagccaccactacaagaactgttaaaaggagctccaaatcttgaaacaaatcctggaaacacatcaaaacagaacctctttacagcataaatctcgcatgacctataaaacaaaaatacaatttaaaaaacataaacaaaaatttaaaaaccaaggtatacagacaacaaatagcacgatgaatggaatggcacctcacatctcagtactaacgttgcctataagtggcctaaatggtccacttaaaaggtacagaactgcagaatggataagaattcaccagccatctactgccttcaaaagactcacctaacacataaggacccatgcaaatttaaggtaaaggggcgaggaggggaagacatttcatgtaaacagacaccaaaagtaagcaggagtagctattcttatatcagacaaaacaaactttaaagcaacaatagttaaaaaagacaaagagggacattatataatggtaaaaggccttgtacaacaggaaaatatcacaatcctaaacatatgtgcacctaacactggagcttccaaatttataaaacaattactaatagacctaagaaatgagatagacagcaacacaataataatgggggacttcaatactcccctgatagcactaggcagttcatcaagataaaaagtcaacaaagaaacaatggatttaaactgtaccttggaacaaacggacttaatgtatatgaaacattccatccaacaaccacagaacatatattctgttaaacagcacatggaactttctctaggatagaccatatgataggccacaaaacaaacctcaataaatttaaaaaaattgaaattataccaagcactctctcagaccacagtggaataaaactgaaaatcaactcaaaaaggaaccttcaaaaccatgcaaacacatggaaattaaataacctgctcccaaatgataattgggtcaaaagtgaaatcaagatgaaaattaaatattattctaactgaatgacaatagtgacacaacctatcaaaacctctcagacacaggagaggtggtgcgaagaggaaagttcacagccctaaatgcctacatcaaaaagtctggaagaacacagacaatctaaggtcacaactcaaacaactagagaaacaagaacaaaccaaacccaaaaccagcagtagaaaagtattaaccaagattaaagcaaaactaaataaaattgaaaccaaaaaaagtacaaaagataaatgaaacaaaaatctgtttctttgaaaagataaataaaatggatagtccattagcaagattaaccaagaaaagaataaataaaatccaatcgagctcaataagaaatgaaacgagaccactgaaattacaactgacaccactgaaatacaaaataccattcaaggctactacgaacacctttatgtgcataaactagaaaacctagaagagatggataaattcctggaaagttacaaccctcctagcttaaatgaggaagaattagataccctgaacatactaataacaagcagcaagatagaaatggtaattgaaaatattaccaacaaaaaaaatccagggccagtttgattcgcagcagaattctaccagatattcaaagaagaattggtaccaattctactgacactattccacaagatagagaaaaaggcaactctccataagttattctgtgaagccagtatcaccctagtacaaaaatcagaaaaggacataatcaaaaaagaaaactatggactgatatctctgatgaacatagatgctaaaatccttaacaaaatactatctaatcaaatccaacaacatatcaaaatgataatctaacatgatcaagtgcgttttataccagggatgcagggatggtttaacatatgcaagttagtaaatgtgatacaccacataaacagaattaaaaacaaaaatcacttgatcatctcaatagatgcagaaaaagcattttacaaaatccagcatctctttatgatgaaagctctcagcaaaattggcatacaagtgacatatctcagaataataaaagccctctatgacaaacccacagccaacataatactgaatggggaaaagattgaagcattccctctgagaattggaacaagacaaggatgcccactctcaccactcctcttcaacatattactagaagtcctagctagagcgcagacaagagaaagaaataaagggcatccaaactggcaaagaggaagtcaaactgtcgctatttgctgatgatatgattgtttacctagaaaaccctaaggactcctccagaaaacccctagaactgataaaaaaaattcagcaaagtttctggatacaagattaatgcacacaaatcagcagctcatcaatacaccaacagtgaccaagctgagaatcaaatcaagaactcaagaaatctccacactgttcaaatcaagaaatcaagagccccttttacaatagctgcaaaaaatacaacaacaacaacaacaacaacaaacttaggaatacacctaacaaaggaagtaaaagtcctctacaaggaaaactacaaaacactgctgaaataaaccatagatgatacaaacaaatggaaacgcattccatgctcatagataagtaaaatcaatattgtgaaaatgaccctactgccaaaagcaatctagaaatccaacacaattcccatccaaatacaaccatcatttttcatggaattagaaaaaaatctaaaattcacaaggaaccaaaaaagagctctcatagccaaagcatggctaagcaaaaagaacaaatctggaggcatcacattacctgatttcaaactatactgtaaggccatgatcaccgaaacagcatggtactggtataaaactaggcacatagaccaatggaacagaatggagaacctagaaataaagccaaatacttacagccaactgatcttcaacagagcaaacaaaaacataaaatggggaaaggatacccttttcaacaaatggtgctgggataattggctagccacatgtaggagaatgaaactcgatcctcatctctcaccttatacaaaaatcaactcaggatgggttaaggacttaaatctaagacctgaaactataaaaattatagaagataacattggaaaaatccttctagacgttgacttaggcaaggatttcatgaccaagaatcccaaagcaaatgcagtaaaaacaaagataaattgctgggacttaattaaactaaagagcttttgcacagcaaaagaaacagtcagcagtgcaaacagacaacccacagagtgagaaaaaattttcacaatctgtacatctgacagacgactaatatccagaatctacagtgaactcaaacaaatccataagaataaaaaaacaaacaatctcatcaagaagtgggctaaggacatgaatggaaaattctcaaaagaagatatacaaatggccagaaaacatattaaaaaatgctcaacatcactagtgatcagggaaatgcgaatcaaaacaacaatgcgataccacctcactcctgcaagaatggccataatcaaaaaatagtagatgttggcatggatgtggtgatgtgggaacacttgtacactgctggtaggaatgtaaactatacaaccactatggaaaacaatgtggagattccttaaagaactaaaagtagaaccaccatttgatccagcaatccccctactgggtatctacccagaggaaaagaagtcattatatgaaaaagatacttgcatatggatgtttatagcagcacaattcgcaattgcaaaacctgacaccagcccaaatgcccatcgatcaaccagtggataaagaaactgtgagacatataaatacacacacacacacacacacacacacacacacacacacaatggaatactactcagccataaaaaggactgaattaatggcattcacagcaacctgcaagagattggagactattattctaagtgaagtaactcaggaacagaaaaccaaacactgtatgttctcactgatatgtgggagctaagctaagaggatgcaaatgcacaagaaggacacaatggactttggggactcagggggaaaggtggaagggggtgagggataaaagactacaaacatggtgtagtgtatactgcccgggtgatggatgcaccaaagtctcacaaatcaccactaaagaacttactcatgtaaccaaacactacctgtcccccaacaacctatagaaaaagaatttttttagttaaattaaattaaacagaaaaaatttaaaaaataaaaacagaagccacaggccaagtgcagtggttcacgcctgtaatcccagtactttgggaggccaaggcaggtgtatcacttgaggtcagaagttcaaaaccagcctggccaacatgacgaaactcccatctccaccaaaaatacaaaaattagctgggcgtggttgtgcatacctgtaatcccagctacttgggaggctgaggtacgagaattgcttgaacctggtgggggcagaggttacagtaagccgagttcacgtcactgcactccagcctgggtgacagagtgagagtctgtctcaatgaataaataaataaataagccacagagagacacacaggaagaaaggccatgtgaagatatagaaagattgaaattctgcatctatgagcaaagaaacattaaaattactggcagacaccaaaagtacataagagatgtagaataaattctccctcagagcctccacaaggaagcaacacttccaacaccttgattttggacttctgcactccagaaatgttagataatacatatctcctagtttacatcacttaatttgtgctaatttattatggcagccttgggaaactaatacagactcatgatgcctccatggcagccatccaaatgtttgctctgttggcttgcatgtgtgagttcttaagagaatcctagagagtttctctactgcatttcccaggtctggaaggtcacccttaaacttaactttcccttcctcttcattcctgtaacttggagtatatccaaagctcatgcggatgtcatcctcttgtcttgaggtaaattttaatatatggtgtgcagttctggcaagaaagtttagtcctttggtggcatcccactgatctttgagaaactcagaaattctcaaagtgccagatgtaaaaaacaggttgctctattcccttcacttctgtagctgtctccagttttcttgctctgctctaggagatctactgtctaacagacaactaactaggaggatggtatgccaggctttcttcttgtcagaaatccatttctaaaagtgtcatatgttttccaattttttgagaagcagctcccctgtccctttggggatgggagttaataatttttctctaagagcttatagtttctacaagaacaacaacctgatatctttatctccttaattccatactgactcaccttctttcctggattgggaaggaaagtggcattgtagctggtggtagagttaatgctggttctccaatcccataaattcaggagtaagtgtgggggaatgcaatgcttgccttaactgttaaccagctttctttaaaacgttaggtagttaatgcctcattgtcctcaaatttgggccagggttactgattcttgggcactggattacatttcccttaaccactagctatacatgcttaacacaaaatccctccactagcatcagatgagtttgtgggtttggaactttagagtgaaaaagcacttagcaagatttgatttcactatatatttgacattcaactcaactgttcaacttacctttttgtgaggtgagggaatttgactaaaatcagcaattgcttacccaaacgatttcaggagctagaaggaaaagtaaatgcaggaagtaattattttgaatggggactgtgaccagtttgagagtggtaataccaacctgagtcgttgaattttaggccttcttgaagcgagtttctaagctctgagagatgttttaatgtccattccacatttaaatgtccatatatccactctttatgggcaggtagataacatatgagggcatttttcccttgtcataatgtttgggagtgggtgctactagccattttagtaagtagggatcagaaatgtgatatatgcaattgtcctttgtctcccatgattttcaaatgatacataaggtattaacgcagaaactgttcatattaacttgagcataatccaaattctgctttatatagagcttagatagacagacagaagagtaaagtattttgcatattttccagaaatacaattgctatttatattgagtaactattgcactttattttgtttattgttttccatcattatctagattcagccaccctttcagaaaatcatttcagcgatagcaagttgctgatagaatttgagtccataacacttcacacttaagtcaggcagcatttgtagtttttaactcatgtgattatacagatagaggtcagcatctgactatttcatacaatcttctcatgtagtcatgcctgaatatacataatgaacttcagatttcttcttaatgaactgctttcttgttatttatacttaaatttcagataaggcattatatagactttttcaaaaagctatttgtgggaagatctttatatccatggtcttcatttcaggtggtaaagcatttattacaaagtactttttataaaaatggaaaattgttttgatagcactgctctatatccactgtcagaggtctacaaaatctcagaggtcatcaatattctaatgtatatatatacacacatatatcagtcttcacctatcccttggccatattctttaacatgttatggttctcaggctataatattctcttagtcaccaggggcctaaagtaatctggttttacttgtagcatagtaaaaacttcaacctgagactgactgccagaggacctattcatttgatggtttcctgagtaggtacagttttcaagtctagatttaatatgaaagaagtatagccccctaaatattgtgtatggttatttgtagatatattcaaaattattgttttgccatgattaaaatatttatgagactgaggagattttaaaatttaaactaataaattggatcaactcactgttaactggtaaagcattttcatcattataaagagaatgcatcatctaattttcaaatgttttatctttctaattgaatttctaattagcacatgctagtaaaatgaaaatattaatgagatcctcataggtgcttaatatagtgatatcaagtactatcatacatatgtgtgtatatatacatatatatgcatgtgcataagttctgaagaaaatttttattatgcaagataattaagtgtcatttgacataaaaattttgcaaagaggtaaaaagtggcataaaattaaagaaagttaattatctgatctttctcctttcggcaatttactttcttttgtccacagatcaatcatcctaatgctcatttctttaattccctttaattacaactgagaagtaagcaagtgagatagtaatttctactgaaatttccatgcttaatctgcaaatgtagtgagcactgatatagtcaaggaacagtgtggctgttgtgagaaatagaaaatggaggacaggaattatactcagtttcccccattattcagcaataatagaaaaagttaatttacattttcttctttaaaatgtacattttaaaatttcaatacatttattgaattgagcaacaaaagtaatgtgtagggtaggcatttctgtaactttttctccctattttgtattttcatttttctgtattttttctgtaaagttttgtatatatataaactaaactaaactaaacttggaggttgaaataaaacccagattgacactgtatatagacagcagtacaatccagaaggaatctctttatatggtcagtgagaaacatttctatttttaacactactaaggggctccactaatgaagtttgtctggcagaggatgtgacctcagtattttataacacagaaatttctcctcaaggtagaaagctggctcgaagaaacctgtgactgtcatgtccctgaggggtgctttagagttcatagcttcaggatatctgtgaagttctgaaattgcaggcaataatttaagcattagtccccatgtttgtgtgtgtgtgcatgtgtgtgcacacctgcatgatactttggggggaagtggcccatttggtatgatccagttctaaaatatgattatccatgaccccctcaaagcttaagatcccctgaaatttcagctttctgcttttttgcaggcaaagatctaatttctcctctcttttaagtgaattatcctgccctttaacaaatagtggcgatacgttattttggtctttacaatccaggaacactattggttttgacaggctttgctcaaataaagactagtttcacttcatttccaaggcattcaactctacccaagtgacatttgtgaaagccatatatttcatttgtgcattccaatgatttaatttagtaagctcaataagcttatctctagtcaaagataacatggcatttatgactgtagagtgcgtgattgaatgggattcttcctgcttcagtttcaacttagactccattttgttgttatcagacaccaaagatcccgtgagaaaaattgacatatggagattttaaaagacactggttgaaactcttaattccggaactctttcacgtacttaggaaatacgcaagagagtcatggtctcaagagaaggttttaagaaaggggttattaaaactattgctttggagagtgcacttcacatgcaggctgttccatcctcttttgggggagaggcattaggcaggggtttactttccagtcccaatattgaagagggtgggcttctaggcatccaattgaagatctttgaaatagtcaaaaaaccttgaggataagtgcctgatcccaacaaaggaagctaaagcagttagtgttctgaggtcttttcttcccaggaggtccaggagaagagagagggtctgactaacagtgctggtggctgagccgggagatgctgctatgttgagattggttcactttctcctagcttgtcaggacaccggatgtgtgtcctgattgtttctggtgaattggatgtgggctatgtggtacaggatcctcttgggcctgtccatttgggatctcaggagggataagggctgcaagtgtattgcgggatgcccttggacaagggaagggtcagaagaatccacatatagacactgatacgcccaagacaagggaatttcagacaagaggaggagcagggaactattcccaggctcctataatcaaaatcatgagacagagagagtagattttaatcatctgccaagtttatgaagaataccagcttcactgatctactctgtccagatagcacaaagccacccaaagtaaatgtggcacagagccaaacagcagcttgcaagtgcaggaagaaagggaactgcagagagtagatagtagaggcaccagataccaccttagcccattttcctcaagcatctaattggggaaaaaagagatttaaggctacatcaagattggaatattttgagtatctatcttgtaatggacattctaattactggactgaaaggcatttgcaaactaaagtgatcatattgtgatatattccctaagaatgtgcaaaaaaaaaaaaaaaaaaaaaaaaccttgggacctacctgagcttctattcagggatggggaagatggcctgtatgtcttttcctaacctaccatcccctaagtgggagagaaaaaaaaaaaggttgtactttattcatatctgaagaccagtctgattatcatatgagttacactgcttaacagaatccaagcagtaaatactatgattgataattgtggtgattaatactgaatgtcaacttgattggattagaggatgcaaagtattatgcctgggtgtgtctggagggtgttgccaatggagattaacatttgagtcagttgactgggaaaggtaaacccatacttaatcttggtgagcacaatctaatcagctgccagcatggccagaataaaaagcaggcagaataacatgaagactagactggcttagcctctccgcctacctctttctccagtgctggatgttccatgccctcaaacattggactccaagctcttcagctttgggacttcaactggcttccttgctcctcggcttacagatggcctattgtgggaccctgtgatcgtgtgagttaatatgccttaataaactcacctttatacatacatcaatcctattagttctgtccctctagagaactgtgactaatacagattttggtaccaggagtggttctagaggaaaagaatattaaaaatggagttcttttgttggttttcaggtttctggagttggcttcttaaagtgattagccataaaaatgctaaggactctaattctaatagtatggagaacagacagtccttggtgtgaacaatttagagagttattatgcaaaataaatgcatttgatactcttgattcaccgctcatgaaaggcaaggagtttagtgactcaatacctaatacctttgaccatatgtggagaaccaaggaacataatgaagttggttggttgctcctaagttcactggacagagtgatgaaaaaaaacgaactcagggattctaactaactcctggcttcagaagcagatactgagcctcaaatctgctaagattgccctgagtgagtcttatctcctgcagagaaagagctgaaattgtggaaaatcagacacaggctattaccatgtgagtggttgacctgcaacaaaaggtgcacgcacagcctcgccaggtgtctactattaaagtgagagcattgattggaaaacaatgggaccttgcaacttggaatggggatatgtgagaggactttgatgaagctggggacattgagcttgtaaactctgatgaaccttttctgccagaaggaacagcttccccatccccagtagtggtaacatcccctccccaacccatgctgctattagcctttccatctttgtctgaggagatgaaccctgctctgcctgaggcaagagtgatggcctcccctgaggcagttgctaggcaagataatgttgattctcctcaggagcccccctccccccaacacccctgcttgcttctagacttataactaaagttttggcaggcccctagaggtgaagttcagagtgtgacccacaaggaggtgcactacactcgaaaagaactccttgagttttccaatctatataaatagaaatctggagaacagatatgggaatgaatattaaggatatgagaaatggtagaaggaacatacagttggatcgggctgaatttattgatttgggcccattaagtagggactctgcaattaatgttgcagctcagggagttaataaaggttctaatggttaatttgcttcattagctgaaatatggattaaaagatggctcactgtgagagaactggaaatgcctgatttcctcccttggtttaatgtagagaaagggattcaaaggcttagggagattgggatgctggagtggattagtcactttaggcctactcatcccagctgggaaagtccagaagatgtaccttttaccaatgctttggaaaacagatttgtgaaggcagcacctgcgtctttgaagagttctgtatctgttgcttttctccggataccatatctaacagtgggaaccatagtcactcaacaacaaaatttaaatgcaatggggataattggaacccaaggtggcaggagccaagtggtggcactcatccatcaaaggcacagtgggcatagctaccatcatggacaacagaggcaaagcagcaatcgggatagattgatttgtgtagagctctggcattggctagttaatcacagtgatcctagaagtgaaattgataggaaacttactgcattcctacttaatttaaataagcagaaaacttccaggccgaatggacaaaagactaatttgaattataaaaacagagcatcatggcccctcaattaattttcagactagagccagtttacagaaccctttgcatgaaggggaggccaggtccccttgaggaaggaccccactacactaccaacaatttatgctgttaatctttctcccatccttccccaaagggacctttggcctttcaccagggtaactgtgcatgggggaaaggaaatattcagacatttcagggattattggacactggctctgagcagacattgattccaggggacccaaaacatcactgtggtcctccagttaaggtagggggttacggaggtcaggtgattaatggagttctagctcaggttgaacttacagtgggcccagtgggttctgggactcatcctgtggttatttcccctgtgccagaatgcaaacttgacatagacatacttagcagctggcagaacccccacattagctccctgacttgtagggtgagggctattatggtgggaaaggccaaatggaagccattagagctgcctctacctagaaaaatagtaaatcaaaaacaatatcgcatccttggagggattgtggagattagtgacaccatcaaggacttgaaagacacaggggtggtgaaccccaccacatccccattcaactctcctatttttcctgtgctgaagacatggatcttggagaatgacagtgtattattgtaagcttaaccaagtggtgactccagttgcagctgctgtaccagatgtggtttcattgcttaagcaaattaacacatttcttggtacctgatatgcagccctttatttgtcaaatgcctttttctccattcctgtctgtaaggctcaccagaagcagtttgccttcagctggcaaggccagcaatatagctttgctgtcctgcctcaggggtatatcaactctttggctttgtgtcatagtcttgttcagagagaccttgatctatttgcccttccacaagatatcacactggtccattacattgaggactaaactctgatttttttttaacttgcccaaattcctatctaagctatctggtgagtcatgccctacaaatcatacattctcatcagatgggttttatttaaccctatatatcgtaactttccaacctgactctggcataacattactagacaaagaagaaaatcaaaatattttacccccaaaacacatttctttgatatattttgaagtagccctggaaagctgttctttgttgggggaaatttgcatatgtaaagaatctctattaacatagctagatttttttcttccagactctctcaatcctaaagaaattaactaaaatctgaataggaaacatttgtcatctgttgtctcgaagggcagccagtataaggcttcaaaataaccttagtctccacaatcttttatcttaacctgaacattccctttctatcaatcccaggtctttagacacaaacaaccaattgtccagcagaaaatatttaaattcacctatagcctggaagcccccactttgatttgtcttgcctttctggaccaaaccaatgtatttcttaaatgtgtttgattgatgtctcatgcctctgttaaatgtatgaaaccaagctgtgccccgaccaccttggtaacatgttctcaggacctcctgagtgctgtatcatgagccatggccactcgtatttggctcagaataaatctcttcaaatattttacagagttcaactcttttcattgacaacattatgacattatgctgattggatccagtgagtcataagtagcaaacacactgggctcatgctcatagaattcatcttaccatgttccccatcatcctgaagaagctggattgatagaactgtggaatggccttttgaagtcacaatgataatgccagctaggtaacaatactttgcagagctggggcaaagttctccagaatgtcgtgtatgctctgaagcagtgtccaacacatggtgctgtttctcccatagccaggattcacaggtccagaaatcaaggggtggaagtggaagtggcaccactcaccatcacccctagtgacccactagcaaaatttttgcttcctgttcctgtgacattatgttctgctggcctagaggtcttagttccagagggaggaatgctgccacctggagacacaataacgatttcattaaactgggagttaagattgccacctggacactttgggctcctcctaccttaaagtcaacaggctaagagggggtaactgtgttgactggggtgattgacctggactatcaagatgaaatcagtatactactccacaatggaggtaagtaagagtatgcatagaatacaggagatccattagggcgtctcttagaatcaccatgccctgtgattaaggtcaatgggaagctacaacagcccagtccaagcaggactacaaaatggcccagatctgtcaaaaatgaagatttcggtcactccatcaggaaaaaaaccccatgacctactgaggtgcttgctgaaggcagagggaatacagaatgggtagtagaagaagatagtcactaataccagctacgaacacatgaccagttgcagaaatgaggactgtaattgtcatgagtatttccttattcttttgttaaaaacatgtttgtgcatgtatacacttgtactagaaaatttcttcattttatttccttttttcctttatcatgtgacataagatttattgacttcatatcagcgtttaagtgttgttaattttgtgtaatagcatttgggttgtggattggtgcatttctggttgtattttgttaggtgtaattatgaccttattattgtctttatttgaagattacatatgatttcaggaaatgtgtatgaattcaagttgacaaggggtgaacttgtgatggttaatactgagtgtcaacttgattggactgaaggatgcatagtattgttcctgggtgtgtctgtaagggtattgacaaaggagattaacatttgagtcagtggactgggaaaggcagactcacccttaatctgggtgggcacaatctaatcatcggccaacacagctagaataaaagcagacagaagatcatgaaaagactacactggcctagcctcccagcctacatctttctctggtgctggatgcttcttgccctcaaacatcggactccaagttcttcagctttgggacttggactggcttccttgctcttcagcttggagatggcttactgtgggaccttgtgatcgtgggaattaatactctttaataaactcccctttatatatacatcaattctattaattgttctgttaatagttctgtccctctagagaaccctaatacaataattcttttttttgtttgtttctttttttaattttttattttattatactttaagttttagggtacatgtgcacaacatgcaggtttgttacacatgtatacatgtgccatgttggtgtgctgcacccattaacccgtcatttaacattaggtatccctaatgctatccctcccccctccccccacccacaacaggccccggtgtgtgatgttccccttcctgtgtccatgtgttctcattgttaaattcccacctatgagtgagaacatgtggtgttttgttttttgtccttgcaatagtttgctgagaatgatggtttccagcttcatctgtgtccctacaaaggacgtgaactcatcattttttatggctgcatagtattccatggtgcatatgtgccacattttcttaatccagtctatcattgttggacttttggcttggttccaagtctttgctattgtgaatagtgccgcaataaacatatgtgtgcatgtgcctttatagcagcatgatttatatatacccagtggtgggatggctgggtcaaatggtatttctagttctagatccctgaggaatcaccacactgacttccacagtggttgaactagtttacagtcctaccaacagtgtaaaagtgttcctatttctccacatcctgttgtttcctgactttttaatgattgccattctaactggtgtgaaatggtatctcactgtggttttgatttgcatttctctgatggccagtgatgatgagcattttttcatgtgtctgttggctgcataaatgtcttcttttgagaagtgtctgttcatatccttcgcccacttgttgatggggttgtttgtttttttcttgtaaatttattgcagtttattgtagattctggatattagccctttgtcagatgagtagattgcaaaaattttctcccattctgtaggttgcctgttcactctgatggtagtttcttttgctgtgcagaagctctttagtttaattagatcccatttgtcaattttggcttttgttgccattgcttttggtgttttagacatgaagtccctgcccatgcctatgtcctgaatggtattgcctaggttttcttctagggtttttatggttttacgtctaacatttaagtcttgaatccatctcgaattaatctttttttaaatgaaatattccttttttttctcagtgccatagataatagatgggtggactgtaacagtacctagttttcagctgaagcattttaatctccatcatttccactattaaaagaactaaatcatgcctgcttaatacgtcgtgtgtgttcgatactatttaggttatataatagtatagctcatttgaaacttagtgattctcagaaaaatctgagtattgcttatgttactaagagtttgtcatctggggtcaatacttatcatgccatattgctgtgtcccctatctcccattggagatgagaaaactctgacttttagtgtcagactgtctggaaatcacaatgtgaaattatcttctaaactaattcagctaaatcacatttaatatcagattttagtgactttctcatgactgtttatcaactcccaaatgactctttaattaattgtttctcctttactggctcattttctgtcagatccctttccttagagtgttgttttatccctgtgtggcagaaagactgtctgagattgtgctgttattaaatgtagtctggcataatttaagcacattaccttgatgatggtgatgtcactcaggtacttggcctacaaggagctagtacaatttcacttatttcattttaatggatccccttggttttgagcctataaactaaaataccattgcagtaccctccctccagcaatctcaaacttaattattccactccaggaagctgtctgatggccctgcagagacctgtttttgcactaaaacgcaatcccttattgtgtgacaaaattacttttgtttcatgttcttttctttatttatttacaaacagcatggaaaagcacttctcagcacaacttaataggtgattaccacaaatttgattttgagatttagattgaatagttgttaaagttttctttgtattctttcctttgtaatcatgatgacttcttaaatactattccaagtactgggcattgtgggtaatgtggcataaattgccaagatagctgactcaaatcttttcccctacttagttttgatattatttattaagtttcatagcttggatgacacctcttataagcccatctctaccaatatcttttttgctgctttgagcaaatttagttttctaagctaaaatttctaagtggttttgcagaaagcagaaaagacagagacacattgcagaaaaaggtgtggaaagattagagattcatagatgttgccatttgcagtacaaagttatctatgacaatggtcagtaatatatttcataaatgatcaaaagttttcacttacaatttcaacattttcacaattgtataataaccaagaaatacttagttttgttcatagtcaaaaagaaggttgaattgagagccagaaactctgtagtattttgcaagggacatatttgtctctagtcatcactttggtctatggggactaataggaaacgaacttcgtgcttctgtcacattttttgaagacaaagggacagcccatggatgtgctgtattttctattaataacatgttctttctcttcctagtttcctaggctttgaaaaaaatggtgaagagagagagaaaagagtaagagggactggcatacttacactttatgtgtgcatgcagtttttaattttgtgcttttcaaccctctctcatcagtgcaagaaattaaatgcatgagaattaatatgctcaagtcaataggtgaagcaataagctataacggaagagaaagggcttccatcatgcacaagctttatagacatttaattccctatgtggacaggaggtttacttatctgcacaagagcttcacacaaaacaagaattagattctcttcattttgagtttgcaatcctacttcatacaacaactgtggaattgagaaagaaaaataaatgcagagatagacaatatttggaaaaggagtcagaatgaaactgaattacacttgtttattttgagtttgggagaatgtggagaaaaacagattgaattaacacacacagaaaccacaaacacttttttcaaaaactcattttagtttatcttccctgaacaaactgagcaatatttagtgaagctctgtcttagtccctgtgaccacttttaaattacaggatggtcagaggaggattggtgagcacctggaagattgacaagtcacttccggcagagcaggcagatgtgagtttcacttaatcttttgtctcaaaaatgaaaggttccccataaaatgagttactatattttgcaggcacattgacagagatacagattttcatagaagttatttggtaagtcttagagataaacaaacactaatattaagaactcataaaaaatgtgaatttaaatattcttcctaagatctattatcaaagattttaagactgaaggctaatatatcataacataaaacctatatactgttaccacacaactgaggctcatagtttcttattcaaagagagctaataggttaaaatgggacaatagtcctgaattaattttgaaaatgtttagaatgttatcaataaacctgcagcattgatttttattttgatcacaatacatttctttttttgctacccttacaaagatagtatttttcatgttcaacaaaacaaatattacatattttttaaaagtgtctttgggctgggcacggtggctcacgcctgtaatcctttgggaggccgcggcaggcagatcatgaggtcaggagttcgagaccagcctgaccaacatggtaaaaccctgtctctactaaaaatacaaacattagccaggcgtggtggcatgtgcctgtaatcctagttacttaggaggctgaggcaggagaatcgcttgaacctgggagatggagattgcagtgagccaagatcgggccactgcactccagcctgggcaacagagcgagacgctgtctcaaaaaaaaaattaaaaaaaaaataaagtgtctttctattgtgaggtagatttatccaacaaatactaattaatggtactttgtgttgtatggttaggtttgttttaatctatcaaataaaagaattttaggcagggtgcatacagattttgtagttcctaaagcttataaaaatgtggaagctttctaaaaggaataaaatactaaattacaaacatacaactactggggctactcctaggaccttggcatgggtgtgatttagtgagggccttgaagtttaagcttctaaattagcttcatagttaatccttccctgttctcatgtaaccctataaagagcataattcttttatcctttgaatcgaaagcaaatggcctcaaccttaaaaaacaaagagaaaataatatactgtcctttgcttttcaataccaggctgaacatgatgtttctaaatgttctagcatcaaatgtgatcaacatgccttcccctgtctccttcgtggtatttttataaagacacagtgtttgaaggacattaatctaaatgacgggtcacaggaaatgaatgtgataacaacaggaagtgtattatggagatatggttcaatacaagcaagaccgagtttcattctgtctcccaggctggagtgcagtggtgcaatcttggctcactgcaatctctgcctcctagattcaagagattctcctgtctcagcctcccaactagctaggactacaggtgcgtgccaccatgcccagctaagtttttgtattttttttagtagagatagggtttcaccatgttggccagggtagtgtagaactccagacctcaagtgatccaccgacctcagcctcccgcagtcctgggattacaggtgcgagtcatggtgcctgtgtatttcctttttaactttaacagattttatttgaatagataacatgtttacatatttctgtgatggcctggtttgcctgtctggtttacaaataccaataaaagaggatacaaacaaatggaagaacattccatgctcatagataggaagaatcaatattgtgaaaatggccatactgcccaaggtaatttacagattcaatgccatccccatcaagctaccaatgactttcttcacagaattggaaaaaactactttaaagttcatatggaaccaaaaaaaagcccgcattcccaagtcaatcctaagccaaaagaacaaagctggggcatcacgctacctgacttcaaatatattacaaggctacagtaaccaaaacagcatggtactggtaccaaaacagagatatagatcaatggaacagaacagagccctcagaagtaatgtcacacatctacaaccatctgatcttttacaaacctgacaaaaacaagaaatagggaaaggattccctatttaacaaatcgtgctgggaaaactggctagccatatgtagaaagctgaaactggatcccttccttacaccttatacaaaaattaattcaagatggattaaacacttaaatgttagacataaaaccataaaaaccctagaagaaaacctaggtaataccattcaggacataggcatgggcaaggacttcatgtctaaaacaccaaaagcaatggcaacaaaagccaaaattgacaaatggcatctaattaaactaaagagcttctgcacagcaaaagaaactaccaccagagtgaacagtcaacctacagaatgggagaaaatttttcaatctactcatctgacaaagggctaatatccagaatctacaaaaactcaaacacatttacaagaaaaaaacaaacaaccccatcaacaagtgggcgaaggatatgaacagacacttctcaaaagaagacatttatgcagccaacagacacatgaaaaaatgctcatcatcactggccatcagagaaatgcaaatcaaaatgacaatgagataccatctcacaccagttagaatggcgattattacactgttgctgggactgtaaactagttcaaccattctggaagtcagtgtggtgattccttagggatctagaactagaaataccatttgacccagccatccattactgggtatatacccaaaggattataagtaatactgctataaagacacatgcacaagtatgtttattgtggcactattcacaatagcaaagacttggaaccaacctgaatgtccatcaatgatagattggattaagaatatgtgaaaaaaaaaaaaaagaatatgtggcacatatacaccatggaatactatgcagccataaaaaaggatgagttcatgtcctttgcagggacatagatgaagctggaaatcatcattctcagcaaactatcgcaaggacaaaaaaaccaaacaccgcatgttctcactcataggtgggaattgaacaatgagaacacatggacacaggaaggggaacatcacac

SEQ ID NO: 2636 - DNA, 16311 bp, Homo sapiens
ataaaggaaagaaaaataaataagaactgatggatagatagattagaaagaaagctagattgataggtgtgtgtgtgtgcgtgtgtgtttgtgttagtatatacccactctgtataccgtttgccttcagcaagcacctcagtgggttgtgttttttattcgtggtggagcgacccaaacattcattcctgaagggtctaggtcatttgtagtcctgcctggatttggctgttgtagtttcccattgacctgaatcacagggcatggtaatactaaaagatgccctaaaggatttcctgtattctacacatactcttccttacttccattgcggagtagtagactgatttcattttgatagtctgggtcagtcactccaaccaacactgtaactcctttcttagcctgttgacttagaggtaggaggagcccaaagtaactaggtgacaagcttaacttcaagttcaatggaatcattgtgtctcctgatggcagcattcccccttctggtactaagatgtctaggctagcagaacataatgtggtgggaacaggaagcaaaaattttgttaatgggtcattaggggtgatggtgagtggtgccacttccacttccaccccttcattaatgtacccatgaatcctgactatgggagaaacagtaccatatattggacacagattcaggacatacacagccttctggagaactttgccacagcactgcaaagtattgtcatctagttagcattgtaattgtgatttcaaaaggccattccattgttctatcattccagctgcttcaggatgatggagaacacagaaagaccagtgaattccgtgagcatgagtgcactgtcacacttctttagctgtagactgagtgcctttgtcagaggcaatgatcactgtgagcattggtgccatatcaaaggctcagtgttggtctctgctgccagtaaagagggcactcagtggtggctgtagccagatcaaccttggtgagtggaagtccatgtagctgagcccatgggtaaactccatccctgccaccatggccactttgttcatgagcctattgggcaatgacaggggtggctggggagagagacagagtgctgtccatagaacaagtcatcctatccgtttgattattaaaatcctcctctgctgaggtcacactttggtgagcattcacatgagataccaatatcttcacagtttttgaccactcaggtccatccacatacctcttccccaaatttctttgtcaccaattttccaattatgcttcttccaagtccctgactatccagccaatcattgtctatagcccatgaatcagtatatgatcgcacaactggccatttctccttccgagcaaagtgaacaaccaggtgcactgctcaaagttctgtccactgggaagattttcctttgccactgtccttcagggatggcctagaaaggggctatagtgctgcagctgtccacttttgggtggtgcctgcatatcatgcagaaccatctgtgaatcaggccctagtcttctcttcttctgtcaactgatcacagggaactacccatgtgaccgtcggtgcaggctgggggagggcaggcagattggcaggagcggagaacctaggcatttgagccacttcgtcatgtaacttacttgtgccttccagaactgctcgagcttgatcacatatataccgcttccatctgatgatggaatgctgctgtgcatgcccaattttatgaacaaatggcttagaaagcacccaatttatgatagtcagctcaggtcatatggtgacttgatgaccaatagtcaaacgttgtgtttctactgtagcccagcaacaagccaagagctgtctctcaaagggagagtagttatctgcaaaggatggcaaggctttgctccaaaactggagaggccaccactgttattcacctatgggggcgtggcaaaggctccaaacagcatctctatctgcaactgacacctcaaccaccattggatccgctgatcatatggcccaagtggcagagcagcttgcacagcagcctggaccccttctggagccttctcctgttctggaccccactcaaaactggcagcctttttggtcactcgataaatgggccagagtaacacacccaaatgggaaatgtgttgcctccaaaatccaaataggcacactaggccttgtgcctctttcttggttgtaggaggggccaaatgcagcaacttatttttcacctcagaaggaattatctcgacaggccccacaccattagacccctaagaatttcattgaggtcgaagatccctgaattttagtcagatttatttctatcctctggcactcatatgtctcaccaataagtccagcgtgtttgggacttcttgctcactggattcaatcagcataatgtcaccaatgtaatggaccagtgtgatatcttgtggaagggaaaagtgattcagatctttgcaaagaatattataacacaaagccagagatttgatatgcccctgaggtaggacagtaaaggtattgctggccttgtcagctgaaggcaaattgcctctgctgggccttatggacaggaatggagaaaaagacatttaccaaatcaatggctgtataccagttaccaagagatgtgttaatttgctccagcaatgaaaccacatctggtacagcagctgcaattagagttaccacttggttaagcttatgatgatctactgtcattctccaagatccatctgtcttctgcaaaggccgaataggagaggtgaacaaagatgtggtgggaatcaccaccactgcatttttcaagcccttgatggtggcactaatctctgcaatccctttagggatgcgatattattttgtatttactatatttctaggtagaggcagctctaatggcttccatttggcctttctcaccataatagccctcatgccaccagtcagggagccaatgtgaggattctgccagctgctaagtatgtgtatgccaattatgtgttctggcattaaggaaatgactacaggatgagtctggggacttactggacccattgtaagctggacctgaactaaaagtccattaattacctgacctccataagcccctactttaactggaggaccacaatgacgttttgagtcccctggaatcaatgtcagctcagagccagtatccactagtccctgaaaagtctgatcattcccctttccccagtgcacagttactctggtaaaatgctggaggtctccttggggaaggatagaagtattaacagcataaattgttggtagtgaagtggggtccttcctcaaggggacccagtctccccttgattcaaggagttctgggtctgtaaactgattcaagtctaaaaattgattgaggggctgtaattctctatttttataattcaaattactcttttgtacagtcaaactcgaagttttctgcttattcaaattaagtaagaatgcagtaggtttcctgtcaatttcacttccaggaacatcatgattaattagccaacgccagagctctacacgagtcagactattctgattgcttctttgcctctgctgtccattatggtaactgtgcccaccttgcctttgacggttgagtgctgccacttggtccctgctgcctcagaatccaattattctcattgcatttaaattttctaattgagttactgtggttcccattgttagatctggcatgcagagaagagcaatcacagcagagctcttcaaggatccagatgctcacctcataaatatatttcacaaagtattagtgaaggttatgtcttctggatgccccccaccggaacgaataggtctgaagtgactaatccacttcagcatcccaatctccctaagcctttggatccatcccttcccctacattaaaccacaggagatcaggcattttcagctcgctcacatggaccatcttttgatccatatttcagctaaccaagcaaataaactattagaaccttttttaaatccctgagctgcaacattaaatgcaggatccctgcttagtgggcccatatcaatacattcagcctgatccaacttttgttccttccaccattatcccacacctttaatatccattcccatgcctgttctccagatttctgctcatataaatgagaaaattcaagcaattcttttggagtgtagtgtacctccttgtgggtcacactctgtgtttcacctctaggggcctgctgggactttagttataggtcaagaagcaaacaagggtgttggggggcagatcctgaggaggatcagcattgccttgcttggcaactgcctcaggggaggccatcatgttgcttcaggcagtgcatggttaatctcctcagacaaaggtgcaaaggctgatggcagcctggacgggggaagggatgttgccaccactgggtgtgacgaggctgtttcctctggcaaataaggcttatcagaatttaggagctcagtgcccacagccttatcagggtcctcccatacatctccattccaagttgcagggtcccattcttttctaatcaatgccctcactttaacagtagacacctcctgaggctgatcatgcaccttttgttgcaggtcagccactctcatgataagagcttgtgtttgattttctgtaattttttccctttatctacaggagataagactctcgctcagggtaaccttagaaagaattgaggctcagtaggtgcttctggagctgggagttattatccctgagctcatccttttctttcttcactttgtccagcaaacctaggtgcaaccaactaacttcattatattccttggttctccacatagggccaaaggtattgtgtatagagccactaaacttcttgcctctcaccagcggtgaatcaggagtatcaaatgcatttattttacataacactctaaacagttcatgccaaagactatcagtgttctccatactattagaagtagagttcttagcattttggggtctaatcacgttaagtggccaactccagaaaacccaaaaccaactaaagaaatccatccttaaaattctcttcctttagaatgactcccagtaccaaaatctgtattaatcagggttctctaaagggacagataaagtaatagatgtatatatgaaggggagtttattaaggagtattgcctcacaggatcacaaggtaaagtcccacaataggccatctgcaaggtgaggaacaaaaaagacagtacatgtcccaaaacctcaaaagtagggaagctgacagtgcgggcttcagtctgtggccgatggcccaagagcccctggccaatcactggtgtaagtccaagagtccaaaagctgaagaacttagagtttaatgttggagggcaggaagtatccagcacgagagaaatatggaggctggaagactgtgcaagacaagtccttccacattcttttgcctgctttattctagccatgctggcagcagattattatgagatagtgacaacccagattgagggtggatctgcctctcccagtccactgactcaattgttaatctcctttggtaacaccctcccagacatacctaggaacaatgttttgcttccttcaatctaatcaagctgacattcaatattaactgtcactagggaaaactgggtgtgaagtatatgagaattttctgcactatcttcacaattattgtgtacattttataactcttctaaaatatgcaaaaacattatttaaaaatgtatgacaactcattctattagtgaggctgtgaggaaatatgcactcatacgtacagattcacattctggtgggaatacaaattgctataactcttatgaaggggaattggacgatatctaacaaaaatatacatgggtttatcattcaagccatcagttcgtcttctaggaatttactcagaaaatatactttcaacagtacaaaaatacacaaggttatttgaggcagcaatgttttgaaatacataatgctgaaaacatcctaaatgacctcacttaagacaatggttgaatacattatggcgcatccacataatgggttgttatgcaacagcaaaaaagaatgaagaagaatagataaactgctatggagtaacattcaggatatattattaaatgaaaaacttaagtgccaagagtatctatgttatgctacttttgtgtaataattacatgaaagtaacagaacattgtgcacagatatctgctcatttttagaaaaaaataggaaagataagttagaaactaaaaggattagttacttatgaggggcgaataaagataaaagaaagaatggtagataggaatgagttagaagggattgggtgcaagttagacttttctaagtatatctttctgaatagttttaatttttgcaaccaggctcatgttttacatactaataaataagtagatatatgaaaacataaacaaaaaatatatacatacatacatttaacaaggatgggagagagacttggaaatgaagtacaagcagaaataaattagactgtttgtcacataaataacataagcataatcacattgaaggtaggtagggagatggtaatttacccaagtaattcttgaagatactattttgactctacagcctcaggttaaagacatacagaatggtaaacaaatattgtactccaaataagtaggttgacttttcataggagcaaagggttagcaattcttaaacaaatttatacatgttccaagattaagcaaatcagttaatacattgtgaagaaggagaatcaattttctcactgtctttgaatgaattacaaatgaggaaacaagaaaggctggaatgaaccttgtgatattggattagaatcagtatgaattcagcattttaaacatataaacacatagctatagaaataaagatgtacatgggtaagtatatatatacttatgttccctagctctgtccattaagagggcctagaagcaaggatactctagtaccaatgagcacaccaaatgcctaaggaggctgagtctcagcctagagcctagcatagtgcttagacctggatgttcaataaatgataaatatcatcatcatcatcatcatctcactttagtatcataaggaaagttgactgcatgtacagaaaaactttaaacaaatgaaggcaagagaatgaagacacaaataaagaaaggataattgaagggccacacttctgatggagtaggaaggaatagccttccctatgtaagaaattttcaccttggaaaaaaagttacttctgcctctaagagaggagggaggagaagaaaataattgaagacatatgtagacatgttaagattgaaaagaaaatacctttaattgcctcagaaaaaaatatgactaaagccatctaattacagcaaggaatgtggatggagaagggaatattggacaaggtcaggaccgccacttctagagaaatgtgataccgggacaagatatgactaaaaatgtctgcagagcagcagagagtgcctacctcaagttaagtaacatgaatttgcggtgaattcagtgcatttcataatactagagttattattaaaaagacactgtttattatttaattggttttgaattgtttcttatgaattaactttgtctctccaattataactttcttaggcaagaggacatttctgacataatgtttatatcttccattgcacttattacagtgctagcgatataacacatacccagcagaaggttgatagcatataaacaactacattttcaacttggcctttatgatgtccctgcttctggattttgtttagttcttctgctattttccaggtagaagtatgatagttgaactttattgtgctctagaaaaagcaataaacccttctgcaaacttcataagatagcacagtaaaaggaactctacaccaagaggacattttcccttcaaaataacaaagcagaacacaaagtaaatcaaagcatataaacggagaaaggaattccgttgcctttgaaattgaactccagaaataatttacttaaaaagagttcctcagatatagcttgaagtctaaagacaatcattgatcatcaactggtattctcttactccatcagcactccagatacaaagcaagagaaaacccagagtaaaaaatttaaatggacaatatttcatctgcaacctggaaagtcttctatgcttgctgttgtattgactttcctacttatctcagaaaattgtgcatttaatcatctctctctattttctttgactcttttccagtgagagagtataagattgtttacctaaagacctcgaagtctagcaagataggaagcaagttgttacttaagcaggttgggggggcattatgggcacaatgaaaattaatcattggttctctttgcctatcaaaatacatcgttcacataggacccctttccccaataaatttagatcatgcctactctagaaaaggaatcacagcattgtcacttcttgatgttgtgaagtaatttgtaatgcgcagaaatgatttgaatacatgtcccaacagagctttgtgaaggaaactcaaagctattctgacataatagcaaatgatagcagagaagggactgaagcactgcagcaaacccaaaattgttccaatattcagctgctagaacaaaaaagaaaagcctcactactgaacctttttcatttcgtatagctgctcaaaatttagaaaactcatagaccataatccattaaaacagcatctattacatcaagttctaattgctaaacttgctggtaaatccttggggtaaagagattggaactcttccattttcaataaagattatttgtaaaactaaaaaaaaatccatgagacaatctgatagatgtctcattattcctgatctgtgttcttttttatttcttagccctacctctacaaccgattaaaatgcttagcctaaatactttcaccatttcaaagaaaccactacaaaaagtgctattttttggccgggcgtggtggctcacgcctgtaatcccagcactttgggaggccaggcgggcggatcacgagatcaggagatcgagaccatcctagctaacacggtgaaaccctgtttctactaaaaaaatacaaaaacataattagccgggcgtggtggcaggtgcctgtagtcccagctactcgggaggctgaggcaggagaatggcgtgaacccggaaggcggagcctgcagtgagccgagcacgccactgcactccagcctgggcgacagagcgagactgtctcaaaaaaaaaaaaaaaaaaaaaaatgctgtttttttcctggattttatgaggataaaatttagataatcttttaaaaatatgtacaatataccaaactatttaaatagacattagcattttctgttaaagtactgacatagtatttgcaactattttttaaatcatttttctactcttgatcgtttatagtcagaatttcagtcaagtttagcactatccaaaaaaatcagacaggatgtgttgcttcacaaataagaagctacatgtaagtcctgaagcacaaggtttaaggaaaggatttcagcaatgacttattcagcagatactcatcatatttcctcttgtgagttctgttatatagtccatattcctatgcttagagcagggattattctgcctcattggccttaaactacatcagccctataacctctacttccccacaggtttcagtgatctcccaattctgtcgcagaaagcttttccaacaaagtacacatttatattacaaccacaccccatatgtcctccatgaactcttattaattctccaatacacatgccattttattgctctgtgaagtcttccatgttttttccacgcatgctttctctgctggcctctgtgtatacctctattatatcatatagttctgtgcttatcacgaatttttgataatgcatttctggcaataaaggagaataaaacagaccctccaaagagtttggatgaattagagcaaggtggcttaccatcagcataaaatttcttccttaaagattagtttaattttattttagatataggggtacatgtgcaggtttgttatatggaaatattgcatgatgctgaggtttggaatatagatcccaccaccaggtagtgagatgctaccaggtagtgatacagatgctcccaccaagtagtgagcacagtacgggttaagtagtttttcaacccatgtttccctccgccattcctcctctactagtctgcagtgtctattgttcccatgtttatatgcatgtgtgttcaatgtttagttcccacttataagtgagaacgtgtagtatttgcctttctgttcctgccttaattcacttaggaaaatgacctccaactgcatccatgttgctgcaaaggacatgatttcttgaaatcatatgttttatccggtaaaaataccttaaaatatttcatgctatgccattatgtgtccttttaaattatttgtcattaataaaattgaagtttaaaattatttctaatgttcagcctttgttttgtgttctctttgcattagcactgtacacattcagtttaagaatcacctttttagattcccaacaaatggaaaagtgatatttgtataatatatatattttgtaaaacacaaaacaatatgcagcagaaaaattattgcactaagcacatgtattagaaaagaagattctcaagtaaatgacatcagcttctacatttttttcattatactttaagttctgggatacatgtgcagaatgtgcacgtttgttacataggcgtacacatatcatggtggtttgctgtacccatcaacctgtcatctacattaggtatttctcctaatgctatccctcccctacccccacccccaacaggccccagtgtgtgatgttccctccctgtgtccatgtgttctcattgacaactcccacttatgagtgagaacatgcggtgtttggttttctgttcctctgttagttggctgagcaagatggtttccagcttcacccaaggacatgaaaacatccttttttatggctgcaaagtattctatggtatatatgtgccacattttctttaaccagtctatcatcgatgggcatttgggttggttccaagtttttgctattgtgaatagtgctgcaataaacatatgtgcacatttgtctttatagtagaatgatttataatcctttgggtatatacccagtaatggaattgctgggtcaaatagtatttctggttctagatccttgagaatcgccacactgtcttccacaatggttgctaattaaactaaagagcttctgcacagcaaaagaaactatcatcagagtgaacaggcaacctacagaatgggaaaaaatttttgcaatctattcatctgacaaaggattctggattctgtagatccagaatctacatggaagaaactgcatcaaaattgggtgaaggatatgaacagacacttctcaaaagaagacatttatgttaccaacgaaaaaacaaacaaaaaaagctcatcatcactggtcattagagaaaagcaaatcaaaaccactatgagataccatctcatgccagttagaatggggatcgttaagtagtcaggaaacaacaggtgctggagaggatgtggagaaacagaaatgcttttacactgttggtgggagtgtaaattagttcagcctctatttttaacaaaaaaagaagggcaaattaaacccagagataaaggaagaaaataaacaataaagatcaaaagaggaattagtgaaaaagaaaacagaaatttagaaaatcaatgaaactaaaattagttttattgagattaataaacaactagccaagaaatggaaaaaaatgacaaaatatcaatatgagaaatgacagagatgacatgactatagattctatggatattaaaataataacagaatattatgacaataaattttaaaacttagatgaaatgggtgaatcttttgaaagacagaaactaacaaaaagtcactcataaaaatagaaaacctgaatatcttcatatctattaaagaaatgtattaataattaaatatcctctgaaaaagcaaataccaggccccatgtagaatcactaatgaattctatcaaatattttgaaaagaaataatattaattcttcaagaactttaacagaaaatttgagaagggaaaatatcttccaaatcattttatgagtccaactttaacctaataccaaaaccatataaaatattacaagaaaataatactatggaccagtaatcttcatgagtatggataaaaaaacctttaacaaaactttagcaagttaaataaaacaatatttaataaaaacaatatgttatagcccaatggagttcagtctagcaatgccaggttagtttaacattcaaaatcaattaaatgtaattcattatgttaatgaattaataaaagacacaatcatctcaatttatgcaaagtatttgtcaaaaccaacatctatacatccatttataataaaaagttctcaacaaaactaaaaatagacggaaattttctcaacatgtaaaggttatctatgataaacttacagctaacatccatcatacttactggtgaaagactaaattattttcccttaagattacgaaaaaagcaagtgtgtctgcttacaccatttctattcaaccttgtactgaatgttctagccagtgcaatgaggcaagagaaaaaaactaaagacattcagattggagaggggaaagtaaaactttccttattctcttatgagagaatcaccaatgtagaaaacctgtgtgttctacaaatattagttctagaattaataagtaagtttagcaagcttgcaggataaaaaccaatgtaaaaatatcaccagtatttttatgaactataaataaaaaaataggaaattaaaatttaaaactcttgcaggaagtcagggaccctaaatggagggaccagctgaagccatgtcagaagaacataaattgtgaagatttcatggacatttattagttccccaaattaatacttttataatttcttatgcctgtctttactgcaatctctgaacataaattgtgaagatttcatggacacttatcacttccccaatcaatacccttgtgatttcctatgcctgtctttactttaatctcttaatcccgtcatcttcgtaagctgaggaggatgtatgtcacctcaggaccctgtgatgattgcgttaactgcacaaattgtttgtagagcatgtgtgtttgaacaatatgaaatctgggcatcttgaaaaaagaacaggataacaacaatgttcagggaacaagggagataaccttaaactctgactgccggttagccaggtgcaacagagccatatttctcttctttcaaaagcaaatgggagaaatatcgctgaattctttttctctgcaaggaacatccctgagaaagagaatgtgtccctgaggggaggcctctgaactgaccgctttggggacggctgtcttttacggtcatagcagagggatgaaataagccccattctcctgtagtgctcccaggtttattaggacgaggaaattcccacctaataaattttggtcagaccggttgtctgctctcaaaccctgtttcctgataagatgttatcaatgacaatacatgcgtcaaacttcactagcaatttaaatttcacactggtcctgtggtcctgtgatctcgccctgcctccatttaccttgtgatatcttattaccttgtgatatcttattaccttgtgaagcatgtaatctctgtgacccacaccctattcgtacactccctccccttttgaaaatcactaataaaaacttgctggttttacggttcagggggcatcacggaacctgccaacatgtgatgtctcccccggacacccatctttaaaatttctctcttttgtactctgtccctttatttctcagactggccaacacatagggaaaatagaaaagaacctatatgaaatatcaggggctgaatttcccccgataaaaacatatcgtttatggtaacatttaagcacatgaactatggcactagcatgaaaataggcacatagatcaatgaaacagaatagagaactcaaaaagccacatatctacagccaactgatctttgacaaagttgacaaaaacatacactgggaaaggatgtccttttcaataaatggtgctggaaaaactggatttccatatgcagaagaataaaactgggcccctatctctcaccatatacaaaaattgactcaagatgatttaaatgtaagaactgaaagtattaaaatactaaaagaaaacatagggaaaactcttctggacattggtctagatgaagaattcataactgagaactcaaaagcacaaacaacaaaaacaaaaatagacacatgggatttaattaaactagaaagcttcagcacagcaatagaaataatcaacagaatggacaaacaacctagggaatgggagaaaatatttgccaaatacacatatggcaaggaactgatatccagaatttataaggaacttaaacaactcaacaaaaacaacaacaaaataaataaccccattaaaaagttggcaaaggacatgtatagatttttcaatataaggcatacaaatggtcaaaaagcatgtgaaataatgaacaacttcacttatcatcagagaaatgcaaagtaaaactaatcataatggctgttattaaaaagtaaaacaaaataacagatgttggtgaggatgtggagaaaagagaacactcataaactgttggtgggaatgctaattagggaatcctctatggaaagcagtatggagatttcttaaagaactaaaaataaaactatcattcaatcttgcaatcccattaccaggtatctacccaaaagaaaacgaatcattattttcaaaagataactacactcgtatgtttatcatggcactatcacaatagcaaagatatggattcaacctgtacccatcaatggattaatggataaagaaaatatagtatacatatacatacatagaatgaaatactattgcaccattaaaaatgaaattgtatctttcacagcaacatggatggaactggtggccattatcttaagtaaaataactcagaagtcaaatactgcatgttcttacttataagcgggagctaaactgtgtgtacacatggatgcaaagtgtgaaataatagacattggaaactcaggtgggagtgtgtgggggagtgagggatgagaaattacttaatgggtacaatgtacactatggctccaccaaacacccagacttcaccaatatgccatatatccttgtaaccaaaaaataaaacatagaaaataattaggcaaaagatgtgtaatccttgtacacttaaaaatgcaaacacattactgagataaaataaaagcctgaatgagtgtagagatatcctgtgtttatgggttggaagacttaatattgttaaaatgttagttctcaaattgatgtagaaattcaatacaatcccaatcaagatctcagcaagtctttttgtagaaatagacaagacaattctaaacttcatatggaaatgtgaaagatgtagaatattcaagccaatttgaaaaagaatgaagttgaaggaattacatggccctatttcaagacttactataaatctacagccataaatatagtgtgttattggcataaagacagacgtgcttattaatggaacaaaattaagtacagaaataggccggctataaaaggtcaattgattttttatagagattcaaaggcaggtcaatggggaaaggatagtcttttcaaaaacaaatatactggaacatttaaatattcatattcgaaaacaagaatgaacaaaagaaagaagtctcaatcaacaccatgcatcatagacaaaatttaactcaaaatgatcataggactaactgcaagtgctaaaactataaacttcataaaaggaaagatagtgtaaatctttatggccttggactaggcaatggtgtcttagatacaatagcaaaaatatcatctgtaaaataac

SEQ ID NO: 2637 - DNA, 2085 bp, Homo sapiens
gttccctcctcaaagcataccccaggctcctacctggacgttccagtggcctgggactacccacctccatactcacttcagtcccacacataccctgtgcctgctgtcttccaggcccctgcgaagagaataaaggatgaagtggaggcttcgttctctgggtctagacagtttcaaagtgaaacagaagttcttcgctggcagccaggagccaatggccacctttcctgtgccatatgatttgcctccagaactgtatggaagtaaagatcggccatggatatggaacattccttatgtcaaagcaccggatacgcatgggaacatgtgggtgccctcctgagaatcttgaggcactgtgaaatttaagtgtaagacattgagccacaaacatggaatctcttctttgtactggatgtccacttcccttaaagtcttatttgcacccttacaaaatctttccaaaggtcactcttatgaatggatgttggttatacttttaatggacattaacattcctaataaagtattagtttcttaattcacttttatatgttttggaaagaaaattagtgaacttctctatgttaaaaatacgtactgcttgagtatcccctgtctgaaatgcttgggaccagaagtgtttcagcttttggatttttttgaattttggaatatttgcatagcataatgagatatcttgggaatgggacccaaatctaaacacaaaattcatttatgtttcatatacaccttatatacaataacctaaaggtgattttatatgatattttgagtaattttatgcatgaaacaaagttttgacaggcttttgaccgtgattcatcacatgagttcaggcatggaaattttcatttggagcatcatgtcagcactcaaaaagttctggatcttggagcagttcagattttcagattagggatgctcaaatctatatagatataaaattatcctcacagtaacatagaatctcttggtgctgtcagctgttgggaattgaagattgactttgtgcttccaccctccatccagaaaggcacccttcattccaccagaactttacccaggaagaacacgatcatttcctttttcaccgatgccctctctcagctttctgagtacgtctcttggggtcgctggaggtgatcctaggatctgtctctgagaccaatgtgctgtttcagccccctgcagctaagaattgtattgactgtcctcacagcggcttttcatagctttcagcttcagctttacgaggcttctcctctctccctggcaccctgctggctgcctcactgcttacagacaggtcccaccaaacccaaacacctgcctagggtaaatgggtctctcttctatccccagaaactttcagaggaagcagctcatagaaacatacaaaagcacacaagtattttgggaaaaaatcctaaaaggtgacttaatttgatgccttaaattcacaagtgaggaagctaaggcctagaaggttaaggatgtccccagggtcacacagtgagcggggctcagagcttgagtgtctttgtgctttgtgtacattgtgttctccctagggtgctttagaccctgtttgttttcttctgcatgaggctgatttccagtttgtcatcaacctctttatcttataatttaggatagagttgaacgttagtcttgaaagattttctaaagtagtctttcaaactgttcctcagaggcctaggattttccaaaagtaccttaggaaccttgtaggctgcagtgggggtgtggcgatagagcaggaggcagggagacagggctgcagggcctcccaccttccaacagacaggctctgctgtatctgttgtacatactgggattctgtaaaggacattatctggggtgttgtatgtatttttgtgtgttctgctttttttaaataaacttgaaaagctactgaactaatttaaccagttgattttgcagataaggcttaagccttttgtgaccctaccctctatgtacgaaaacattacaactcgacatcagatgagctcaacagccatgaaaggaaacagggag

SEQ ID NO: 2638 - DNA, 1704 bp, Homo sapiens
aatcaagtacaatataactgatgactttcttgattcagtaatcagtaatttgtgatcaattttacctgatggtgacagcttggtgtataagttagtgctaatgtatattactgcatttcatttctgtggagcctgtcagctgagcaaaggagggaaactcaggatggagaactcctccccctccatccataagtggcacaccactggcctcctggtgttattaaaggaaaattggaaaagtttccagaagattaagcagaaagcttacaacttgcacaagactctcaattttccagtggctctgacagaaggataaatcttcggctgttttaactaaaatggacggtcaagttggtatccatcgtgaagctaaatgaatatctggacaggagtcagacaaagggaaggagaatccaggggaagatgaagcagctgcaggcctgtctgctaccctatatccggggaagagccagaaattgctgaccatagagagttacattgtccagcttttcctccacgaaatggagcagcaacaaaaggccagatcattcaacctatgcttcctcaagtctgataacattagcgtttctctcagatatcagttcaagtaaggagttgccaatagaagcaaagatgccaggaatcatcgtttttatttcagtgtccttacgaagacctttgagcacaatggaacgatgaggcaacattaaatattactggaatggggtatgaaagcagctactagaaaatcctgcaagaaaaatagatggagaaactgagtgctaagagtcttgccttttagctgtcaacagtttgaagatgaaacaaatctggaacagctgatttctattgtggcagctattacccatttttgttatgcatctgtctcttcccagactataaattatttaaggtgtgagtcggagacctaggcatttcttatggccagaaccttaagcaatgtctgggatatagcagatataacagactctcagctattgcgtgaattaaggaatgagcttgagaaatacttttaagtattttcttcctggaaaagagactccaactgtcttttgtacagtgcttgaaactcataccattaatcactctttgagactaaagctctgataacctgagtgaagaattggttacaaggacgttacaatgcaccatgctaccttcagccatttgtgcttctgcataaattgttttgaccgattagccaatcagtcaccaacaagacccaaaaggaatgagaatctaaacagattgtcaccatttggtgggtttgaacaccaagaggatagagcctagagcattgtggtctgctttaagacttctgagaggcaataaggagccctgagagaagctgagggcttcaagcaatgagatttgagcctacctcccttcatcaaaagtgcagctagaaaaacttggagaagcaaccagaacgggagttgggagggtaatacttttacatcaaaacaacactagctttattggctgtaataagagcaaagtatgtaagtagaaatgatattaatctgtcatgcatatcacttctcaagtggttcctcaacaatagtgttaatcaagctttgccctacttttatcggaaacctggtgaagaatagctttgacatttatcagacataggacactaagaaaattgccatatgtataaataaatttatgccttgaaaa

SEQ ID NO: 2639 - DNA, 10009 bp, Homo sapiens
ctcagatgcaggcacccctcaccccgcagtcactgcttctctaccagctccttttcagctgctgctgcagcctcagtttctcagggaggctctccaccagcttagaggtgggcggggggaagcagtgaacacgttccaggctgagccctcccagtgggcagcaagggcttgggaggaacttgagtgacggagtgtggggaaggaaaggtcaaggcctgcatgggcaccatgcggcaggcagcagggatcgggcatgggggagcctgtgggagccatgcaggccagtcggaagcacagtgcaggggggcagctgctgagcacctggtcctgggcagcctccagggcccactgctcagctctcagctctgagtctcaagcttccagcacattgcagaccttctcgagctcagtctgcatctcagccagctctgaacccacctcctgcaaagaagtctgtgatggaggagggtggggctggcgcgtatcttgatctgcaggctccccaagaacttcgctcccccttggattcagagctccagcctcacaggggccttcctagggactgttcttcgccccaaagaggccaccatggcggcatcaggtgcagtgctgacggaacagcaccaggggagggggcaagagggctcaccttcccctccaagctgtgcaggtgactgaagtccagaacacttgccctgaacccctgatccttcactccctcttttaccctgagtcccgcagcgctccccatacgggtagtactgcctagcccaggagcccctgagggcaggcctcacatcgccctccatctccacatcctttccagggtccctgcacagtttgcctgcacagggctgggcccgcaaagcctcgctccccaacgcacttgtttcatcacttcaattggtgagtccaccctgccaaggagtgaggcctagtcccctctcagggccacgctgaggttgtacgaggacagggcagccggggttacgggcctgggatgagtctaggctgagtccttggtgctcaatggagaacccccatcccaattcattggttccaacaagccaggcttcctactccaacccctgccccccggcccaggccctgccttcacttcacatggtccctgtctcagctcctccagctcctggaaacaagggcccagtgtggtcccagagggcccagtccacatggcaatgggagaccagagccaagttctctgcctgggaggtcccacctccatccagcctgatctcagggagggcaaccagggctgccccacaccagctctcacccctggatggggctgtcccagctccaccccagtctgcccttgagctcacccattggcctctggtggagtccacactgcagactccagctccttggcagacctgggctcccacagctcctgggggatgggaggcagaaacgctgctggggtgtggcagggacagcaggaccctgtccccttgcccccaccccgttctgtgttctgtgcatcattagctccaccaaggccactgggtaactcaaatgtggcacaggcccagttctatacagctggggagaccgacgcagggacagtgacccagtgagtaaactgaacagggtcataggatcactgagtgtcagagctccccagagtccccccagcaccacacccaatgtacagatggaacctgagccccagagtagtgaggggcttggccaaggccactggccagtttgtggcagagctgggactgccacagtcccatcagtgtttgtggaacccgtcgctttactggccagtgaggattcccagcggccccacccacaggctgtggggctggaggtgtgtgggtgggtcttggctggtgcccactcaggtaaatgcctgtgtagtacccaggagaagccacagtgggctgggtggggcaggggtgaggtgggacccacctttcatttgcagactccgggggctggcctggggtctctgctgcggtctgccctgtgggcagaggggaggtggcaaggactcaggagcacttgggctgctccagggtggctgccctcccttcaggctggcaggattgtccagattcttatgtccctgtccttgggtgggcaggctcaggccaccttgacctgggggcacccgaccctcacccctagcagctggtgctgagggttctggtgccagtggtggccaaagtcctgcttctgtccacaggcacccagctcaagctggagggcaaggccctttctgttcacggacagatgggccatagtagccctggaggccccacacccctgggcctgagctccccggtactcagggccagggtggggagcttgggacccattaaacaatcaggaagctgaggccccatgagaagagctgtggctgtggcacagcccgggcctccactttattgcacaaggcccctgacttcaggcttggggagggctctagggtacttaggaggggttctttgggggccctgactgtaggtggggccacctcacaccaccccaggcagcccagctcctgcccaccttttgcctctggatcccagcagccatctggtcattctccctctccagagcctgcatcctgctcctgtggctgactggggaggggccagctgcatccccatctaggggccctgctcccccatcctctcatgcctgcagaaaccttcaccctggctcttgggtttgggcaggtccagcctgcagaggggagcggatctcctcctgggccctggcctgccctccctggctggcatgtggactaggggcctgggggctcactggatggtgcccgcccagactcacggcagctcctcctgcgtgcactctggcctgtgcagctgtgtaagggtcctgcggttacatgatgggaaaagcaagagggagcatctggggccctgaagtcccaagtcacacccaaaccaaaccacccagccaggaagatagcaggaagcaaattggaggcgttctgggttgaactgtatccccagcaacaacaacaaaaagatatattgacatccccagtacctcctaatgagacagaatcattacagaggtaatcagactaaaatgaagtcaataggctgggctttcatccaaggtgactatacaaaggggaaatgtggacacgggcacacacagagggagacaccacgcggacatcctggaggaatgtcaaagcctgctggcaaagcaccagaagctggggacaaggcctagaacagaccctccctcacaggcctcaggaggaaccaaccctgccgacaccctgacctgaacttcagccttcagaaccaagagacaatgaatgcctgccattgaagctaccgtcttcagcactttgttatcacagccctagcaaactcacagaggaccctatccagctgctgccccatctccaagagcctcgccctgctggaagtgcactgctagtctggttcatcagccactctgcacaggacccctgcccaggacccagggtctgcattttaggccatccttgctggataggcccagagcccagggtccccacctgcctgtagaagggcaactgccagccggtgccagcgtgccttccaatattcagccatctcctcatgaagcctgggatgtgattcttgtgcctctagctctttcctgaggggcactggtacctccaggacctggagtgtactggaagaaatggtgcagtccaggtacagcatggaccccagatcacccccaccccactccctttcagtgattattgtcttatgaactaggagggggagtggggcagagatgcctctttcatggctccctgcacacacagaacccctttgtactgggcacttctactcccaaggaccctgacttgcacccagcagctaaggtcatctcacccccacctcccacctgcccctgggccagcaggaggggcttggccatatgtaggcgagacaggacttcttgaagctgaaagatttcccaccccataaaagagccagaatgtgacaaccaggagcgctgatacctggggaagggagactggctctggtcgtgtgattccgggtttagggctctgggccattccccctcagccagctggtgacagagactggcccaccgcctgctgagagggccatctcacctacagtgagaacagagcccccaccccagcctggcttggacactctgaggatgggcccaagcagccacctaccaggactcttggcccggggccacacccagtgctgctagcagccccaccttctcctgaagtagccaggtgtgctctgcctccagggcctgcaatggccccccaacaccatctgctctccctgcagatgctgcagctgctccaagcaggcccctagttgctggtggctctggcccagctcttctgagtctcttgttcacctggggagatccccaccccaccgagttgtggctcagcctccaccagggttgtggagctccagcctttacccatgcagcccctcctcagaggccccgaactccacttcctctgggtctcagcccttccaggaggcctctctgaccaccccagcccgcagaggcttctctacactccaggctacgactctggaccagtgcctggctgcacactagcaggggggccagttatgtgaagatgaggatggtgctctctggagtgtcactgtgtggacgccctgctagaatctctctctcctggtcattctcctttcctctgtgcccctagagccccttgccctacattggaatcccccaggaatggggcccaggctcccttgcctctgccccctggtacagatgggcatggcctggatcagctaatgcccagattccctttcctgtggggctgcccctgccagctgtcttgaccaacctcagtgagtatcagcaactgctcctgcagacggactgtgtcctgagcctgggcaggggtctcagctgctggcatggagactctgggtcccgaagctcctgggccctgcctccatcccagctctgctcttggatctgcaggcctggcaccagcatctcctgtagatacacttggtccagaatcctggggtctccttccagcttccagaccacactggggtggtcttggcagaccgttgatgcctcagggcatgttgtggcagggtcctggccccaactcaagttatgactctgaacaagctctcctctgctctctggtctcagttttcccatctgaaccaggagggaagtcactgaatgatcccagggtattcccaaatgttggaagaggatccctctcttggctggactaagcccctgcgctgccttccttctctagataatgcttcaataatgaggaccagagaataaagtgtggggcagagtcaaaggtacagcagggccagtgcgcagggcctgccatgcacccacttgggggatccccaggctgggctctgggccaacaggctgttgggtcatttggtccaaatgccgctaggccttttccacttctgtctgcagcagcaggatcctgtgggtagaagggatggtctgcctgttccctgccaccccacccctcccccacagcccagccccactcacttgtcttctatgttctggtctggcctcctccactcagcctgtccctgggatccctgcatctggtgcctctcctgctccaggcaggccagggagcactccacctgctaggaggaggctgagtgggagggctgaaggcagcacagagcctcagataggtagggctagcttccctgcctcccaccaggcagggcagtgtctgcagcctttgataacgcaggcggactggcagccagcagcccagctgacagcccaacatggacccatgccctggcttatatacaagggactgtgccctggggccctgaggggctgcttttggctgttatctatcacgacaggctccagctgtgcatctctacctccagctgggcccgagatacaccgcctctccagctgctctccagctgctgacagcttcagggtggaggccagcaggactgctgtggcatgctaaagggcaggcagacatgaggttgtcaactgggtcccaagggtcccccaggcctggtagggagcagtggctccaggtgggccagctgtgagctaagacacagagtcactgaaggcttgcgtaactgggccatcacacggtgtccctttcctaccctcacatgaggcagagatcctggtaaccttcccaagaaccctcagcttgcacagccatctccccctctctggggctcgcctgtttcactcggggagattgggcttctaaggaagctcttcagtctatggagctaaaaccagcccctccctccctcagattctccctggggggccacagggaccctggcccttccttcacctccagcagtgtccctagccacccccagcatatgcctctcaggcaacaccctgcacccttccaggggcaccattcagagacatctctgttcaacaccgcagccttgctggggactccatttccctttctcctctgggtgccccagaccccggaaagcctccctgagaatatggcaccagatgtggacaccagctctgggcattctggagcttcagcctgctaaggggatcttgctagctcaggggacctcctttcagctacagaaagcccaggaagaaggaatgggggaggacagggcctcactttctgctttagggaccagccaagtcccagcttgtgctcccgcctctgcagcaccagggcttgctccgacagggcctccggcactgcccgaagacggcttgccagctcggccctctgctgcctgctttctgccagctgctcccacaggtccttctctgcccgcctccagtcccgctcgggggccctgttggagcacatgccagggaaagaggagccagacttcagcccaggccccagggggctgccatgcccaactttcctatgctcacctgcacccttcagtggggcttggtgggcagacacggtccaatgccccgaggaaataggagttccagagacagcgggcagggctgggcatcaagtccatgggctctgcctcagtgggacctgagaacaggacagatcctggagctggggtagtcttggcttcccaaagcaccaggctctgaggcctcttctcagactcagaattgaggccctttggctgagcacgcactaaaacccttcaaccctgatcctctggcccgaaagtctcctggtgattggaacttcactaaacaccagcctcaactccactaaacagttctcagttcccagtggtttccatgagctgtgggtgctgccaggggtggccacttgctgaacacaaaccccattatcctcacagcagctggtctggggaggcgcagcaggcactcctgaggggaaattggtgcccaagtccggcagggagtcccgtgaggagctgcaatccccacccaacactgtctgcaccagagccacgttcccccttccagtgtggaagtctggaaatggcaggggagcatttgggggccaccacagtttagctatgatgtgggggtcagagcccttaagtcaagtcactgctcaggtacctctctggcttccatagcttcagctgtaatatggaggccctgacggacctctcacccaccagcttggtgaggaaggtcagagggtagacaggggctattctgccagtgttgccatccctacacccctcaccatcaccctcctcacctctagggtctgggcccaagtccactgcctcccaactcccaaccctgggcacgaggcaccctgccctggctctgaaagggcacaggagttgtcttcacctaagcagtggttacacctagcacctctaccacccccaccctgacctccccactcctcacattcccaggccttctccactcaggatggcaccatcgcccaccaggccttctccccactggacagcttgactctcctctccccttactccaggcccaggctcctgcagccccctccaaaattgtctcccctccaaaatgtcactgccacacaaggcttctctaagacagaccatgaggactggccgctgcccccacctcccatactgggtacagctcccacaatgccactctacctgggtgctctgtcttgccagttagaagtgacaggctttccatggcagccccctgcccttagtgagaagctgagctgtgcccagcttggtccgggaggggctcatggtccacagaatggagtgcacatgcaggccagattgtcctgagcaggggggcaggccagggcagccccaggaaggctttccagggaggtgaccctggggccaaggctcagaggtgaattaactgcctccagagaaggcaaagtcagatgaggcagacagaggagacagtaaggacaatagaacaaggagggcatcagagcagctgggcctggcgggcagtgaactgagccctaagcttggtggaagtggaggtggggggcaaaagggagaccaaaaggggtgagaggagctgtggggtttgggaggatgcagggcagcggcacctccccagtgcccttgagatatgctacagacctcaactccacagaggctgaggacccagacaggagcttgggcctgaggggcagtggaggtggagcaagcctcctctgaggtggggatgggagtggaggagttacccaaacctcacctgggggcagatctttctccaagtttctgaaaggtgtgaaagtcacaaaagaatgaagctctaagggtagaatctcaggcaggatggcctccaggctgcaaagtgtggagagggagacagctgggagatggcttctgttccacctcagaaaaagagagttgcttcgtggctgggaggtagggactcctggattctcagtggtgggcagttttgtgggaaggtgactaacttaccccatcagagcctatagctcagggcagggctggggacagaagcttctctgagaacatccatcccggggacagaagcttctctgagaacatccatccctcagggctagtatcctggagccatggaaactcaggcaacactaagtggtgggaggaggagacaccagagaggcctcctactccacctcatctgagctgatgaaaccccgagatggaacctggctagtgtggtcgaggccatgggtaccaggcaggaatggcatctcagatggcctgggatttttcaaaatcttcagcttttgagataggaccttagggggcaggacctcagcagccaatctgggtcacccactgtacactgaagcggctcctaactttcttttttgagacggagttttgctctcttgcgcaggctgcagtgaagtggcgcgatctcggctcactgcaatctctgcctcccgggtttaagtgattctcccacctcagcctcccgagcatctgggactacaggcgcgtgccaccacgtctagctaatttttgtatttttagtagagacggggtttcgccatgttggccagactggtctcgaattcctgacctcaggtgatcatccacctcagcctcccaaagtactgggattagaggggtgaaccaccgcgcttggccgattttttgtttattttttgagacagggtctccttctgtcgaccaggctggagtgcagtggtgtgatcatagctcactgcaatctcaacctcctgggatcaagcgatcctcctgcctcagtcccctgcaaggagctggaactacaggcatgcgccacccagtccggctaatttttgtaattttttggaaggggacccagttttgaattagcttctgttgtttacttcggatagccatggtggagctggcagagatttaggggatactaaacacccctacaaatcacgccttgaaaccccccgtttcagggagagccgctggcgaaggacttgatgcgcagccgcagctcggaagcggggggctcccctgcgacacctccccgcttcaggggcgggcccagacccgcg

SEQ ID NO: 2640 - DNA, 6493 bp, Homo sapiens
accccggaatgcggacgtgcaaaccctccaccccacccccagccacacacgtcgcggtcagagaactgggaagggggcgcggggtccgaggttctggaaaagcaagaactcacctgcaaacaggcagtcctcagctctggacttctggatcacgacgtcgatatccttctgaattcggtcttgccttgaacacatccccattaaataaatccttggaaaagaagcagccgctatttccaccccacccccctcgcacgctttcagctttcagaggacatcttgctgtgttttccaggctggacctgaatgaacttctgggctcaatcaatccttccacctcagcctaacatttacactgggagcagagatgcatttggagtaggtgatgattttggaatgctttagaagcaacataggtatctgatttcatcaggtcaagccatcaaaaatgaccaataaatctctgacctcttagaagcaatttgaagacccaaattttggccatcatcaaaattcgtgttcattcaaaattagacattctggagagcaaggacaatcattttgctgatgctgcagctaagaatgcagctctgaagttgacatcagacacagaactcctcgaaatgaccttgctgacttatgacccattgaagacttcattagaagtacaagtgggctgggcatggtggctcatgcctgtaatcccagcactttgggaggccaaggctggcagatcacctgaggtcaggagtttgagaccagcctggccaacatggtgaaatcctgtctctactaaaaatacaaaaattagctggtgtggtgacacatgtctataatccctgctacttgggaggcagaggcatgagaattgcttgaacctgggaggcggaggttgcagtgaggtgagattgcaccactgcactccagcctgggtgacagagcaagactctggcaaaaaaaaaaaaaaagaagcataagtgggagctcccaagcaggagagggatctctggaaggataaagggaacaaatttcttccagaaacagtcatatggtatgggcccaatgatacactgatctatcccttaggcttcaattacccttttacagtacttcataagctgactcattggaattcagacaaaatgttggcatggggaaagcaatggtattgaaaatcattgcctatgattgcagaaaatgtttagtcttgccatactgtctgtcccaaacataatcctggaaaaccccttcatgggtcacagggacattttgcctttgggacccttcgagacatggcagttagactttatccagctgtctccatctcagggtcacagatactttctggtgctaatttgtatatgctcactggggtgagcatttccatgctgatgagccacagcccaagtagtaggtagattgtgattagaaaaggtaattcctcatggggggtgccatctgaactccatagaaactgaggaacacacttcgttggtcaggtaatttgatccatttgtaacatttttgcctaagtcccaacatttccattgtgcctgtcacccctaatcctctgggccgatggaatgcactaatgatacaataaaaactcaattggcaaagctaacagaagtttttaacctttcttggacaaggatctcccactggttgtggaaaatgtccacactctccctctttgaaataataacaggaagacccttgcagtggttagatgaaggcgcttatgaatctgcacttcttaaaggtgacattctccattactgctaagatctcacagaacttactaagaactctacattaacaaagaattccattcataatgaactcctgggagatgaaaatatcaaaaatcttggcctataacctggagatgttgttgtttactggaaacaacatcaaataaaatattcttcccaagactgttggaagggaccacatcagctattattattactttatatatttttttgagatgggatctcattctattccccaagccagaatgcagtggcacaatcatgactcactgtagccttgaactcctgggctcaagccacccttctgcctcaaccttccaaatatttgggaccacaggcataggccactgcacctaactgacgacaggtattactgaccaatctgtgccagtaaacttaagggcgttgacacatggattcatgtttctcttgtaaaaggcaaccctaccagagtggacatctgtcagtggagattttcacttaaaggtaactcacaatcttcctgacagagatggcaagtagctgacatctggtgtagtccactttcacccaagatactggcctgtataatcagttacaattccagtgctgaccgtgcctgagagagttagtctcttttttgctgactggaatacatacaccattagggctcctttaagttgtaggggttgtctcttggtggttttggtaaaatcaccctatatgcatattctcttaagatatgacacactactcctgttgcgtgtatgtgtatatacatatacatacatacatacatagcagaatacctgtgatcagatttctgttttactgtccctaattaatttgattacagcagggagggataattctctgattagaatctcacaaaccattacctctgtgggaaatttgacaaggttccaggtttgccactcaaaaccacaaaccacttttgaccataatgacccattggtacatcctgtgctaaatttcacctgtattcctcctgattgcactcacgatgcaactcagggtcatatcaagcaaaacctgtttatctaatctgtctgactcaccctaactttcctgccgcacgtctcagtttaacccatcgtaatcgtattgtcaaaataactgcctgtaatcccagcactttgggaggccaaggcagaaggatcacttgagcacaggggtttgagactagcctgggcaaaatggtgaaacactgactctataaaatatatacaaattagctgggtgtggtggtgcccacctgtagtcccagctactcaggagcatgaggtgagaggatgacttgagctaaggagttcaagcctgcagcgaaccctgatgacgccactgcactccagcctgggcaacagagtgagaccctgtctcaaaaaataaataaataagctgcgtgtggtggtgtgtgcctgtagtcccagctgcttgggaggatgagccattgagccttggaggtcaagaggtcaaggctgtactgagctgtgatcttgtcactgaattccagcctgggagacagagtccttgtcttaaaaagtaattataataaaaataaaaagtacaaaaccaaccaaacaaaaaattgtttcttcactctgaaataacagtggttaacaccatgatgccactggaaagttaaaagaaaaacactccctcctgctatcaggatccaacctgccctcttgctctaaatttctgacccatggtttaaatgcccaaaagctgatgtactcaaattatagcgcacttacttgttcggcgtttatttttgtctcttgaaaagatcaccatccatggccctataaatgtcgaagggcatggaatgatgaagtgcaatgtcattattgttatgtatctctcatcgttttacttctgggaaaactaatttcatggtattctgaagagtagagatgattcaataagtgacagcagctgtagacttaactgaggcctctctctctctctctcttttttttttttgccactctatgatgccctttttttttttaagaccgagtctcactctgtcacccaggctggagtgcagtggtgtgatattagctcagtgcagcctcaaactcccaggctcaagcagtcctcctacctcagcctcctgaatagctgggactaaggtgtgtgccactacacctggctaactttgtattttttgtagagatggggtttcaccatgttgcccaggctggttttgaactcctggactcaggcaatccacgtatcttggcctcctgaagtgctgggactacaggtgtgagccaccatgcctggctgtaatgccctttcaattggacttttgggcattcttaaaaattcctcagtgaggtggcttctttcctcccctgtcccctgcttgggacaggactatccgggaatgagcctttctggcaaagagggacaaccttgacttagcttttgatcatcgatgctttcaagaagaaagattaaaaaaactttttatctgaggaatgtgagccctttcaaatgatcaggcccagagagacgttaaatcgagacagcaaccactttccgctccttccttttgagctgcgctgagctatgtattcatccgttgaaactgcttgctattgcctcaagtagctgtaaattaacctaataatgccacaccaatccctatacccccataccctataacttaacaacatatagccaatcaccaagcaatgttatttctgtaaaccaatgagaattcctgataggcacctatcagcccactgtctgtccctgcttttgaactttaaaaacctgcttgtgggcagggtgcggtggctcacgcctgtaatcccagcactttgggaggccgaggcaggcggatcatgaggtcaggagatcgagaccatcctggctaacacggtgaaaccccgtctctattaaaaaaatacaaaaaaaattagctgggcgtggtggcgggtgcctgtaatcccagctactagggaggctgaggcaggagaatggcgagaacccgggaggcggagcagagttcgcgccactgcactccagcctgggcgacagagtgagactccgtctcaaaataaataaataaataaaaaataaaaaataaaaacctgcttgtgacaaaggcaaaagggagctcagatccaagcttccttggtgtgagtcttccaggcagttgtcttcatgttgactcaagtaaactctaaattatattttgtgcttcagcctccttcttttaggtcaacatgttcaacaacagtagaataaatacataagttaatgtatattcctacaaaggaatacacgtagaaccaaataaccatatgaataacatgaaaaattcatagacataggactgagtgaaagaagtcagacctatgcctctgcttctgcaaccgcctttgcaaaaattacaactgggacaattaccacagtgaaagagatctgatctaactgattccatcttgcttctaacgtacaagctgtccttgttgattgctgggcacaggccgaaataactttgggaggaaattagtttatggtttagctgtgaaacaaagatgataatatccctgtcccgaagcaaacccccttcctgcctggggactagactgcctttgccggactaacaaattagccacgagattagaaattatggtttaggagtcatgtagcctctggctgcaagattctaaacctccccaaattgttcctggagatcacatcgttattggaaaacctaagatcagtgcttgagatattttgccgaccctgcactcagtggatcagctggcaccagctagactgataacctggctcagctggtcttgtggcccccaagcaggaactgacccagcacaagaccacagcttcagctccctgtgatttcatctccgacctggccaagcagaactctcaattcaccggcccccaatcaccaaataaagagtgcagctctttattgcaattcccctgtgtcgaaaaattggctctgtctaggcagcaggcagggtgtacctgttgggcagtaacactccccccaaaacccactacagactgtgactcagcttatatgaaagtaaagggcaggaaaaacttgcctggtagatttgcagagacgggggtggaaaccattaataagtctgtggagtattctcagagtttggtgttgtagtctacatattaaaagtaatcagttaaacacctgaaataaaacttctcccaaatatttttgccaaatttggatgactgtgtttctgtcttcgcagcatataaagtgttaacatgaggtaagcgctaaggtctagagaaggcagtgaagagatgacaaactccagcaccatgcctgaatgtccagtgtgctctgctggggcagcacatttttgtacattgctgtatctgaaaaaaaccctacaagattcatgaaactggacgaccgtctttataatactcctagtgataaaacaagtaaggatggctggtttgcagtcatctgagcagcctctctagtttcatagatacggtttctctctgatattgaacgacttccaaatgtcaagcgaaatgctacatcacaaggataaccgtatgtgaaaagaaccgtttttctttgtaatcctaaactttctagtctgagctttaaaagccattatttgaagaaaagcgcacaggctccagctggccgccaaaggggtcctttgcatcacaggctaaggacctac

SEQ ID NO: 2641 - DNA, 2779 bp, Homo sapiens
atttaacctccccttgctggctgcttggattccaagtatgtgtgattatgatgttttcctgtgatctctttaggaatcacctttggttgctgaagcatccaaagtggaagaactctcagaggaaacggaagttaaatcaccatcttcttctgtggctaaacctataacagtaagagggcaggaggaaaattcctgactatgacctggatttctcctactctcttagcctctggagtagggataactcaattcaacttttctgctctgacttgtattttgaaggccaaggaaacaaggcccatgcacgcatgtgcgcgcgcacctccccaccccccacacacactcaggttcattgttttcccaattccccagcagttcacatatttctgtagaccaagtcctttccagtatccccacaatcttttttcagaggctatcttaccatgatctcaccaagcccatggcaggatagcccttcacaagtttcttcctaaggattcctcaacctgcagagctaaagacttctgtccgatctgggaatctactgcctttctcagccatttggacagcttctgaatactgtcagaatttgaacctgaaaatttccaaatgagagacaatgaagagcttgctattggcctttaattgagttgctcctataactgaaggacatgaactaatcctcaaacttgaaatacatataatgtcttggttgatgtcagagaagcattctaatggacaagacaatgccaagaagaattctatgacaaatagaaatggtttgtacaggaacatgctaccaggggaatgcaagcaggtactcatgagcattcagcttcctttgtcctggggatgactttggaaccaactgcagagctgccagagcttattgctatttgttcagtgctccatgaccagttctcaacttaccaacaaaaagccacatggtatatggatgagtagctgcaaagtgaatggacaggatcctgtttgaaaggccactgctctggtagaagaagctaaaagcaaatcagatcagggggcggaattgcatgctatttgtccctgtgtttgttttctaacaagtcatgggtagtatggtaagacaaggggaagttggcctattaaatagaagcttgcatggagcttggccctatggaaatcactgtaggaatttagagggtgcattagacatgtcaatgcccatcagaagaacttccttccaagactagaagatgattaggaccagttagtagatattctgatgtgctccctggaagtggacatcttggtccactaaattagtggacattgggggcccatagcaatgctgaaatgagctgaatctagacataattctcttccacactctcacaaataaaatgcctataaaattgtactatttgccatttggagagacaaagactgcaaatggtgatgggggaagttccctgggtgggaaggcatcacacatagctggtaactgggactgatattggtagccctaggggcctacagatgcgtcctggcaggagcttagagtagactgggcttgtcatagccagtggtagagagaaattgtcaaagtactataaaagcaccagagcagaaaatattgcaccactttgagtcacattttttcagactaagaagtacacttttcagcccatagtgtccaacagcgcatagagagatatcctccttagggtaagagtttgacatagacttgaaaaagacaagtggaacatttgttgtctaaaagaaagggagatgaggcaaggaggggtggctaacctgctttcgtgagcctatgcttacacttaacatgagagtggccaagggaaaatttccgaaagatagatttctccacttaactggaggatttaggaaggagtgggtagaaaagaatactggtatgactattctttttcctcttttccccacatcacctcaacttccccttttctttcctgatttagtggtctcaaggtcaggactgcaattataggtccaagaatcaggaatatctctaagaaagagagtataactatattgttaaagctttaagtcggaatttgtaaaggcctgatggggtgaattgtgtcttcaccccatttggaaatattggagttgacagtaaatgcagtcaattgcccagtggttaagaaagctcaccagttctgtatgtctatagctctcccctatttaagtggaaatggactgaactggcggggggcacttggtagactaataatgctgttggaaatatggactagcacagcagtcaaacttaacattccttctaaagggtgaaaaagtttggataaaatgattaagtggagagaaggaggaacactagttgagggtaaaggaattaataaaagaattatgcaccaagggaaatccaatattacattgccactcagagcaagagataatgttatctcttagctcaatgataccagatgcctgaaaggaggaagccatgtgttgccaagatcatatctgttctcacaatctgacaagttcaaaagaaagctaatgaaactaagtgaaatctctctgggacgttttggttctgtgtgatgatggactggactaattattgatgactaagtgggactctggtaatgcatcactatctcatttttcaagtcacgtcaaccacactgtgccatgatataacactggtggtgttggtaagatgataataccagtactgatggtcaaatgtattggaaaaatgaggtaaaatcctcctatccccagaacatactag

SEQ ID NO: 2642 - DNA, 8365 bp, Homo sapiens
tgaagctcaaagcaattagaaatattttcccaaatttatgggattagctatggagaaagtacataaatggatagtccgtcttgaaatttatgctgttaactccaatactaacatgtctctcaattaaacctagagaagagagctacctcaactaagactaaacacttggttacagattatgtttagactaaattcaggtttcttgacttcaattccatgctttttattcagtctgcctcaacaaatgacactaataatttttctacttttccatgtgaaataaacagtaattaagttaattaagatgtgtttttctaaaaatgtaaggctgaaaaccctacacaagatgtacattgggcatagcaggataccaatcaggggtcattaaataaaagcaagttaattaaggacattaaactgtttctagatagggtgatctgacctaaaaaatacacagccttttcctgctctattaaatttgaattgtgcccttgtagatccctgccttttggaaaaagccaaaagataactggaagtagaaaattagaacatcagaggatatttacaatcacagaggaatgtcttattaaatgtgcctaaatagttttcattctggatgttttaacaagagagaagtgcttattatgaaagacaagtgctttcctcctcctgcccctcaggttgatgttctttcactgcgaaggatgcatggaaactgaaaaaaagacatacagaaaaaaagagctatgtcagctaaatgaattgacttacgttcagttaatagacagctgttcatgttaatgccctctcacgccgtctttcactaggctacattcagagaagaggaactgttgagcaactgatttttgattatttcctgagttgttctgcaggcttgaaaggatagtttcttgttggtcaaatcacagaaaagtcttatacaagaattatcatcgggtcaagttctcagacttacattgtaattaattgcttagcctcattacttccacactatataatagttttactctttgttctttctattaaactggttttactttagaattttgtttcactgtaatgaatgccataagaatattctttaattcgatcattattattattattattttgagacggagtctcacactatcgtcggggccggagtgcagtggtgtgcaatctcggctcactgcaacctctgcctcctaggtacaagggattctcctgcctcagcctcccgagtagctgggattacaggcgcctgccaccatgcttggctaattttttgtatttttgaagagacggggtttcaccatgttggccgggctagtccccaactcgtgacctcgtgatctgcccacctcggcctcccaaagtgctgggattacaggcatgagccaccgcgcccagcctcggtgtttatttttacaaacaagatagctcacatttccctccaacaccattttaaaataaagcttgtcatttctatttgaccttttgttatctcttcctgattttctgagaatgatttatactaaatattatatcttttatattgtgtacatatatatgttatttataatcccatatctgaatatctgaattccaaaatactccaaaatctgactttttgagcacagcactgacatgacactcaaaggaaatgctctttggagcactttggattttggattttcagattagggatactttacggtttcaaaatctgaaaatctctgaaatctgtaacatttctggtctccagtgttttggattgggaatagtcaatctgtaacatacatgcatattacactgtgttttctttaattaaagtaattgcattaatttgtctaagctagggatgtatcaaaagtacatatttcattttgatccttaaatcaattttgacatatttcttcttatgattaaatacacatgattcatagaagaaataaggtcctccactgggatctttttgttttgtaaaagactttcattatacagctctgttggctatttatccagacccagctcctgtcataaacctttatgctttatgttacagtaataatgaattatttgcaattcctaaaatatcacaattgcattatataattccaattgttggcattgaagccaaggactgtgatttttccatagttattgtctcagcaactagcagtatggtggcataaatatctgttgaaacaacaaacagcttttctttcacagtagttactacataaatatttgctgaaagaaattaataaacagcttgtctttccaacatttcttgtatttgaaatacttccatctaatctttctttattatctgcatgctttctcctaagtatgagccatttactcaccaatttgagttttatttagctccacaatcttgaagcattttagcatggcgagatgatttgaattgccttaatgacagtcaggcatatgaaacaggtttgctaaatcctacttttctagactttttcggggaccctagaacagtattttgaaatagcaattataacaaaattatttcaatgtattaatatatacatatttttaaattctgagcaggtgttgatttttttttataacaagaaacctttcagaagtgaaagataacagatttacgatccttgtcaataaagcaagtattggcaatttcacttaacagttttaatgaaggaattgtagcaccgagtctgttgcaaagttcttgataaaagtgctactctttgtgatgaaaataattatcactgtagagtaggcataaaaataccccacaatagtcagacacccagaaataaaagttagagaaatttgtggaaacatgattgaatgtgcataagatgacttaatctaggtccaattactcttattttaatatcatttaaaatgaaatcatattgggcttcaaatggtttttcatatctagagtcagtgtcataacagcaatgactgccattagtacaggtagtttatagctcaaatttttacctttgtatttacctagtctcactgttttgcgctgtctcccttcagtcccttgattaaatgatatcctgtacattccaaaaagctcagtgcaatgttggtttggggagaactcaatggagcttatataatgatgcatttggtaatcagttatggcaaaatacacagttattaaccagaaattataatatccttgttgacttttttaagcactccctattatctttagctttataatcgagattacatctttggtagcatatagtttattaatactttctaacatataataatgaaagagtgtgtgtgtgggtgtgtaagtgtgtctatgacagaatagtctttttggttttacaaaagccaaactagataaattttatttatatcatttctgtattcaatatttatcatgaagtacatattaaataattattttgtaaactttatggcggcatttaaaatgcacagtctttattgtaacaaaataatacttactaggcttaatctggcaaacgtgagcagaagggatttgccagtaggaatactaaatgcagggatttacaaggagaatactgcaacttgtcctttgtaattttgcaataatatctgaatatcaaggcacctattcttgatcaccaaattttgctttcattcagcccacagaggctgttacaaatccttcccaaacacccttccttaagcagagaatcccacccgcttctcctacgctcaacaggcaaccttgcttcttatttaagaaaaaaaaaaatagaagccatctgttggaacttttctaaattttcttcttttctacctctaaagttgcctagagggaacagaagccccttctatacactcgagtatgcacctttgcatctttttggtaaagttgatctttctggtctaagttcctttattttcaatctctaaccctataatgaatactgcttcctcccaaagcacacactcaaaaaaaaaaatgaaaataaagaaaataaacaaaaaagtgctcacatttccatttccaaccacattgtgccagttttttaaccatcaaatttccccaaaataacttagcctcccaatttatttcttcctcatccctccctttctctttcactatacatttcttgagtcaaaatatttattaaatacttaatatgcacaggctattttgctatatgctggactatagctgatatggtttggctgtgtccctacccaaatctcatcttgaattatagttcccataatccccatgtgtcatgggagggacccagtggaaggtaattggatcatgggggcagttttccccatgctattctcatgatagtgagtaagttctcatgagatctgatggttttgcaaggggctttcctgacttcactcagctctcattcttctccttcatgccaccatgtgaagaaggatgtgtttgctttcccttccgccataattgtacatttcctgaggcctccccagccctgtagaactgtcagtcaattcaacctttttcctttgtaaattacccagtcttgggtgtttcttcttagtagcatggaaggaactaatacagtagccaaaggaaatatcctgcttaaaagtcacagttacacaagtctgaccaataataacacaattacaatacattttgataagtactatgaaaacataattgagaaatatatgaaagagaactgctattccttttgtttgtttgtttgtttaatttaagttctggcatacacatgcagaagaacgttcaggtttgttacaccggtatacatgtaccatggtggtttgctgcacctatcaccctatcatctaggttttaagccatgcatccattagctatttgtccctcccctcacccctcattccttgacagcctatttcataagttagacattctttaaaattcagctagagaaaaagaaacatatccaacacatattcaagagttacccatttatcttctcattggcttcagttaataatgtcatgtccagggtcaggttccagcccatgctgaggtctgaagggagtgagtgcaagagtggcagattgctgaaagaacacttggggggctgtaggcaggtgaaagatggttttattcagcagcttccttacactgtctgtctctgtcttagttgcctgctcttgttctgcagctccttccactctcatgcatagctgcatggctggctctcccttacagggtcaacagcttaactctttctctctctgggtgcgagcaagctgagctgggtcctggctccccccgtctatctgaaagacagaaagctctggctccccctctttttctctggatgcaagtgtgcctatacagtgtcagcagggcagttataccttttacagtcaatagttgctctgagccaggttatgagccttcccatgttatggctacatagctgtgattatgtaataagtggagttacgctcctgcgctccaaactcgctgagtcacacaggatgtttaccttggcctatgcctgcctggctgcagtgcaggcatattccttacaaataaacatttcctgagaaacacctacatgctgggcactctattaggcattaagtattgataacagaatgaaactggcatggcactcaggtaaatgagtattttgtgatggtaatgggataactataaaggcataggagaagtgcctattccagcctggggatagcagataaagattctaaggggatcattttttatttaagcataggatccctgcaattagcagggtgaaaccttgaagggacagagggtgcctatacacaggctagcatagggctctcaagtttttccataaaactttactacagaagataatgtttcatattctcaggggctcaaaatgttatgcatcaagaacaagatttccccactttagtttaaaatgtatagcaaattgtacatatttatgataaggagcttagattttattatctgaattatacaggaagaaaacagggtattcagatggaaagtgacatgactatatttaatatttagatatgtcattttgtcagccttgttaagaagaggctcaagtcaggttgggattacaaattgatgctggagttaaaagtctactcacaggtgcagagtgtgaatgaagatactgaccataataatgaagagaatgatagagatttgaaatattaaggaaatatgatgcaatgcctttattggctatttgggggaggagtttaggactgaaagaggagtccctgacaactctcaagtttataggctgcacttctgagtgaaagaaggtgctctttattgagctgtgtaacataaaaggagaagttttgcaggaaggaaagattatagtataaccaattaaagaaaaatctcttcatttctgtattgatttttatattgttgtgtaacaaataacaactatagcagcttaaaaacaacacttatttattaactcattgccatagagggcagaagtccaggcatgacatgactgggttctctgcctgggcatcatcagactgaaataaaagtgtccactggggctggagtttccatttgaactttatgcttttcttccagtctcacttgttgtggtaggttaaaaactgacccaccaacaggtactctcatcataatcactgggacctgtgaatgttactttatcaggccaagtctttgcagatgtgattaagtatcttgtggttattctggtggtccctaactgcaaccaagagggaggcagaaggatatttgacaaatacacacactgaagagaaagctatgtgaagatagagcagatagagagttgaagatgctggcctgggaaattgaactaatgtggccacagaatgctggcaaccactagaagctgaaacaggccaagaacattctcccctagagccttcagagagagttttggccctgctaaaatcttaattttggcccagtaatacagattttggacttatagatttcaaaactgtgagaggatacatttctgttgctttaagccaccaagtttgtggtaatttattatagcagccacaggaaattaatatgctagttgttcgcaaaattgatattcctgtggttgtacaactgaggtctccattttcctaatagatcatggccaagacaactcagtttctttccatgtggttctcatatcaatgcatacctacatggatgtttgctttctttcaaaccatatggagtgagtctcatttactttccattctgtaatcagctggagaaaactctctgaatctaaagggctcaggtaatgaggtcaggcccaccaggataatcttaaggcaactgatttgagaccttatttatatctgcaaaatccctttacaacagtttctagtgtttgattaaataagggagaagttgtgtgtataaaatttggggagccatcttagaattcttcctaccactctctcattatccatatgctgtttcctatatcactatgacgagaagaatcacctgggcgtttgataaaaatgcttattccaagatctcaattcagacttacagaaacaaaatctctaggattagaatgtgggaacatgcttttcttagcttccctatgagaatcttaaaatcagtctactgaatactgcaagtctgtccttgcagagtataccagatccacaaataaatctaaacttctaaaactggccataaaatgaccatttatgtatttctcagtccttgaaatagccatttgacagtctgtatcaaaagttttgagagagaaagcggttgctagctctctacaactagatgttgttagaattctggtctctcaatcagataaatttaattagaaatatgttatgactcaataagaagaaattattattaattttgttgggagataattacatagtggtggtgtactaaaaaagaagtccatacatatttaaagatggatgtaggggtattatgtgtgaaaagacataatgtctgagatgtgtgtttaaaaagcagatggagactaaataagattgacataatgttgcatattttcaaactatatactttggagtttcttatacaatgtctctactttcagcaatggggcttccttagcaataatctagaatgttattgaagcctccaaaaaagaaaactgagtttttgtttcaacagttgggtaagaatcacctgccagtctaaaacaaccttgaatagttatgtgatcaaagaacacacttttggccaggtgccgtggctcacgcctgtaatcccagcactttgggaggccgaggcgggcggatctcctgaagtcaggagtttgagagcagcctggccaacatggtgaaaccctgt

SEQ ID NO: 2643 - DNA, 1013 bp, Homo sapiens
gctcaaattcggaaagaggggacggaaatggaacctcttcatgggaggaagtttttgctgaagcaccaaaatagaggcaaagttttgtagaggccaagtgctaccttattctcaaatggagttttagatcatccatgaattacttgcaaaagggacgtcctgaaactctgcaccactagaccatcgtacacctttaatgaattcttagatgcattttatatatgatgtatgtacataaaaatgaatgaattcattagaagacattttaaaaatgggaatttccgtggacaaagagttttaggaaagttgagtatttcttttgaagctacgtgaggagagcttttggaaaagcactaaggaatcttgatgcgtatgcttcgtgcttctgtagacacacagttggcacctgactcagatataaaaaagtctcaaggttttattatcgctggcagagcaagaggagagatggcaagagtgagacactgcaacccacccactgatgttggggcgaagatgccctaggccagacctataacacataaatagaaaggagctggacttgagggacttgattttgaacaggacactgtcaaaagcccccacctgggaaactgtactaatagcccccacctgggaaactgtactaatagaagagtcagcgtggggtggtgtgttagtttgttttgatgctgctgatgaagacatacccaagactaggcgatttacaagagaaagaagaggttgaattgcacttacatttccgcacggctggggaagcctcacaatcatggcggaaggtgaggaggagcaagtcacatcttaacgtggatggcggcaggcaaagacacaaagaatgagagccaagtgaaacagatttccccttatcaaaccagcagatctcacgagacttattcactaccacgaggacagcatgggagaacccacccccacaatccaaccatctcccaccacgtccctcccagaacacgcgggaattatgggagtacaattca

SEQ ID NO: 2644 - DNA, 7548 bp, Homo sapiens
ttttcttttcttttcttttcacagagtcttgctctgtcagccaggctggagtgcagtggcatgatctctgctcactgcagcctggacatcccggactcacgcgatcatctcatctcagctctgccagtcagctgggactacaggtgtgcatcaccatgcccagctaatttttgtatttttttgtagagagggggtttcaccgtgttggtcaggcttttctttttctttcttttttaactttcagagggggtataattatttgtgttcctgaatatttatgaattttcttctaaacttattgttaaaactatttattgtataacatttttggatggttttagtaatgtcactagcataagcagatgccagcaaaatgtatcgtatcagtcacacataagtaaattgctacaaaactcaagaagtaaattgtgaagaaaatttccttctgagggaaatatgatctcaaatgacatgttttttagtgttcaacttttattttcgatgcagggggcacatgtacagtcttgttatatgggtatattgtatccaggtggtgagcatagtacctaatagtaattttcaagttacattttatatttgtaaatagaatatttgattttattttgtgacttctactttatagaatagttttagatttatagaaaaattgtgaagacagtagaaagaatttctatgaactccatactccatgcttgtatttttaataaacagctgtgtatggttgtcagaagagctaattaagctcttaggtgcatctgttgaaattgtttccaaaataaaggggataatagaaccattctatattgttccagacagatggagcacagggaaatgtgtcttggcattctaaaaaagaatgaatggagaaccctggacactgttcccataaggagtacatgaagggacttgggatatttaattggataatagaagattgaagggtatgtggcaactgtcttcatatattgcagagggtgtaatgtggaagcgacagactcggaggggtcaatggatggaagataattactcagaatatggaagtctatgtattgattacatatttgaaagtgacaggcctgttgtgtatgggcagagggttccgggttaaatctcaaaaataataatagcaggggctagtagtaatacattctgaaaaaccagcgtatcaaaaagagagggaatactcccctctcttagatctgctcccctgggtgctgattgtaagtagctttgtatgttttattttagaaaatacatatagaaacacaatattttaaaaaaatagaattgtattcttcttattctgcaacttgttacttgtatttaatagtgtgtcttgggcctcttccttgatcttcattatattttataatggtcttaggattttattgttgaccatcatgcgtgactgcctttcccatatcaatgaaagtttagattatatataacttttgtcttaaaaaaaccaatgttttgaggattgaacatcctggttcgtgtatcttggtacacttattctaagtatttctatagtatgaaatatttgaatttggactgctgattatgaggcctgcatattttagaatttgttaaaactgagaaattataatgatgagagtgtccatttctctgcaactccaccaacatcgttatcaagcttttaattttttctgataggtaaaaacaattcattttattgtatcaattctttgtcagtggagttttgcagcttttcatgtgtttgtttactatgtttctttttgacctttaaaagttgttttgtgggtttttgttgttgttgttgttgttttgttttgttttgttttttttgtctcgctgctgtgtatgcagtggcacaatctcggctcactgcaacctctgcctccggggttcaagcaattctcctgccccagcctctggagtagctgggataacaggcacccgtcatcacactcagctaatttttatatttttagtagagacagggtttgccatgttggccaggctggtctcgaactcctgaactcaagtgatccagccacctgggcctgccaaagtgctgggattgcaggcatgagccactgtgcccggctatgtgttatgtttttgctttttccatagacgtaacattttgtctcttatgtgcattacatagtttcttccaagatgtcaacttatagttcatttatggtctctgctttgtagaacttcaaaatttctctacaatcacagttatatattttttctgggttcatatgttgcttagaacacttccctatacgaaaaacatgaaaattttttttcatattttctttcataagtgtctatttacatataggttatttattactcttgcgttaattttgtggtatagtgacatagaggagtctacctttccccctctaatgaggtattgtcccaacacagtgttgcataaatcttttttccaaatgtcagcttttatcacttatcaattctcattgtacttgagtctgttttagattgtctcttatattgatcttttagtttataggaaagctgctttactttttttttttttttttttttttttttttttttttgcaacacatttttatctagccacattaccaaactttctttctggttctgatagtttttccattgatgtctggattttctaggcaggttatcatataatctacaaatagtaataactttctaatatttatacttctttactttcttgtcgtgctagaacttccagaacaattttgaattgcagtgatgatgggcttgcccttattttgtttctgactctaaagtgaagaatgcctttagtgtctcactgtttcatttactgttagtatataatagatagcctttatttcattaagaaagtttccttggccaggcgcggtggctcacgcctgtaataccagcattttgggaggccaaggtgggcggatcacgaggtcaggagattgaggccatcctggctaacatggtgaaaccccgtctctactaaaaatacaaaaaattagctgggcatcgtggtgggcgcctgtagtcccagctactcggtaggctgaggcaggagaatggcgtgaacccgggaggcggaggtttcagtgagctgagatcgcgccaccgcactccagcctgggcgacagagtgagactccgtctcaaaaaacaaaaaaaaaaaaaaaaaaagaaagtttccttttggtttatataaaccaggataattttaaaaattaaattaaagatagatgttgaaagtatataatgtgtgaattgtaactcaataaagcagtaaaaaatgaatgttaaattttttaaaaatggctttaaaaatattttggggattattatatattttttctccttattaataactacacttgtttttaaaatttggtaagaatgcttaacatgtgatctaccctcttaacgattttttaattgtataatacagtattgtggactataagtataacattctatagtcgatctctcgaacttattcatctggcttaactgaaacttttaaaatattcagtaaatcatgctgtgacagatgtgctgtcatccaggctttgttgttccatttgtagagtagaggcagagtagatttagcataattctgaaaaaaggcctcaggattttcaaagtggtaaatgaacattggcttcaaccgaaagtcaccagctgcattagtccataacgaggtcattcttttttggatttttcataaaaccagcttttggttttattccttatatttatgaaggttgttctccattttattaatctctgtttatatgtttatgtccttagtttttcttttggtgcacttttgttgtttttctgtgtctaaagttcacatcatttattatcaatcattattgtgtcctagtaaatacatttaaagttataactttttctttgaagaaaacgcacactgtatcccatgatgtgtgtagcattaccattaatgttgatttctgtgtagtctgtgatttgagttttgatcatttaatccaaaatcacttagaagaatgtcttaaaatgtctaactagttttaggccgggttcggtggctcatgcctataatcccagcactttgggaggccaaggcgggcggatcacgaggtcaggagatcgagaccatcctggccaacacggtgaaaccctgtctccactaaaaatacacaaattagctgggtgtggtggcacacacctgtaatcgcagctactcgggaggctgaggcaggagaatcgctggaacccaggagttggaggttgcagtgagccaagattgccactgcactccagcctggcaacagtgcgaggctctgtctcaataataataataataataataataataataataatttttaaaaatgtctaactagtttcttctgttgtatattttgcctttaaaattaacttgctatctattgagatggatgttcagttttagtaaatgctctgtgaggattttttaaatgttcatttcttatttaggggaagttcaaagttacatgttatatcatgttattaatagtgctattccaaatggtctagtacatcaacttatttttctactttatctgttttcttagaatgctatcttcacatacaacattaaaaatgaatttttcaaaattgtcttgtaattttaatagtgtttgctttatatagatagtgctgttgttcattgcatgattattataggattgtacttttattataaaggatattctttgctttacttagtggttttttgctgtaaatttttctttgtataaaattaatattgccacatctgctttcttttttatagattttcctggtttacctgtatttatgcttttttttaacatttttgtgacattttggtttaggtatatttctcattgttagattttttctattcaaattcctctaatacccgttttctaattggtgaatttaacccattttcatattaactgtgataactgctgtgtttgtacttctctctgccatctgattttatgttttctattcatcgtgcttttcaaaaattattttcttgatactcgctgaattgttagctatatcccatttctgtatttcctggtggtttctcttaaattattatcaaatgtattcatcttgatattaagaattcatcagcatctaaaacctgttaccaccaacgatagtagctaacagttattatttcctgtgtgtctgacagtattttaagcttcttaccagtattaactcaataaatcctcacagtcaccttgtgagaagggagtcagttattcccattatttgcagatgaggaaaccaataagaaggtaagtaattttctgaaaggcacacagctagtgagtagtggaggcagaattcgtactcaggctctgtacctagagacctgcttgcttcagcgctgagctgttggaatatttctacttgcccctgcctagacaccctctccttccaggttatgctgaaatttactttctagattgttgtcttatctgttatgttttaagaagtctctaaacacttacattaaagacaccagcaatctttggacttgacttcaaattttactgatttatttttccttgacatgtagaattggcatgctttctgggtgctttcttacctgaaaaaatggctttattttgccctcatatttgattgatagattggttaatagatatttatgggtttcattcaacattttgttgacattgcttctttgtgttctagcattgagcattacagatgaaaattcctatacagtttttctctctggaaattcataagcttctctttggcatatctcaactgccagcatcactgctcttgaactttggggccattattaagtcagaaaagggttacttcaaaacaagcactgagataccaccagagtccatctgataactaagatggtaactacatgactaacaggccggtgacgtatagagcatggatatgctggacaaaggggtgagtcatatcccaggtaggatgaagcagggtgacttgagatttcactattcagtatggtgcacaatttaaaacttaggaattgtttatttcttggaacttttcgtttaatgtttttggactgcagttagccacaggtaactgaaactgtggaaagtgaggattggaggataagcagagactgtggtattcatttcattgcacagtgcctagaatacagtaggtgtactataaatattttgtaaagggacaacttttctgaaactaaaaatatttatgttttacccaataatttttcttctggaaatttatgctaaggaaatattcagagatgcttacaaagttttatgcatgagtgtccatgttatttgtaattgtgaaaaatgaaaataactcaaaagtttaacagtggtcatctaaagtattgtatacactgtatatataggttgaatagaaggtcatcctattcatttattaatgagaggtacaatctctagggatctgtaaaatctattttgtcttaaccaaagaacaaatttttgacatatcttgaataggatgactataaattatgacttttaaattgttgtaatttttgtactattatctgatatttttatttttatgtattttcgtaagtagtttagagatagtcacattttaaaaatctaagatcaagcaaatgaagcttatttttatgtattcatagtataaaagaccttcagtaaataggtaatatttttgttttattctagaaaacagctccttgaacacagtgaggtaaagctttcattttaatctctggtagacttgtgtattaaattgtagtttgaggataattgacaaaggtataaccttgctgctgatgcaccttcagtagtgagttgttcagcattggtgataaatttctgctgatccttctcactctttcatctgctcttacttttgaatagtaataaggatttaaaagctagaaggctgatttatgactatagtacagaattaaattaaattgcattcatttaacaataacaagcattcagtttctagcctgctgagctaatcagctacagtccattagggcaggcacccttggccctgtgactggtggccatctgccaccacgtagatttgctggtcagtcagtgacaagctcagaagtgttgaaggatacacaagatactaaagtcatgttcctgcccttcagtatggtaattttacaaaggagacaaataagacaacattttatatggtgtaaaattattttgtggcataaaaaggaaaagatcagtgtgggctggaaatatttcctatttgatagaactttaagtgggtcttgaggtaaaggtcaactttacaggagtgggtaactgaatttgaacttaatagagatagtttatgacacatgttgagtatcccttatccaaaatgcttaggactagaggcttttcagatttcagattttattgaattttggaatatttacagtgtagttactagttgagcatccctaacctgaaaaccc

SEQ ID NO: 2645 - DNA, 1056 bp, Homo sapiens
cttaggttaggcaaagatttcctagattctttatccaaaacattatctatttttaaaaattgataacatttaaaccttttactctgaaatatgttgttcagtgaaggaaaagacaggctagactgaaagaaaatactggcaaatagtatatctaacaaaatatttatatcagaatatttaattaatgctcaaaatttaacaattaagaaaacacagcaaaaaattggtcaaatatttgagcagatatttcactaaagaaaatatatgttaacaaataagcacatggaaatatgctcaacatcatttactcactagggaaatgtaaattaaccccaatgaaatagtaatgcacactgaatagagtagctacaattaaaaattgaccatatccaggtactgtgactcacgcctgtaatcccaacattttgggaggccgaggtgggaggttcgcttgaacccagcagttcaagaccagtctgggcaatataggaagaacctgtctcattaaaaaaaaattgaccacaccaaatatttataaatacatggaggaacccaaactcaactacactgctggttggaatgtaaaatggtacgactaccttaggagaccgtttttttaaaagttaaacatacacttatcatataatccagccattctacaccttggtatctacccaacagaaaagaaagcatatagctatacaaagacttgtacaactcaaaacaacctagatatctattagcaagtgaataagtaatcaaattataccatttccatacacagcaatactactcagcaataaaaaggaatgaactatttatatatcacacaacatggatgactcttaaaataattaggctgagtgaaagcctgactctcctccttcccctccccaaagtacataatggattattctatttgtgtaaaattattggagattcatactaatccacagtgacaataaaattattgattacttggagagggaatagctagagaagagaactttggggggtaatggatacgtttattaccttgattatggcaaaggtaca

SEQ ID NO: 2646 - DNA, 1914 bp, Homo sapiens
ggaaggatttgcggacgcacgctcttgaacgtgcgtgttctcagaactctgatatgtgtgtctcggcagctgacaccacgtgtccacatctatctttgcagactgccccatccagcttagtgaacagctgataaatgcctgtagcaagcagagcgaggcagctgagccagaacttttacaaatgggagcaaacatctgccgtggttgctcgtggtagaggggctgttattagtgttattacagttggggatggataaactgcggagcctcagatggttctgtggagatggaccaacaatggcaccacaggtaagaagaggaaaggcacacccggcagccactccctcttgttcaaatgttgttctcttggttgtttgttgattctcccattgtattagttcattctcacactgctataaggacatacctgagactgggtaatttacaatggaaagagatttgattgactcacagttccacagggctgaggaggcctcaggaaacttgcaatcatggtggaaggagaagcatatgcatccttcttcacatggcagcagcaaggagaagcacagagcaaaagggggagaagctccttataaaaccatcagatctcatgagaaacgcactatcgcgagaacaggatgggggaaactgccccccatgattcaattatctccacctggtccctcccatgacacatggggattatagggactacaattcaaggtgagatgtggggacaggcacggtggctcactcgtgtaatcccagcactttgggaggctgaggagggcagatcacttgaggtcagaagtttgagaccagcctggccaacatggtgaaaccccatctgtactaaatcccattagtatataaattagtctggcataaaatataaaaattagtctggcatggtggcaggcgcctgtagtcccagctactcgggaggctgaagcaggagatcacttcaacccagtaggtggaggttgcagtgagccgagatcacgccactgcactccagcctgggagacagagcaagactccctctcaaaaaaaaaaaaaaaaaaaaaaaaaaaaaaaaaaaagaaaagaaaagaaaagaaaaaaaagaagaaagaaagaaaaaaagagatttgggtggggacacagccaaaccataccacccatcaaagcagggcactctcttccctcacctgctttacttttcctcaaagcacccaccatcccctctggcataaacgcctggatttattcccagtccccttcctggaacatgaaccctaggggaggcttccgggatgttctgctcacacatgggaggagctcaaagagcctttgttgattgaatcgatgatagacaagctatctcagaggaagatttgaagtgactgggagctccttctcaaccctctccctgagacctgctcacagagcatgaagtctaaattctggctctgaatgagtctgagcaacgcctgagtgcccagcaacctcagctaagcacagcaagtttcggtttgtggcttcctccctgtgccgagcagatcccatccttggggagtccccagccggtctccacagtgtccagacaccacggttctcatgaggctctaccctccctgacttccactcatccaagggcctccaagtcttcaaggccagctcaggcccagccctccaagaaacagtttcttctgatgacaccaacccatcctgatgtttcctgattcccagttcctatgggctccaggcctattgcagtccagggctctgctactgaagctctgggtctcaccaagtgggaggtatgactgttcatgggatcaacagaccccagagtccaaggtccagggctcttagattaggtagaatctggtaagatagtaagatactaccagatactggtcaggcgtg

SEQ ID NO: 2647 - DNA, 5193 bp, Homo sapiens
gtggggtgggggcggggcctggctgggcgccgggacgggaggagtcccggcggcgcctcggacttttgctcccacaagtcctgcctcggaggcgggggagctggaccagcagccgcctggagcgtccgagtcaccgtcgccggggctcccgcgctccccagaacggtgggacgcggggctcggcagccgccagcggaacatggcgccctggacgctgtggcgctgctgccagcgcgtcgtgggctgggtgccggtgctcttcatcaccttcgtggtcgtctggtcctactacgcgtacgtggtggagctctgcgtgtttctacttgtccaattctgaaaaggaacgttatgaaaaagaattcagccaagaaagacaacaagaaattttgagaagagcagcaagagctttacctatctataccacatcagcttcaaaaactatcagatattgtgaaaaatgtcagctgattaaacctgatcgggcgcatcactgctcagcctgtgactcatgtattcttaagatggatcatcactgtccttgggtgaataactgtgtgggattttctaattacaaattcttcctgctgtttttattgtattccctattatattgccttttcgtggctgcaacagttttagagtactttataaaattttggacgaatgaactgacagatacacgtgcaaaattccacgtactttttcttttctttgtgtctgcaatgttcttcatcagcgtcctctcacttttcagctaccactgctggctagttggaaaaaatagaacaacaatagaatcattccgcgcacccacgttttcatacggacctgatggaaatggtttctctcttggatgcagtaaaaattggagacaagtctttggtgatgaaaagaaatattggctacttccaatattttcaagcttgggtgatggttgcagttttccaactcgccttgtggggatggatccagaacaagcttctgttacaaaccagaatgagtatgccagaagtggctcaaatcaaccttttcctatcaaaccacttagtgaatcaaaaaaccgcttgttggacagtgaatctcagtggctggagaatggagctgaagaaggcatcgtcaaatcaggtgtatgaaaacattatagactggtattttcaattttcatttgcaagaaaatgatcagtggaatgaaataactgaagtataacagaagatatattttttaaaacggaaagcctttgtacagttcctgggattcacagaagcactactccagagcagaatgatgccttaatcttaagtgtccatttgtgcagcattgacttagagctacaaaagtgacttaatgttattctggaaataatacttacctgttatgagttgctataatatgagctgtcatcacattttaacatgcatatgtattttttgatacctgaattacattattagaataagtatccatatacattttcactccaaaaacacaagcttaaaaactttaaagtacatctagggcaaatggtggctgaaagtgaataatattcaaattactgttgcttgtactgtataaggaaaactgcttttttaaattgggtatttgctaatttataattactattttatacttttcaacatttttaataactttttttattgttggctataacagaaggattcagatatctaaatatcatttagaacatagaacacattggtctaattcatcgaaagcttagttatgagcattaatacaaccatgtagtagagcaagtgcccaaggtttaaagggaacttggcagtataagaaatattttgggttctctctgctattttatagctttttttgttgaactttcaggggtatgtacatgggcagagaaacacaaaggtacatgtgctggagaatactggacacagtaggaagaagtataggtgtccagaagaaaatctaagaggaatattgtaatttgttaaaaaaaatagttttgagttttaacagcagttagaataaagcatgctgttgacttcactttcaaatttcagtgtaggtaatgactaaaaattactttgaaactttttacagtaatactgtaatagcttaaacagtgatttaaaatgcaatttaaactaggcaaaaaaaactttagagtaagttttcctcctggctgtcagttggaaattctaacctgagtggtcattttacattcccagtctcttgagaagtggattctactcttagacgcacagtctgaagtctgacttcctaacggcaacccctttatgactagacacatttctcctttttccttttaaaatctaagcgacaggaggtgttgcattaactccaaggaaaagtacagaataaacaatgtagaaatgtcactcctcatttacaccttttagacagacagacacacacacacacacaccccccccaaaataattgattgcttccagtgagtgggtggagatgaatctcagcagcatctgtgagtactacaggttggagcttcctgtctgtaaaatgggactgcaggggagggggtgttgtgaataagttggactggatgacttctaacattctgtgatgcctaattttgcaaaatcacttttcattcacccaataaatttttttcttcttttttccacagagttttgctctgtctcccaggcaggagtgcagtggcgggatcttggctcgctgcaacctctgccttccaggttcaatagagtctcctgcctcagcctcccaagtagctgggattacaggctcatgccaccatgcccggctaattttcacatttttagaagagacgaggtttcaccatgttgaccaggctgatcactaactcctgacctcaaataatccacccacctcagcttcccaaagtgctgggattacaggcgtgagccaccacgccccgccccggtaaattttttggagtaccttctgtatgctaaataataaactaggaatagctctgtcatttcctagtacagcataaattttatggttgctactgtaggtttataatttgtttataatttggcctaatttccatcagccatactaatattggattttaaaaggaggcaactttttttctttttgaaccaaaggaatgagttagctttgaaaacataatttgggatattatagtatggattcttctacctttgtttcaactccttagtaatcttgattctagcaaactagaatgagatttaagagataccaattattgctgggtgtggtggctcatgcctgtaatcccagcactttgggaggccaaggctggcggatcacctgaggtcaggggttcgagattagcctggtcaaaatggcaaaaccctgtctccactaaaaatacaaaaaaaccccaaaactgtccaggcatggtggcacacgcctgtagtcccaactactcgggaggtggaggcaggagaatcacttgaacccaggaggtggaggtcgcagtgagccgagatcgtgccactgcactccagcctgggcgacgagtgaaactccatctcaaaaatatatatatatatcaattaccaactaaaaacataactccagtttggcagtttgcatattataaggagataaatgttaaaacatacttgactactttcagaaatgttctcctggtactttttgcatttctacattcagataaaaagatttgcatgcacctggctaacgccaagggaacttcatttttttcttcactattatgcactttcatggtatagtctttctcagttcttttaatttttgttatttaacatctttaatagcacagcaaacatcttttcagaaattttcagttaaagcctttgaattacttatctttgatttaatttacagccagcattttgccacgttctaaataatatttagctcaactgattcatacgtattaatgaccattctagcaaaggcctacaagtggtgtgggaatcagggaaaggctgcctctttggtatctcaactggtattgattattgctatcaactatttggggagaaaaaatcaaaatgaagccctgtcaaattttagaagtactatctttggtccttcaaacactttgtgatgacaccttaagaaaaataaagttgaagttcaggtcttgccattgccattacagacaaattaggagacttggtttacctgggaacaaatttacttgaatattcagtacctgaaactatgccaaaccaaagagcagctgcagtacattcgttattttaaatgaacaagtttacaaagtttattttcatctatacgtaaggatgatttttttaaaactttttacatattagtggttatgatccaatgtgtcatgagtgaatttaactgtaaggtggtttaaatcaaatatgcaatgtttacttgaattgtatttctattagcagattttgactatgtttacaggacggtttaaattaaggattatcaggcatgtgagatctttcagttatctttaaagtagatgtatattaagggcttagatttaggatctacatattctgggcattgaataggcagtaacttacaaataagttttgcttaccttttgttctagggactagcactgctatcaatggaaagtatttttaactaatctgttattaagaaagtcatatttttgcatttcagccaaaataaagaccgcctgtaataatctgttagaaacagataatacatgtctgaaatccatatgtttcatatgatctaaactgtattttccaatttaaattaaaaatgtaatatagattcagaaaggttcatatttttctaatgacttcattctatattattttgttaggttgcataaagaagcaaggaattgtacttgtattaaaagatgaagaaagctattaggtatatttgtacatgactgcaaatgagtctatgcccgtttaaaagaaaagatggacactattttaaagtgagctttaatatgcttttatataaacaaatttgaagtacagtttagtttggttgtgtttacctaacaagtaccataagccttgtgtttgttcttatttgtataatcctagcctgtgacttaatgttgatgctttgctttgtcttttggctggcctaacctacattgacatgtacacagaacattttaaaactttttttttcaaaagtcataatgaattactttattaataaac

SEQ ID NO: 2648 - DNA, 9945 bp, Homo sapiens
ctggattaggccatcatgtgcattaacacacttggctgtgagcactaggtgcagccaagatgctgatgggaaagaaaagtctaggttttgccccctgcgtcgttcctcgtgacaggattatgctgagggagggcacattagattgactcacacatactgaaatggtcatagttattgaggttacccagtttccaggcctgaactagtaaacccagcaatgagaatcagccagcattagcaagttttccgtgtgggagtggggtgggggtggggactggagggagcaggcgctgaaccaggaaaggaggaggatgctcatcattggctaaagatccatgcctggaaattaacggcgttaaagtgagacttgcttcaggttccaacccggtaaggcaaatggagaggctgtcaggagaccagaagtttacctcagctattgcaccgacgcaccacgtgctctggtgcacatccaccgcctcttcctgcctcagtttctccttttgtaaaacaacagcttgtaaaggcctggggatcttctcatccacgggagttttctaaggatgcaggcgaaagaggatctcactctgttgcctaggctggaatgtggtggcatgatcacagctcactgcagccacaaattcctgggctcaagcaatcctcctgcttcagcctcctgagtagctgggactataggcaagcgctactgtgctcagctctcactctctggctgaatgtagaggactctgaaggcttaggcaagaggggagttataaggcaccacagaaccctgaatgactgcatggagcagaacccttcgcaaacctgctcttcaggcctcctttttgagacagctggaaaagattctttctccttttctagcaattacttcctccctccgactcaaatgcctactcagcctctagtattcagtgatctcacacgttcacccatgccggagtgcagctgtatgatcttggttcactgcaacttctgcctctcaggctcaagagatcctcccacttcagcctcctgagtacctgggacaacaggtacgtgccaccacgcccagctaatttttgtattttttgtaaagatgggattttgtcatgttgcctgggtaggtcttgaacacctgagctcaagtaatctgccctcctcaaagtgctgggattataggtatgagccactgcacttagcctactcttctactccttttttttttttgagatggagtcactttgtcacccaggctggagtgcagtggtgcaatcttggctccctgcaagctccacctcccgggttcatgccattctcctgcctcagccttccgagtagctgggactacaggtaccagccaccatgccctaattttttgtatttttagtagtgacagggtttcactgtgttagccaggatggttttgatctcctgacctcgtgatccacctgcctcggcctcccaaagtgctgggattacaggcgtgagccaccgtgcccagcctactcctcttaataaaagaaaaaaggtatagagtaatttatgccatagattattaatgataccaacaaagcttgtagagggctaagagagataaaagatacatggaagcattgtctgctagaggaaaagaaatagacattaacttttaaaatattgatggtttacgtgtagctatgtgtcttaataacttaagaataaccccaggatattaaaagtagaatgcataacttctaagcaacgagaaggaaatttgatctatctaatgaaagttgagaggaaaaaaggggacaaatagaagttttgtaaatggaaacacaaaatgtggtagaagtaatttctaacaaaggaggaattacaataaatataaatgaattatcttaccagtcaaaatcaaaagcagatcctttcagattggattaaaaacaagatccacacttatgttatctgcataagctgcatttaaacaaaagcttacagaaagattaaaaataaagacataaaatgacatcagacaaatatgatcagatagcaaattaagatagcaatttcaaaattggctcattagaaatggagacaagttatcattgtcaaaaatcatagatttaatatattggcaacataaacaatatatcaatgtaccttatgttttaaatacataaagcaagaatgacagaactgtggtgaaataaaggcaaatgaatagctgagctagagagtctttaaaaattgttagtttaaacagataaaaaagaaaaagcaaggacataaaagttgtaaacaagaacatttagaaggaaatctggtgctttaaatacctctaaaagaataataattaaatacattttccactgaagaagctaaggtgaaagctctttacaccaattacacaacactgatgaaagaaatcagagatgacaccaacaaatggaaaaacattccatgctcatttataagaagaatgaatattgttaaaagagctatacttcccaaagcaatttacagattcaatgctatttctatcaaattaccaatgtcattttccgcagaattagaaaaaactattctaaaatttgtgtggaaccaaaaaagagcctgaatagacaaagcaatcctaagcaaaaaggacaaagctggaggtatcaaactaaaaaacttcaaactatattacaaggctacggtaacaaaacagcatggtactagtataaaaacagacacatagaccaatggaacagggttgagaacccagaaataaagccacacacctacaaccatatgatatttgacaaagtcaacaataacaagtaataaggaaaggacttcttacttaattaatggtactgggataactggctagtcatatgcggaagattgaaactgaacccctacctttcaccatatacaaaaattaactcaagatggattaaagacttaaatgtaagacctcaaactataaaaacctagaagcaaacctaggaaatatcattctgtacatcaccttggaaaataatttatgactaagtccccaaaaacaattgcaacaaaaacaaaaattgacaaatgtgacctgattaaactaaagagcttctttctgcacagcaaaataaactgtcaataaacaggcatcatacagaatgggagaaaatattggcaaactatgcatctgacatatgtgtactatctagaatctataaggaacttaatccagcaagcaaaaaccaagtaaccccattaaaatgggcagaagacatgaatagacacttctcaaaagaaggcatacatgtgaccaacaaatatattaaaaagtacatcactattcattagagtgaatcaaaaactacaatgagataccaactcatactagtcagaatggccattactaaaatgtcaaaaaataacagatgttggggaagttgcagagaaaaggaaacacttatacactgttagtgggaatgtaaattagtgcatctagcgtggaaagtagttttgagatttctcgaagaacttaaaacagaactaccattctacccagcaatccccttactgggtctatacccagaggaaaataaattgttctaccaaaaagacaaatgcacttgtatgttcattgaagcactattcacaataggaaagacatggaatcaatctagatgcccattactagtggattggataaagaaaatatggtccatatacaccatggaatattatgcacctatgaaaaaaaacaaaatcctgtcctttgcagcaacatggatggtcattatcttaagtgaattaatgaaggaacagaaaaacacatactgcatgttctcatttgtaagtgggagctaaacattgagtacacacagacacaaagatgggaacaataaacatggggaccactagagaggggagggtagaatggggctagggttgagaaactactagtgtaaaattagtactgttgggtactatgctcactacttgggtgacaggatcatttgtacaccaaatctcagtgtcatgcaatttacacatgtaagaaacctgcacatgtaccccatgaacctaaaataaaaattacaaaaccccactaatgtgtggaaaaagttaagggaatggacacccatgaagttgagataagttataggagataaggaagctataattgtttgcatatgtaaaaatataaaaagagcaacaacataatgctatcccagacaaaggaggaataataaaataataaagataatataaaattcaagaaataagaaataataacaccatatacgtgacaacagacaaataagtttgaattctttggaaagatgagtaacatatacaggtatctggtaacactggtaacaaaaagttgaaaattagcaaaatatagaataaaaaaggtgatgtaaatttagatgtaatgtacagatggataattatagatgtaatgaagattataaagacagtaaatactattaatgagatctataaaccgattaaatgaaaccaaatcattttttaaaaattccagaatcagcagaagaagaaataaaaaatttgaaaggtctaaaaatcataagataaactgacatagttatcaaaaaagtccccattcttactcctactcctgccccaccaaaatccgaggcccaaatgatttataagtgacttctgaaaaaaaaaacgaaacaaatatttaaaaaaaaaatcaccctcctttcctcatacaagttgtcctagataatagaataatagaaaaggccaaagtgccttaatcattctttgatactcatgaaacagtaattatttttacttgataaaaatattgtctataaaaaattatagaacaaatttatttataaatttgtgtgtaaaaattctacgaaaatcattagatcacacactaaaatattatttgagaaaagaaaaaaacatgatgaacatgtatgatttacctcagtaacataaggaggatttcatatcagaagctctatcaatgtaacagtagtaatttactaaggaaacaaatcatatgtttagctcaatataagtagaaaaattattaaataaaatgtaatttctgtttataatacaacttttcacaaaatcaggcataaatgagaaccttattaactagttaaaggctgtatatgaacaactttcagtaagtattttttaaagaagaaacttaaggtatatttaatattagacaagaaaacattatgtcgccactactagttaacctagtactagtgggacataaccaaatataatgaaacaagaaatacaatgagatatcactgctggaagatgaaagagcttcagatgatttaatcatttatggaaactaacagtcttctccaagattttgtatacaactagtaagagtatttctggataaaatatattaaacaaccaacaatattttctaccagtagtaaattagtaagatatatccatcaagtataatataccagcaaaactttaagatataaatatattaacctattaagaagtctaaagattgttttggagaaactaccatctctatcaaaaggcatacaagatctgaatgaatacagagataaaccatgttcatggatggggcaacttagtattttaaagaggtcaaattttgccaaattaaataaaaaatgtatagaattccaatcaaaacttatacagagaaacttaggtctaaaatatattgtgaaaaacaaaagtccataagtaaatgataattttggaagagcaaaaaggaataccttccctaccctctattattatataaccataaaagaaaaaaaaatagcctgccacatgatcagacaagtaaaacaatgggataaagaaccataaaccgtcccttatggaatatggtataaaattaaggtgactattttaatttgcctgtgaaaattttactgcatttatgcctattggcctagcaaaattaaaaataatgtcctcttttacttttcagtttggaatatattgtatgatgtcttcatatataatcaattgatataataaatcaatggaggaaagataggctttttaaaagcatatagtattggcaaaactggcttgttaaatggagaaaagtaaaatttgataaaattttgaattaaacattagtatgtaaaatgtaaagataaactggtgagaaaataatggaaagtaccttggcaacttcggggtggggaatgatttctggaacaatactcccaaaattaaaagtataatgggaaaaaaatgaatggatctgatacataataattatgaatttctgttcattgaaggacactgtagataaaggtaacagatgggagacagactgggggaagataattacaacatttaaaactgacaagggattaatacctagaataattaagcaattcctgcaaatcaacaaagaaaagagagtaattggcaaaaaaaaaaaaaaaatgaatagacaattcacagaagggcaaacccaaattacttacatgctcatgaagacatccccaacatcataagtaatgagagagctataaattaaaaccataatgagactcattttacacccatcagattggtaaaaatgagaaagtcagatggtatcattgttggcacagatgtgaaaaaatgagaatcctcatgcactgctggtgggagtggaaactggtgagccattctggagggcaatctgttggaagtatatgtatatatataccccttgacccagaaattcccggagggaaacctatgcagggtcacatgtgacatatacaaggatatagctatctagatgaaatagcattacagtttgggtagggaggtgttgctttatggaaatgttcagaaagaaatggagcacagtgaacccagagctggctctctgtaggcttatattctttgctgaatcttcagtaagaagaaagcaaaggttacttccattccaccccagtcctaggcattgtcaaggcccaggtacacccttgttcctggcactctccaaactttcagggccctgttgtgaaattctctgggaagttaaatacatgaatgatgttagaaattgaaaggagcattttaaaaaatgagggttaccacaagatgagggcaacgtttaactgaaaggggaaaatgatacaatataggtttcagtgatagctaaacaacagaaatctgtgacatcactgagtgcagacacttagaggccccaacagaaatttggagacctctttagatctttccttctgtgtagtgaaaagaaagcaatttcataagagaacatgacagtgaacatttctattgaaaaccacaaagtttttgcaattttagcagaagtctagttttgaagatcaaatcattgagagagaatgtacacttgtttttttgtcatttactgaaagccagaaaaataggtgaagcttgtcttaattcagatggcaccttggaaaggagatcattctgatatcttcttctcactcctatttttttttttgacttttcaaagagcaacagaacattggagctagaagtagcctctaaagttaagtaacacagctccagtctgctatggaattcttcctacaaacatgcatttccttatatgtaaacctcaagaatctactggaaccagaccattgatccattactttaagatacattactccttccttaagggagttatgtaagctctttctatagaggctatgcctggaaagctgcctccctgacaccctagggccaggttataactcttggacctagcttgcctccactaaactccaaatttgggggttacattttttataagtcatgttttctcttgaatggcctcattgtggtagatgaaagaaacgaattttaatgaaagtgaattaatcttaatgaaaattaaatagacttttatgactccttagacatttaggaaaacagcgaaatattgaacttctatcccttctttagccatcctcctagttatttacaggtattcccagaggtatacatgatggacaaataagcctcctcagttttggttgccaaaatgtttgtttccctggtagtttcatcactgttgctgctggtggtattccccatggatggtgccaagagagttataccaagggttctgtcttctcttgctctcaaaataccacctcaggccattgcttggcttcctgctgtggctaaggctcttggcatctctcagtgggagcacaatgccattctgtccaccattaagagtactgctgttcttgccccctgatactggtgctacttctgctcatatcttctgcaatggaaaaaacccctttctcccaaccttgtaccattgtctgttacactggtcccacagtggtatgatcccttactctcaaagtcttaaagaaacgatgggtaaaacattccatccaggttgttttctttccccatgatttgggcacaagtccctagggactgagccacgagatgagtcaaagggtggtcctcagtgtcattcttcctctattgctcagaggcacttttcaggcatctctgcctgggctttggcagctattccttagattgacttacttcccaagaggctcctcaagcctgttcagccctggtcgcccctccacagtcttctggtctttccctgactgtttccattttaggctgagagcacctgcatcttgaaccagggtgcctttgcactttagcctggataacatcacagctctagatttggtgaaaggaaacagaatcagggaacccctgagccacagccattttaggatgtcgctaggctcctctacttcctctttccttattgctcccaattctttgcttccttcttgctaagttggaaggagcccacctccccctagaaagaggatcatttcataagctggattctcatgtagcatggtcattgcattccttaaactcacctctaggtcccaaatgataaactaaaagctgcttgagttattcaagtaacaggaaaaatatagtattgcaactaagaatctgaactttgaaatcagagagtctcggattcaaatcctggctcttccctttctggctgtatgctttgggcagattatttaacaactctgagcctctttagcacgtacttcacaggactattgtgattaagtaagcactcaatgtgtgggagatattattgtttctaattagggagcaaagcaaaactgcacatggggcatgggcaaggcactcatggcttcccttctcaccccatgtggggaggtggaacaagcttcctagtcttagccctttactcagatgccagcaattttctgccatgttacctggtgatggggccctctggtggcaggagagaatgtgatttctttttgagagaccagcttgcccttagatctgctttcaagtggaggcgaagggttggggaaaaccccagcagattctgaaactgccatgcacaaaggcctcagactcagatgctgagctgtccctgttgctgcagaactgtttatttccttaggatgttgaacgtaaaatatacaactagacactgccttctcttgctctcaaaataccatctcaggccattgcttgagcctcacccaataatttggattctgatatgaaaatcaacttccctacctccagccttaggatgcttctgtattgttaatgccaatgttagcagcttgtttctgaatcattggggagctctgtaaacacatgttgatgggaattgacctatcttcttaaggttaggtccttaagaagccctaaacattgaacaatgaaaatatcctcaattttagaaattaaaaaaaaatctgaaattataaaacaagtattaaaaagtcaaagaaagataaacttttagctataatgacaaccttaacgtccttttttgaactatcaagaatatatttcttttccaatttcagcttttttggttaattttatttttctagtatcttacct

SEQ ID NO: 2649 - DNA, 992 bp, Homo sapiens
tggcaggaaattagtgagaaagccgttggacttcaagaggtctggaggctgggaatgaggagcatttcagtggctaactgcatggatctttgggaaccaaataaaacaatgaccgtttcagagactgttgcatggctggtaacccaaggctatctttcatcaaatgtctttagtacactctcaagaacttagacctaatgcccatggaaattgtaggagaaaggaggccaaaattgcctgaaattaagtattgttctcttggtttttaaaagggaaattagattaattgtggttagaagtaaaatttaaattccctagagagtagcttaattcttaacatacaggaaaaattgccagaggaatctttacacatagatactcagaggatcatctatcaatcagttgtacttcttgggacttctagtgtgatgcacaaggtggatctcttagaattgacagatattttgcctctttctctgtgtaaattagggctggaatgggaggagcagccaagagatttcatcagccacagtgtgcatgatggatgagaacacgggacacataccagtgaagggcagaaaatgttacttatcgacactggactaaaaaaagactgtgcgtaacccatagataagccaactcttattgtgataaaacatcagacaaatccaaattgagaacattctacaaaatacctgaccagcactcctgaaaactaccaagcctctcaatccatggatgttcttttacttggtcatcctcaccccatggttcaagggtatatgacttattaagagtgaaaatgagaagaggaggtggagcaagatggtcaaatagaaccattcactgatcatcctccctgcaggaacaccaaattgaaaaactatctacataataaagcaccttcataagaagcaaaaatcaggtgagtggtcacagtacctgattttaacttatatccactgacagaggcactgaatggggtaggaaag

SEQ ID NO: 2650 - DNA, 993 bp, Homo sapiens
tggggcttgtgccagccgcggccgccgaggcccgtgccccgcggggggaacagatgaagcacatctggacagctgtgcggcctcctcgcgggccgacgtcagccgagcacgtcccccacgtcctctccttctcgccacttattatttattcgttttcccaaagaagcgactagggacccaagtttaaaaattcctccccccacccaatgcgagacgtggccagatcccatccaacacacggtttaattttcatggggctctgggatcaaaagaacagaaacagcaacaacaaaagcccagccgctgtctgattttaagctggcaaagtgggaaaaataaagtgttgagtaaacagaccaagttggaaacttttcagcattacctaagaagcaaaggctcaattttggctgcttcattcttatctcttctgccacagttctaacgtgcctgatctactgagaccaaggatgaccaatgactcagaagggaaaatgggatttaaacacccaaagatcatggggaatttcagaggtcatgccctccctggaaccttcttttttattattggtctttggtggtgtacaaagagtattctgaagtatatctgcaaaaagcaaaagcgaacctgctatcttggttccaaaacattattctatcgattggaaattttggagggaattacaatagttggcatggctttaactggcatggctggggagcagtttattcctggagggccccatctgatgttatatgactataaacaaggtcactggaatcaactcctgggctggcatcatttcaccatgtatttcttctttgggctgttgggtgtggcagatatcttatgtttcaccatcagttcacttcctgtgtccttaaccaagttaatgttgtcaaatgccttatttgtggagggtaagtgttagtgagtattttcatgtacctttctctattagtgagcatttatgtagcccttcatattaatatacc

SEQ ID NO: 2651 - DNA, 992 bp, Homo sapiens
ttttaacaaacgtacccattgaatacagtgaagctggggaagcccagcccaggagcattgcctcactgggtcagtcccactgctgggctaggacacctgtggtcccttcttctcaccctggagctgtgtctgtgtgaggggcttgcccctaagccagcccacctggcaccatgaggcccctgccttatacaacggcgagtcgccccagttcgccattgcagccccggacgtgcgcctcccgcggagccgctcgctctcctgagtcggagtcgggaacccggcgtccgttgccatggcgactcccagaagggaaagtctccatggtaaatgaaggaagctccagtgctgcccccagctggactctgagaacgctggcagttggggtcctatcacacaagtaagagattggaagtctcctcgctatcaaggttgaaaagacccagagaaaagacccaaagacaccaacactgaaggtctcccagtgaaatggcccagttaggccacagcatcatgaggctcacagttggctttcttcacctccagcagaatacaaaatcatctttttagtttccaattcttaaatataaacagattgcaaagaatcactggatatttgagaaaagcctaaaacacgatggacagaagaggaaccagcaccaaggaaaacagaagaaaaaataacttggaagaaacagagactatgcacaatataaaaacttgaaaaacgtcatcattaatcattagtaatactctcagaccgttaagagaagacgtatcactggcctgtgctttgggatctggagataatacttagcatcagctgggtgtggtggctcatgcctgtaatcccagcactttgggaagccgaggcaggcagatcacctgaggtcaggagttcaaggccagcctgaccaacatggggaaaccctgtctctactaaaaaacagacaaacaaacaaacaaaaaaacacaaaaattaaccgggcgtgatg

SEQ ID NO: 2652 - DNA, 8240 bp, Homo sapiens
ctcaacataaaaaatatatatatatgtggttacagccaaaaggaactgtttgcttgcaatctgttcttcctggcaccctgtatgttccatgagagataagcatctactgaagcataaaaagtgtcttacaaaatcatagtaagtaaatcagtcactacattctgtattatcaatagtcctgggtgtcattaaggttctgtctgtatagaaaagattaggtttgtgtatatgatattctcctaaagcattttaacataaagtcatggtcactgaaatctgaaaatattcacatttcagtcttaatcaaatctagtacctcaggatttttcaatcatattcagaaagttcaaccatttcgatgtgttagctctagctctaagttcccaggctgaatatccagtggtctagttgcataaattattgtaatttgggcagagaattcaaactgtttgtaaactcaatttcaattgaaaaataccacaatgtcactaataatcaacacttaaattaagtaatcttcagccccacagcttcctcagaacccccaaaagtaggatgtgtaatctaaaaagattcattgagcaaatatttatttgtgctatcaaagaagatggcttcccccaaaagaattcctccaaatgttaaagttggtaattttctgcaggattaatatgtagcacaatcagaaaaaacaaaaacaaaaacttatataaggcagcattccctaggagagccacttggcagtcctgcctgcatgtgccctacatgagaattccatgcttcctctgaatcttcacaagcatatcatttaaattaagagcataaatgaggccacataaatgctttcttttccagtttttttaaaatttacttcccccttccagagcagattgcaacagtctggtataattgatcttgtccacaaaaaatcgaccgtaatacattaaatagttctgtaatgtggcaccgttaaaaaggatctgcttcaaatgactgtgaactgacaaggaaagaaaatgttatatagttggctgggcgcggtggctcacgcctgtaatcccagcactttgggaggccgaggcgggtggatcatttgaggtcaggagtttgagaccagcctggccaatatggtgaaaccccatctctactaaaaatacaaaattagctgggcatagtggtgcacatctgtaatcctagctacttgagaggctgaggcaagagaatcgcttgaacctgggaggcagatgttgcagtgagccaagatggcgccactgcactccagcctgggcaacagagcgagacttcatctcaaaaagaaaagaaaagaaaagaaaatggtatatagtttaccaacaggtagcctaagatagttatatgcagtgattaacgattacaaacatacaatgtggatactgataatcatttttactgccctcctttaaggaaatggagaaatgtcaggagacaaggtacagctgaaaattttcctccagtttgatctattctgcaaatctcttccatccttgtccaggttattgacactatttccgcaggattttcaggctgttcttttctcatctggactattccttagagcaggaattttattactaatctccaaactacctctcgaatattagaattattcacattccaaattataatacaaagatttcagcaactgctctctgatgatattttttttcttccagtattgtctgttaaatatttgaaggcaggtacacactgcctcaggaacaactctgtcctctctccaaatgctccagattcttctctccctcacagccctctttaactgctgtaatctgtaagatctactcttcgggcaagcctctatgtttaagaaaacactttcaggccgggtgcagtggctcatgcctgtaatccagcattttgggaggctaaggcgggcggatcatgaggtcaagagattgagaccatcctggccaacatggtgaaaccccgtctctattaaaaatacaaaaattagctgggagtggtggcgtgtgcctgtagtcccagttacttgggaggctgaggcagaagaatcacttgaaccctgaaggcagaggttgcagtgagccgaggtagtgccactgtactccagcctggtgacagagcagagcaagactccatctcaaaaaacaacgacaacaacaacaacaacaaaataagaaaacactttcagttgggggtctgctcagatatggtctaaatggcaggtgaaattgagacaattacttggataaatcaaatcacatcctcctacgcaattcattcgaatatattcagtcattaaacaaatattttttaaagaacctattacagactcaatattatgctgagtgctgaagagaaaatggtgagcaaaatcaaataaagtccttgccctcatgggtaacagcctaatggtgatgatagccaacatttattcactgcctattatgtgcatgaaacacttttcatgactcctgtcatctaactttcagcaaaataaatatgagttattagtacaaaaaaacacaccatacagagacaaaagaagttgtgtgtgtgtgtgtgtgtgtgtgtgtgtgtgtttgtatttattttaaataatcaacccttttcctgcttttccccagaatatatgaactcaagtcttctctagttcgagaacagggctgggggtgatggcagggggttgctttacattgctttgtattggaatttgtattgtccagggggaactcattaccacctatagatacatagccacttgcccatgttttctcagctatttagcagacacaggatttgaacccaagatttcacattcaggagcttatgctctttcttactccactggcacacctgtgtacccctacactcttctgcccctaaggtagataaatagagaaaaagaacaagaggggtgatatggcaaaagtatctcaatagttgcatcaattctcctttgctttgtgaattctggatgaaacaaaggacaactataataattcttgcttgctcttctctttaaacatgtagtagtcctatttgagaataagtgataatgacaactttttagaaaaaaatctacatgacccatcattaaatgggaaaccatttttttcagaaaaaaaaaattgttataatggagattacaataagatgcctacagaagattcccattgtgctatagtctaacttaaatcacaaatacgcatttatattattatatcattaatattagctcattgaataggcatttattgagaatggactataagaagagctatatgttaagagacatattcattcagacagacattgcttattgtccacaacaacgatgacttttaaaagtaagaagaggaagtaaagtaaaggggcaggagtgagtagagggaggagtctaaggtgacaaccagctttctgacttaagctgctatgcatcctgaggccactggaagaaaatctggtttgagatttattggaggttttttcttttcttttctttttttgcctttttgagttttattttcttttccactttgagggtgttttgttttgtttccatcggatgctctagaagaggcagagtgctcattggaggttgacagtgtcataacccttgtctgattatctcgattttatgagcccaattaaggatgataaaatatgtgttttagagatttctgccatccttacagccccttaccatccctaaggatacttctcctgactattaatcacattttaatttttttctcttttcagtacaattatgtgagtttgtgttattgcatggccatgcctcagtggtctacccttccttcacaccacttttctatagggaaaccaaaggtgcatttataccataatttagttgaattcagcagtagttacaaatgatgttattaaaatctattgggaaaaatgattcatcttgattcattcaaaatgattcattcaaaaacagaggacaaaggaatgtggggaagttaaatgatatatcattgaataaaggcacttcagaaagctctctgtcttcataactgctacaagtgtcctttataacttcattttacccaaatgttttccaaaacatctgtctaaacttttcaactaagtttagttgttattcttgcttcttgtaatttcagagagacctgtgtggttcgatgcattctctgacgttattctgagaagaaacaattaaatgcatactggaagacattttgctcttctacatgttggaaattcggtgtcaccaatgcacagctgcagaatgcacagttctattgttttctttctcatcacagatctgacccctcaccatcttcccccgcccttgagcctgatccttttctgactttgagcctggcaccttgctggtgccggcaggcatcatgaaggcatgggctgggagccagactcagccttgcaaaggaggctcagggaagccgactgacatgggctcaataattagttcaatgccggacacaatgctcaataaggagctgctgggttaatggatgtgtgtgctagctagctgtagtaaacaattcaagttgataacatggggctgattgtctgaacagtacaaaagaaaatggaggactgaccagctctttggtcctccaaggtcaatacaacatttaaagccttcttatagagatatacaagttttgttcatttttaatattcatgtcaataatttaagcaatgtgaaaacttaaacattctcaagcatttatttattttttttggtagagaccaggtctcactctgcttcccagcctgtagggcagtggcatgatcctagctcactataaccttgaactcctgggctcaaacaatccctgctgtctcagcctcctgaacagcttggactataggtgcacgacaccatgcccggctaatttttttatttttattattgtagagatagggtcttgttatgtttcccaggcttgtcattttatgtattgtcttgaataataaaagaaacttggacagagaatagcaggtagcaaattttcagatgtagatttaggataatacaaaattttataatgtgaagtacctcagtaccaaaatcttagctatttataatatgatagcccttgatgtagagctaacttaaattcaacatttccatgactaaataatttgtgggctctaaaatattctcaaaattcctagagttagcatttcttaattgatttctttagcctttttcacattcaactatattataaatacaaaatgaatccattaacatattttataatgtgtctttcagtgtgcttcttagatttagtttgatttcagaaagctaagaaagaaaaaggaattttgcaagccacactcaatcatatctgcataggcatagctatatagacacccataaaattatgcataacccccaggttttcaaatgaacacctcccacagtctcagcaacacagggcaacctccaccctctggcatattcatgtgtccatttcactgtgaaattcttatcttcatcactgctcctcagggggcctctacaactctgcaatgttattgttctgagagaaaatggttattttgtaaaattttccttcaaaaaacctatttaatagaatcacaagtttattctcttcagcagcaagtttgctgaagtacattatttgtccaaaaatagttgaaggccacattgattgaggaagggatgaatactcatactaatgagctttctgtcccgttgttgtggaaattttctgtgaatttgctgggattttctgctgggtcatgcagaacctccttggaatgttatagcctgggaaatgtaattaccccatgacgtttcatttttctcacaatttctggtgtcagaggatggaacaatcaagtcctcactctgaaaggactctctcacatgcccatcagggcagaagggctatcattacagaaatacagcattctcctctgtttttcaagctggtttatctccatcccactacccgaaaagtggaattcagagttcccttagttctctgcttttctgtacatagaactacaacatccaacccagcaaacactcccttcctatacagatattctttaccagcagtattttatgtggaaaacattaacaagagattagtgacaaaagaaattactttgggggagtccattgatctttgccttctaaaatttataagctgctttatataattgtccatgattgccttctttaccctcatcatcaacttccacatatgaaaaagtaacaagaatggggactgagaagaaatagtaagatggttcagactgaacgaagccattcagtttttatacgtgtgtgtgattatttcactataaactctgcttccatgactaaaatcatcacaattaccaagcaatggctttatcccagagttactttagaacaaaaaagaaggcatttgtcatgcagtggcatatctcggggacagctcacccctgtgaaccatgtctgccctttcttcctccttcttttaattaacatttggaaaagaacagtgatgttagcagatagcagagctgggaagggagactcagaaagtgatgtgagctttgtcaatcttcaaccttgccaaggaggacacattaaagtgtttttcatggaaaatcaggctttgtcaacacaaattcaaagcaatgtgaccttgacggatggagatatatatatatatatatatatatatatatatatatatatatatatatatatgcatgctaagtaagaatagcacagactgaagcatctttagagaatataagtgaaccaaataaaaggaggaaaagcatcctaaaagaagatgttaaatccaggaaaaagttgtcaagtgtatttccttctacttaccttttctgctgactgggctgtaccaaaaaagatggggatgaaagctaaccaaatgatgcaggtggtatacatggtaaatccaataggtttggcttcattgaaagtctctgggacacctctcgttttaatggcataaacagtacaagtgaccatcaagaggatactgtatccaagtgaacaaatgagtgagagatcagaaatgtcacacttgagcactcccctggccttctctggatctagtgtccgctgctctccatagtcaatgatgatgtgggggggatccacaacaaaccagacaaacactccaaggagctggacggagatgaggctgaaggtgatcaccagctgagatgctggactaatgaacttgggcgctgtgacagatttcttcccctgctcaaatattcggtggatacggtttgttttggtcagaagggctgcatagctgaaacacatgccaagtcctaggaagacccgtcggaaggagcatatgattgtatctggtgctgcaatcattaaaaacgtgattgaataacagagaaaaatccccgttaggagcacgtaactaagttcgcgtcctgaagccctcacgataggtgtgtcattatagcggacaaaggtcacgatcacaaaggtggtggcgatgattcccaatattgcaacaaacacaggcaccacagcccagggagaatgccactccaatttgatgatggggataagctggcagcctgtgcggttcatgttgggtctctgatccagagggcaaagttcacaggacagctcatccacctggtagttgtaaccttcacagcgttcacagtgccagcagcaagggacccctttcaccgttttcttcctctcccctggcttacacggcaggctgcagacagacgccggacacagtaattttagcagaatgctaataggacaaaactgaaaattacagatgacgggagaccacttactatgaaaagcagctactataaaaggtaagctctatgaagtgagtaattttttcactggtgtgaacaaacagtgactggcatacaatttgccctcgatacatatttgttgaattcatgagggagaaaggatgggaaaggcactagagcagagccctgaggaataaggagacagcttggaagtactgggatatggaaatagagggtactcaagaggcacagcaaagggagatgaaggaatgtttcagaaaaaaagaacaacttattttcataagttcgcctttactaataatccaaaagaattactatactgtgtggtagtcagtctccaccgtggcccccaataacctcacttctgaaaattgatgtactcc

SEQ ID NO: 2653 - DNA, 12336 bp, Homo sapiens
cgccactctcacggacagctgctgactttggagtcgctttagaggaagaaaagaagggctggtcactgcagaaacgacgtaacaatgtccaactcggattaccttcccgactacccactcaactcagatttagtgaagagattaaagtctgccctggatgccaaagatgaggagagagtgagggatttaatctgcactgaaatcacgcctgtggacgctgtgatagaactggccaatgacgactggatgaaagacccctcggctcagctgcccaccggcatgctgctaggtgcgcgcaggcgctgctggagcacggggcctcggtgcagcgcgtgggcggcacgggccgggacacgccgctgcacgtggcggcgcagcgcggcctggacgagcacgcgcgcctgtacctgggccgcggggcgcacgtggacgcgaggaacggccgcggagagacggctctgagcgcggcctgcggtgcggcgcggaggcccgacgagcacgggcgctgcctgcgcctgtgcgcgctgctgctgcggcgcggggcggaggcggacgcgcgcgacgaggacgagcgcagcccgctgcacaaagcctgcggccacgcgagccacagcctggcgcgcctcctactgcggcacggcgccgacgcgggcgcgctcgactatggcggggcctcgccgctgggccgcgtgctccagaccgcatcctgcgctctccaggcctcaccgcagcgcacggtgcaggcgctgctcaaccacggctctcccaccgtgtggcccgacgccttccccaaggtaaggcaggatccagcccggctggcacgtgccctggagttttgccacttagtgaccggcctgggagctgggttgcatgcggcgctctcaaagtgtaatggcccaggcacccctggggacttgtgaaaatgcagaatctgctctgccggtctggggtgggagagcctgcattgccaacaagctcccgggtgtggcctagactgctgttcctgggaccccattttgaggaacaggggcctagaagccttctggttagagccacgagacaattaaggggttgcatgtgaagaatgcatcctttcaaagtagtcacctggggacggacgccaggcacttatttcgatgatgcagtcagagctcaaaatattttggcagctcatcatcagtgtcattttcagaacgatgaaaatcagtcttttgccacatctggcatttgatctgaaacaaaattacccaatctgatcatccaccttgttaatgagagtgcttcgtacatttgcagacttctctcattcggtcctcaccacattgcagtgaaacacgagaggcaggtgatattctccctctacctggggttcggtcaggtgaagtgccctgcccaggtcattgcagtgttgggacctcacccccattctgctggctcacccttgcagacttgactctgaacaactcatccttgttccacccgtcagatctaccctgaaataataatgataaagaataaagatttctcacctcagaaaataacccaaaagactgaaaatgtttccaaaatattggctggagtaacaggttgtcctcccgaaaagacttcattgaagggaagtcattccattagatgtaaaatccgggtgtgtttaatttaaaaattatctccatcaaccaagactcatcactcatagacataagacatattttggcctgattagttttgaacaaatagctgaaaagctaatattcaaaagtacagtgttctcagtggtctgaaccatcgagaagtgagattcactcatttctctcaaatgctaactttccattatagatgcgttcagagtagactgtgcctctgaaaggttagaaaatcccccgagacaactcccctagtgtttgctcacttgacaaacaggatggcactttcccgatgctgtctcaccccctctttgggtaattgtcttgtggtgctccactaaggcaatgatttcaatatagtggactcctgaaagggaagaaatgctagcatttttatgttctgtgacagctaccttttatatttataatttacattttaatgtttcccatcattagcaggcttagttcatcaacttataacatggaaacaagactcactgcccttcccatgcacactgtgtctgcattaaaccaacacacacttcagcccttgtcatatgcaactgcataaagaatgaaaagaggccaggcatggtgactcacacctgtaatcccagcactttgggaggctgaggcaggaggatcacttgagtccaggagtttaagaccagcctgggcaacatagcaagatcctatctctacaaaaatttttttaaaaaaattagcagggcctggtggcatgcacctgtagtcccagctactcaggaggctgaggcaggaggattacctaaacccaggatgtggaggctgcagtgagctgtgatagcaacactacactccagcctgggtgatagagcaagaccctgtctccaaaaaaaggaatgaaaagagaaaacaaagttacaggatgggccaaaaggggaaaatatctgggccaattatttttttctgacttacttattcagggaagaatggggcaatttattttaaagaaaaaaaaaggagtcaatatatttcagtagcgactagaaataatcctttgttagccttgaaattgtttcaatttgagtgatctctgaccaggctttcaaatcctaggggcagccccacaggcatcatttctaggaacaggacctctgacccctggactctgtttccaaggctgtagaaattacactgccttgactagagatgcaggacaaagcacagcacctcctctctaggtgctcaggggccctgttctgggatgggatccccagtactatgtcagccacacagaaatggggtcagtcagtggtgcaactcatcctccattcaggttgggggtaggtttagatttgttgtacctgggggccaaaaagccatgggaagtgcttgacaaggaatcttgtcagttcccacccatcctggaaggaattggagttttcttgagaaatcttaataccttgaggcttttgcaaaaagcgttgcccaccgctgcctccctgaacatggcgcctgcaagcacagaccttccatcagtgtttgttgaatgaatgaaagggattccagccactgcaggctcatggcctgcattaaatctttggaaataaggattccacctttttgcactgggattcccccacacctccagtgggtacccctacacctggccaggagaggatggtggatgaggatgcattcaccatgctgagaatcccacaagcaaaggcagcagtgcctgtaatgttctagcttggtccccacaaccgaagcaaaactctgtggaaagctagaggcagcctcttcctccacccagtctccctgcaatcgctcctccagggacggcatctaatcatgtgcgacatcaaagcaacagacgctgcagccagccacaaagatgctgggcaggcaccacacgggcgccatggcgagccgagcgtagagtcaccagcactgtcacagggcaagccgtccgtgggcagcagccgtactgtgaatagatgtaaagagacacccatggagcgcagaattaccgaggcaaaaggtttcacagcgagcttatgacataaatcacagctccccatgcccagacaaaggcaccatcgtcgcggcaggcggacacagggcatccttccgagccggcgcagtgctctgcagtgagaatcaaagtagtgtcacggcttcggaagcccacgtgttgacagtgccaggcctttctgcctggctgaccgctagttaacactgggggcagggacagggcaccgagggcaggcatagggggcaggctgtggattctggcaggtttggattctggaagatgtcagggcaggctggggctgggcctgttggacagcaggtaggaaggcagagaagcacacacagacgtggacctgaacttgtttggcatctgccacaggtgactttttgggctggatgcttggtctggataaaaggctgtgctcaggggtctctctccttcagcctctccttacctggaatacgaatctgtgaaacagtcatgaagtcccatgtgatctttttccaaggaagcactactttgctcttctctcctctttgaggagcacatttctggtttgaccccagaaaatgatggagcatcaaagcgtgtgggaagatgtaagtccagccccgctccaagatgggacacagagctgacagtagcagcacgcagccagggctcaaacccctgccctccactgcctccttcacaggtgttcctttgggaacctccttgattcaccgctcagtttacatggccagctttatttgtccctggatgtcacctgacacccgtccatgaacacttttcatttgcagtcagcatgcgtggccagcacattccagcccctcctaccctgtctcctattttgtgctatttcccaaaggccttctgtttcctgtggtgcagaggccagcagcagcccgggaaaacgcacctgcaggtgactgtaaagagttcagactctcacctggcagaggagatgccatgatcacaaaggtggttttctcagggtgagacttatggattgcattccgggtctgatgacccgcacggttttcccagatatgagaaactcatagatgcagaaactgcataatttatggttgagagggactgcatttctactttaccctgtgtaaaaatgaaatactaataatacttcagactcatacttgtccaccagtcggggaagtgcagggacaacaccagtaatgaaggatttcccccaagtcatgtaggcatcggctatgcttcccacgggcatccctttagtacttatgtattcattcaacaaacattttgggggaacttgggtgcttggtactggagtcacagtgaggagcaggagcatgtgtatttcccaccctggtggagctgcctgtcacgtggatcagacaagtacacacactaaggtgaagttgccatggtgagaagtgctgcaaagccgaggctcacttcaccttgaaagcacagaacaggggtttcacctggctggggggcagggtccaaggctccctcaagtgtgtgatgagtgagccgagatctgaaggctgaaggcttatctttgtgaagcgggggacaaacattctagacagacgtcctgggcaaatgtcctggagcaggacaggcacggcaatgtgtgcagttggaaaaatgagctagtcgttggagaggaaacagctagggggcaccagttgagactaggcagccaggcagggccttaagggcctgggcctctgactttggaatattgggagttgattacatcattttcaaggaaggagatgacatcatccaatcagtattttggaatttctaagctcgacgtagagaacacaccaggtagggggctgatggaaaccacaggctgtggtggcagtccaggtaagggattcacatagcttgcatgggggatggaggttggtgcaagaataacagattctaggccagaggcaatagctcacgcctataatcctagcactctgggaggcacaaggatgacttgagcccagcagtttgagactggcctagacaacatagtgagacaccatctccacaaaaaattaaattacctgggcatggtggcatgcaactgtagtcccagttactcaggaggctgagacaggaggattacctaaacccagggggtggaagctgcagtgagccatgattgcaatactacactccagcctggacgacagagcaagaccttgtcttaaaaaaaaaaaaaaaaagcagattctagaaacatctgcaaatctctggtcttgtctcagcttctgggcactaaccatactgaaaatggagacctaaagttttcatgttttctttttacctaattactaaatcaggtaaagggacttcgcttatcccaattccacaggatttttagtgggagatttctggagtagcagtagtcaaaaaccagggctccccctcccatcttcacagagttgcgtgcacccagtccccagtgggaggagagaggggagatcataagtagggcgcctgtgtttttcttgctgtcgttttatttctccatctacatataaagcaatgtgcctgtgtgatttttccccttaattttctttctgccgcctcattagctgaagagagtgtggtgtgcgtggacactaatgacatcagcatgtcagagtaatgtggcagccgcctctccgcagacagcaaggaggccgcggagatttttaaactgtgttggcgtaaaaataatgaaggcagccagctgcctggcaaacatgagggggcacgatgcagaggacggggaggggcagggagccccagagaggtggaacagaggagagacagaaaatgaattcccagagacaggcaataagactctgtcacagtctgtgacccggtgggggaggggcgggaggaggtggtgcttttgctctaatggagggcacctcttcccagggtggggcatgtccgggttacctgcagtccctgggagccatttaacattttgcagagaagtgacagggccagtgggagggtcgctggaggtttgcagtgagcaagacctgagcatcgcctagggtaccagataaatagcagcagactccatcccgaggggtccagcgtgagtccttcttaatggcgtgatttttttcccaacacagaaggggatgattgaaatcagagactgccgtgcacgaggaaatggcatgttagtggggctcgtgtgagccagaaatatcaacatgtgtggggcgcagagagggacagggctggcgagatgggctgggaagaccgtgctggccccaggcctcctgccaggcactccctctgtggcttggtttctccgtgtctccgtgttcatgctctgtctctctctttccgtaaagcctgccaagcctgactcagtgacagtaatggatgagaacaaaaataattgggcatggggaggggaccaccgataatagctcttatgatgtcgatatgatgcccagtctagaaagaacagctcctgtcctccaaaagatagctttgaaggcacagatgagaggaaggaagaaagaaaaggagggaaagagagagaggaaatccacagcaacaaggcaacctcatgtctgagtctaggaagacccagacccaatgtccttctgctgcacggccgtaagtttccaggctgtcaggcagacattaccaaaaaaaaaaaaaaaaagtcagccaggcagtgggggaagcctgtgaagccacagtaaagtgcagatgtgaaaatcgggggaacccagctttcagagcaacttgccaactgccaggaagagggtagcaggaagaagcctccaggccgaagctcaagtccaccgggcaaaccgtccaaccgggaacggggctgggccaggccctcgtccccctccctccacgtctcccggctgggcacagagtaggaccacagacttcccctgcatgttggcaaaatttgcatctggttctctccttaatcaaagactaataaagagaaaaaggaatagattcatgggggaaaagaggacaaaccgaaaaatagaacagcatccagaaaacaggagatccaagaaaatctcagaaagtatgtgccatcctctatggagtacaagaagacatagcttgtgggattcatcgaaacagtactggttaagatgaaaactcaatagaatgacatgaaaaggaagatggaggagatagttacaccaagaaactaacagcacagtcagattgaagtatacactaaagaaggaaaaggcagagttgattcataaagaaagaatcaaatccgtgctgggccattggcccgtgtgccctcagaccctttcctgctgttcctgggtcctgctctgcatcctgggtgacagggggaaagggaaagccccctcaagctgcactcagagcccccatcagctggcttctagtcggactcagccaatgggagacaccatgggaaacgagtgtggaggaagaaagaaaccagggtatttctctcttttgtctctgtcttgtgtagcttcaccagcagcacctgcatcgtctctgtgacaccaacacccaccagacagtccctcccttcatggccccagtccccagtgggtagcccctgactcaacttgcttccagcggatggccctggtctctggactctgattagactacctcatcccactatcccaccaactcttaagagtaatgacagctttctatttcgctaatctctaggctacttcaccttccccttgttggaatctcagcagtttgattacctacgtaaccaattccatgtgtaaagttgtttctggttgaaatacctagagtggtttcctttgcctgattggactctgatacaggtggtttaaatcacaagtagcagaaaacccaattcaaacaggtttaaataaggaaatgcatctttttatctcatataacagtaagtgcagaagtagcaggcttcagaattggttgtttcagtgtctggatgatgtcctcaaagaacctggtgcttcccaactctctgctctgccaacctcagtgagtcagctttgtcctcagaatgcctccctcatggtcacaagatggcttccagcaacaatgggcccgtttccttgttcatatcctgttgttccttttttctagaaaccctgaggaggtgtcctcagttggcttaaacctacccttctctgaaccaataactggcaaaggagattggtttaccatgattggattaaactaatcatctgaattgttggaaagtcaacctcagtgttcactataatgaaatactaatgacaaaaactattcttaagtgcaaaaaaaaaaaaaacccaagaaactaaaagagaaagtgatggtaataaaggatagagagccaacccacagataagtgatgttactgcagaaggagcctaggacaaatggatcagaaataataaccaaagacataatagaagaaaacttagctgcactgaaagtcttaacttttggttggcaatcgaaaagggtgttctctgcaaatcaatgacaggaggcacatacctatatacattctaacaaaaatgttctaaaaagacatggaaaaatctggcaaagtatttaagcagaaaacaggctattcataaaggaataaaaaccaggctggactcagatgtttctgctgtaatagtaacataagacaatgaaatatcatccaccgattttgaaaggaaaatttggacactagaattttagactcagtgaagatactttcattttgatgatgaaagacacttttagatatcaagggttcataaaacatgcctttctaatgcattttctgaaaaagaaaaaatacttcaattatttatcaaaaagtatttgctgagcaccagtcatgtcccagcaatatactaggcacataggataagtgagtgaacagataaggggaaagaagtattcctgcctatgtggagcttacattctaatggggaagacaggcattaaatattgagcatgatcaacagaccaaaaaagtgataaggactatagagaaattaaaagggtggaaggcagttgcaattttaagtcaggcagttagggtcagtgactgctgaacaaagacttgagagatgtgagggacccactgtgtggatgtctggggaagagcagcccagcagaggaccagccatctgtagcctaaggctggagtgggccagccctgcgcacagaaccacaggggaccagtgtggccggagatggaaggagctagtgggatgggagtaggagatgagattaggggtggtaagggagagggcacaggttgtgtggggtcttacaggacattgtaatgactttgaccattggagggatttgagcagaggagtgacgcaatccaacaatattttgtaaagatcctcctcttaacatctgccatgttaagcagatgcttgagaaagaggagaacagatgtcgaaagatgagttaggagggtgttgctgtgattcacaggaggggtgatggtggtgtggacaagggaggcgatctgaccctggatatattttggaggtagagccaacaggattttttaacagatgggatgtggagtgtaggagaaacaggagcaatggacgactctgattctagcccaagagactgcaagaatgagtttgctatcacttgggaatggggcaggttatgggtggcacagcaggttgggacctggtgaacaagggagttcagtttttggtatgtggagtgtaggagaaacaggagcaatggatgactctgattccagcccaagagactacaagaatgagtttgctatcacttgggaatggggcaggttatgggtggcacagcaggttgggacctggtgaacaagggagttcagtttttggtatgttgagtgtgggatacagccaggtgtagctacaatgtaagcagctggatatcgaagcccaaagtttgagagggagagatttggccaacctggagatatacctttgagggtcagtgacaaaggatggtatttaaagccaggaaaccagataagatcaccagcaagtgagagtaaacggaaaagaggaacaggcctgaatgcagggatggtcgaacatctgaaggacggagatgagacagcagctaaggaaaccgaggaggggcaaccagtgaggtggaaggaatgagagcacaccttcctcaaagccaagtgaaggctgcattgaggtggaagacatcgtcaacatgtcaggcgtggctgacacagcaagtaaagtgaggcagagcatggaccactggcgaggcagagcctgggccaagagcagcattggtgccattggtaaggacagtatgggggagtggctggggctaatggcccattgaggtagatgtactccagctgacaaagagataacactaacgaagagctcaggaagggggaaatccatccccagattctccccactcttccccctaaatatatctcaaaatctcctaccctcctgactgccaccacctgaggtgaggccaccaccatctctcccctagatggacacatcttcttcactgggctctctgtctcctctaaactattccccagatccagccttggtgatatgtccttgtttggttggttggttggttggttggttggtttggtttggtttggtttttgagagggggtgtcactctgttgcctaggctggagtgcagcagtgcaatcatagctcactgcagcgtcgaccttccaggctcaagcaattcttccacctcagtctcctgggtagctgggattacagatgcacaccatcacacccagctaagtttttgtattttttgtagaaacagggtttctccatgttgcccaggctagtctcaaactcctagactcaagtcatctgcctgccttggcttcccaaagtgctgggattacaggcatgagccaccacacccagccttggtgatatttctaaaattaaaatcagacccagcctctcctccactcatacctggcaagtgctccctgtgccagcctccttctcaggcagataatggactccatggtcttccctgctttcctctcctgtttcatttccgagcactccccatgtcagactcatgccccagccaacattatttgctccttctcacctcccaaacctggcataatacgttttctctgcctagaacactcttgtccccagaactctccatgcctttttttccccctgctaactcctgctccagagccaggtctcggcttggatgtcacttcttccagaaatcttcccctgaactccccctcatatgaccacagcactgtattgttgttgttatatttgggactgtaaagctctgtgaaggtggagctggccatcataacatgcagacataacacaatccctgctttctagtaggagctcggcaaatacctacagaagggatggcttaaaggacaggtggtgagcatacaacccagctataacagggacaaataattgggaaacacattgtaaaactaaatgcaaataccaaaattgttactgaaggagatacgcaatataaatatgatcatataataatgacaacctggaactaaaactccagtattattaagaaaggaagggagaagaactggttaagagagaaatgtaagagaaaggatgatggcatatccggaacataaaagatactatttagatttttagagaactataggtg

SEQ ID NO: 2654 - DNA, 2185 bp, Homo sapiens
attaatagcagttttcccgggagagaaggagggaaatggcattccagatagaggcatgtgcaaaggcttgaaggtgcaatcagcagctttgatcgcccactgtgggcagagccctgtcttggggagaccagagaaccggaagacccagcccctgccctcaaggagctttttgtcttgccgggggaaccaaggtcacagctgcaccaactcccgaagaaccctctttccgagctgcctgtcgtcaaatccaagcgagtggcattaagccttgaagatgatggactaccctgaggatgggatcacccccttcgtgcctcatggaattcagtcccatgcactacactctggatggtgtatgactggatgaatgggtttctatatatgggtctgtgtgagtgtatgtgtgtgtgtgattttttttttaaatttatgttgcggaaaggtaaccacaaagttatgatgaactgcaaacatccaaaggatgtgagagtttttctatgtataatgttttatacactttttaactggttgcactacccatgaggaattcgtggaatggctactgctgactaacatgatgcacataaccaaatgggggccaatggcacagtaccttactcatcatttaaaaactatatttacagaagatgtttggttgctgggggggcttttttaggttttggggcatttgttttttgtaaataagatgattatgctttgtggctatccatcaacataagtaaaaaaaaaaaaaaaacacttcaactccctcccccatttagattatttattaacatattttaaaaatcagatgagttctataaataatttagagaagtgagagtatttatttttggcatgtttggcccaccacacagactctgtgtgtgtatgtgtgtgtttatatgtgtatgtgtgtgacagaaaaatctgtagagaagaggcacatctatggctactgttcaaatacataaagataaatttattttcacacagtccacaaggggtatatcttgtagttttcagaaaagcctttggaaatctggatcagaaaatagataccatggtttgtgcaattatgtagtaaaaaaggcaaatcttttcacctctggctattcctgagaccccaggaagtcaggaaaagcctttcagctcacccatggctgctgtgactcctaccagggctttcttggctttggcgaaggtcagtgtacagacattccatggtaccagagtgctcagaaactcaagataggatatgcctcaccctcagctactccttgttttaaagttcagctctttgagtaacttcttcaatttctttcaggacacttgggttgaattcagtaagtttcctctgaagcaccctgaagggtgccatccttacagagctaagtggagacgtttccagatcagcccaagtttactatagagactggcccaggcactgaatgtctaggacatgctgtggatgaagataaagatggtggaataggttttatcacatctcttatttctcttttccccttactctctaccatttcctttatgtggggaaacattttaaggtaataaataggttacttaccatcatatgttcatatagatgaaactaatttttggcttaagtcagaacaactggccaaaattgaagtcatatttgaggggggaaatggcatacgcaatattatattatattggatatttatgttcacacaggaatttggtttactgctttgtaaataaaaggaaaaactccgggtatatgtatagatgttcttcattatagacatcttctttgcttttcttggccttgggggaggaagggagaagtgctcttttctacttgtggggtctcccattggaaacataatcctatagtcccagaaggattcagtccccagtggctttcccatccaaagagaaagagtttgagtttcttaactctgctgttctgccacttactcccactagacaaccagggacaaggtgcaacatggaagtgtttgacttaagtaggagcagaggagctgcatctaatctcatcatacctggaacttgacacacttaagcaaatgccttcccatccctacctgccagatgcccccaactcaatgaagttggatgtctcaccagcttgataccctttgaattttcagtcagacattctggagttctagcatcc

SEQ ID NO: 2655 - DNA, 506 bp, Homo sapiens
gaatacattttctgtgaatgctatttcaaaaaaaccacagcagcaagtcacttcagagtgcactggggcaaatcacatcatgtcattatgtcatggatcataatgaagcacagaggctaattgaaccaacaggcctcaacgctaatctccatgccagactagaggcttgagaagttttctgatggggataaaggagaggagattgaaagctgaagttaatgattaaagccaaatgaaccccacagttgtctccctttatccatgagggacatcttccaaggcccccagtggatgtctgaaaccgcaggtagtaccaaatcctatatgcattatgttttttcctatacatacatacctatgataaagtttattaattagttacagtaagagattgacagcaatagctaacaataaagtagaacaactataacaatatgccatcagcattactcttggggctattatttagtaaaataaaggttacctgaacacaagcactgcgatac

SEQ ID NO: 2656 - DNA, 1052 bp, Homo sapiens
gacagagccttactctgttgcataggctggagtgcagtggcacgatcttggctcactgcaacctctgcctcctgggctcaggtgattgtcccacctcaacctctcaagtagctgggaccacaggtgtgcaccaacatgcgcagctaatttttgtagagatggggtttcgccgtgttggccaagctggtctcgaactcctgggccaagcaatcggcctcccaaagtgttgagattacaggcgtgagctactgcaccaggccacacatgcttattttactcagtcttgcccctgaatacccgaaggtctaaacttaggaaaaagtcaggggagggatgagtttgtcattctttggagtcgttatatttgggtgagtgctggcactatgggtaggatattatttagaagctgagttgtgtgctgagcaaatgtttctttaaaaaccaaagccgtatgagatctgttatagaggcacagtgtggctaaatagtgtgcgataagataagcatagggctcctgaggtgttgctgttctcccactgtaatgagtttactcttcttcctaaggaaagtgatcctttatcacctctcctctcaaattcactggcttgtttcgtgagtgtgccttcatggaatcatgtctccttctcttccctcagttctctccttccctcccttacgtatgactcctcccataatccgcacacatggattgaaccaagtgagggtatttttctgtttcctacctcatagaagggcatagagtggacacggtctaaggttagttcctgaactgagtacccacatatgcagaactttatttaaagctgctgaaatctttgtataacagatagatcaataggactgaaaactactgatggttttacttacttgttgaacgtgactaagttccatggcaccatttagaaattgtgttgtatagttttcgtgcttaagaaacagtttagcataatggttaaaagcatggcctctggaactagattgcctctgtatgcctcagtttcctcatctgggaataataatagttctacctc

SEQ ID NO: 2657 - DNA, 3120 bp, Homo sapiens
gcaccctggctgctcgcatctgcaggaagcatggtggggctgggcggtcccaggctgccgtggcccctttgtgctgctgtaagaaggtacctgtgactgggtgactcataaggagcagaaatgtactgctcacagctctggagtctgggaagtctgaaaccagggccccggcaggtttggtgtttggcgaggactgctctctgcttccaaggtggtccccttgttactgtgtcctctcatagcagaaggcaggagggcaaaaggggcctggccagtcagacagccctttcgtaaggctctaatcctacccttgacggtggaaccctcacggcctaaccctcccgaaggcctcacctctgaacactgttgcgctggggattaagtttcaacatggatttcggaggaacacagacattgaaaccacagcagtgccatcgctcccaggctgagaccccaccttggctctctgcccctagcatctcctccctggcccctggagagacacaggagaaggagagaagggctattctgtaggaatcacaaggccgagtggactctcacctgagggagggcacctgcagcttggctggccccagggatctgtgggcacggagcatgtggctgggtgcctatcaccttcttccccactttaccctgggcatccagcccctggaccatgactgccaggcacggagcaggtgtggaggagtgtcagcatgatgaaattcacccacaccacggctgccacagatggacagcctcacggagaggtgccgcccacagcccctcgctgccctgggtccagctgatgctcagctccatggtccggccgctgctggtggcggtgttggcccaagggtgatgctctcctccctctgccgggaacacccctggcaaggacgctgcccacccatccccgcacatggaaaggaggtgaggcagctgcggcatcttcacagaacacgtccccccgacacgcaccaagacatggctcgaggcccgggcctcccacacacccatgggcttccagcacgtccttcccacgtcagacaccagacagagccggtgcaggtggcttccaggtggcatgtcccttcggatgggctctgccgtccctgtcatgtgcaccagctgctgcatccacccttagtgccagctctgggggcctaagcaggagctcagggacatggagaccgtggagaggaggcattcactgtggggtgtcccaaggctgggcaccaaggcaggacctccgtgtgccccgaatgccggcttccctggagactgcagccagcggggatctctcacatcagcctcccaagaccaccgtgaggggggcgcttaggagcagaaacacccaggccgagcaggatgagcaggtgaagctgcccaacgcaggggacgggacgcagaggcgattcacgagcctggggctccagcagcagccaggcggatcccgccacacctttcgctctcagctaccagtctgcctgccaccatcaccttcccgcgtgtgagtggggccctggttccccaagcagccgctgactcccggacgcctgctggccaggccccggtcatgagtgcatccggggaaggcttcgggcctacaggaacggaaggaaaagccatccagcctccctgaccctccacacggaagctgaggggttccccatacaccggctgccggggactgcctcgactctggttttggcagagacaggccctgctgtgtccgtcatctctgatggaagtgacagccatttcccctgcagacaggccagagcggcctatccacgctccacggtgtgaggccagtggtggcgtccccagggccacagcccagcgagggtgaggtgggggagcgtcctggctgagggctgggccgcctcccgcgtgctctggggaacaatgcttccgcaccacccccgccccttcctggcttctgtgaaactgaacatctccaagtaaatattttcactgctaagcacaggcagcacttcgaggcttcgtgacgaagacgtggaaaccgcaacccggacctcgccgtcagagccgggcctgcatttcccagtcagcacgtgtgtcccttctcctcagcaaccgccagccctgggacaagccccacaccaccctggttaccctcagctgcgagatgggaggtgccgggcacagccaggactgcatctggtccgtgctgcagggatgcagccccgcatggggccggggcttagatcagcctcttgttgggttgagcggggaggcgcacacctgccccagactgcagctcaaaagaggcagaggcgagggtcaagcgttccataccccgaggtccccgggggccccgtcagaaaaggtgggggtctcagggagctttgggttttgctctgcctcctgggcctgaccctggccagagctgaaccttcgagaagccaggaaaagtcggtaccaattcctggactagactccctgccgagcctgcccctgagtgccctgtggcctgggtgtgggaacccagagggagactgtgctggtgtcaccgggggccttctggcggtcaggatggctcacagggaggcactggggggctgtggccaacctgtgggacccgtccacccccagggctgctgtgaggcctaaacgtggcaggggctccccgatgtgagtcctacaacgctcagtgtcggatggggggcaggacccacaggcccctctcaatgcaacctacagaggcccctgcaggtgacctcgagggaggccacagagagcaggacccacgtgggggaagagagcacctgccccacaaaagacaaatcaagttgctgccaaggagccggcgagtttggggcggatgaagtcacaggatcacccacagcgaaaacagggaggcggccacatgccccccacctggggagcctcaggggcggccggggccacgggggtggcacgaggcgggtgacaccgggcagcaggcgggggcggcgctccgggaagcagggtccgactggagacgtggggatctcggggcggtttcgggttttactctgctttgcctgtggctgagcagtgctgaagggtggtgttgagctaacgggatgctgaggcggaggaggatggagg

SEQ ID NO: 2658 - DNA, 722 bp, Homo sapiens
gttctttcttccaacggttgcctggttaatcccacccacccgtcagtccttggtcgggcattctcaggaaactctcccaagggacagctcagaactcccatgtttcctcaaaaggttccctcctgctgctcacctgagctgcctgtcccagcacacagccaccatcaccagcaggttccccaagatggccatcaggataaccgtcgagagaaacgtgagcagcaccaccttctccactgacccgaaaccctcctcagaactgaaagacacacacaagcacaaagaattgaatgaaactctgggacacaagaaggaaaattcgtcttttcatcattgaccttcagaaaggtttcttgagagactaaacatacaaatggacaatggccagaccatgtgtaacaataaaactccgatggacaatctctggcagccagcccagaacgatcaggacttgttcaatgactgcgagctagcttcccccttttttaaccctcttacctgcttccaactcaagactaacaacagaatgccaaagacactgctccccaaagcaattacgtaagatgcctcactgcttgttagtgcacctcctgcttcaatgtgccaacaacctccaatcagaagatagcagaagccttcttttccccgcttataaagcttttttactcccctgcctgtctttgagactttgctaaattccaaggatggtggctgatcctctt

SEQ ID NO: 2659 - DNA, 2148 bp, Homo sapiens
atcagacataaccttgccataagcagcaaagggcttggtgaaccctcaaaaaggctgtcaaacacccagaggccttggggatcaggaaggagctatcatgtggtctttcatctaagagagaattgtcctgcctgatgggcttcaaaccaccagaacatcagttcttcctggttctgcagtagtctccaaccttcagactcaaacttcagcacctgttcttcagattttggacttgcagcctctataatcacatgagccaattccttatataaatttatttatacatgctgacagttggttctgtttctctggataaccctgactgttagagctgttacctcaaatttgttttcttatatttggtgtctgttttggagtacttacaagtgcttaaaatgttctttttcaattaggtcctgtagaacatagctgcgcctggaattgaatgatcgtgttttccgtgcagagctatctgcctttggacaggaggagaactctcagcaccattccctttccacgggagcttcttttttctcattctttttcttgcctccctcaactcccatcctctgttctgggagaaggtgaagctggcctgacaggcctgagggaagccggacggaggcacacttgccagcttttagttgagggaggcaccgcagcaaggctctccagtccctccttccctgggagcaccagctctgattctagtgggcagctgcagctaagacgaagacaaatgaatccagagacttctctcgagctatgagcctgagccaaaggcacagcccagctgtccagagagctttgtgacagaacatggggggccagctgacaggaaccgaggcacttttaaatttagcacttgtcctcgccctttcggttcacgatttcttggaagtttcatttggaaaaagaggtgagggacagaagtagaagttgggaattctagatcccttgattctagaatattctaagatcttccaaactaaccctgattcctaaaaacagaataggacaatcttgttttcggtattgagaatagcaaatatagaaatcccttaattctttgacttagcttagcaggtgcaattagttctatccctaagccttcttaccagaaaattttctagtgtaaaatgattggatgggataccaattgggatgggtgtggtaatagtaaaaccatattctttaataactttttcttatttgttttcctggaattttggttggcattttttaatgaattacatgcttatttttaaaaattattatgatggagaatttttgttaggcagaatttcaaatctgtcatctgctgttgactcttactttcactacaaatttacgaaggtagagagacccagttcttacttaagttatatctaacataaaaatacaattctgtcccaatctgttcatttaaagggtaaatttatagcatctgttcaactttatatgctatctcaaaattgtcaacattttaagcaaggtgctacctaattttaatgggtgcacaagagggaaaagtgggtcattgacttcaaaggcgaaactataagctattaatgggctacgttgtgctgaattacaatctcttttcttgtttcaagttaaaatttttaagtggccacatgtttggcattgtaattgataccacaatgctgctgttccttgactcattcattctcaaatgtatatatatatatattcttagttcacaaatttctatttcttttacacaagttgctatttcttgtagtgttcatgaactgggtatgctgtcctttgtaatgaaagactacagactgccatgaatagtaccttggcttctttttttacagtgtggaatgagagcatttattattgttgcattattgtatttttgaataaaaatccctattcccactgtaccaaatcaaatgagcttgtgttgaattttattcatcagaattgtggttaatgcagtcctcagctatggcactagttagggcctgcccaggactgctgaagagctggctttgtgatttacctggctcagtatgtgatcaagcatctccattattggaataaaataaaaactttcaagatcatggttgtgcaatagagaaaacaattttacctctgcactaacactcaaatgct

SEQ ID NO: 2660 - DNA, 18333 bp, Homo sapiens
gtgcggtggctcacacctgtaatcccagcacttttggaggccaaggtgggcggatcacttgaaggcaggagtttgagacgagcctggccaacatgttgaaaccctgtttctactaaaaatacaaaaattagcctgagatggtggcacaagactgtaatctgaactacttgggaggctggggcaggaaaatcgcttgaacccaggaggtggaggctgcagtgagctgagatcgtgccactgcactccatcctgggtgacacagtgagactccatctcaaaaaaaaaacaaaaaaaacaaaaaaaaacaaaaaaaaaaccaactattttatgtgtgttggggaggaaatagagatttaaaaggtgatagaaaaccttagtatcagaattgagaattaagaatatatattacaaaccacttatacccaaattaatatcccttcatgacgtctgtaaagtcaggtggccaataagaacaagcctatcccttgttctcaatctcattttctggtaagagagtaaaaatagaaaacaaagcagactccactgataagggttcaaatgtattattgaaataaatgtgtgattgatagaaaaagcttgtgactatttaatctaccaaagttcatcaaatttaagatgcacaattgtaaaaccatacatataaggtgctcaaccaaaacaaatattgcttgggaaaaaggaaaggctattttatactaagtattgctaaaatggaagacacaaaccatataatatacttttaatgagtttacgggtagtaactaaacaaaaagtcaagaatcaggactagggtttattcagctattcattaaaaacatcaatcaatcaatatttattgagtatcaactatattcaggcaatgatagagttggaaaagaaatgtttgaagaaggaatgggcattcctttcacagagctatgttctaaggtggagataaacaataagctagcaagcaaataaatgaacacaataactgaaggttgtaaaaagtattttatgagacaaaattgctatgttagatataaagtggaaagaatttactttatagtgagcatctctgagaagttgacttttaagctgatacctgaagaaaccagccatgataattgtcctggtgacagggtaagtttttcatatcttagatatagcacagactgagccttcaaattgagaaagactgtaatgttctagtgatggccacaggctagtgtacttggagaataatgaccaaggggcaggatgggaccagatgaagttagagagttgtgtaggggccagttatgcgggacctggtagattatggcaagaagacaggttttattttaggtacaatgaaaagaaatggaatgttttaatcagaggagtaatatatttaatttttgtttcaaagagatcactctgactccatgggggatgagcaaggaaggaagcaggagatcaggcataaatgaaggattggacagaaaagtgtgatagggagacgcagaagagccaatggattcaagatactcttggaggtaacagccaatagttgctgctgagagagatataggaatgggagattggcttgagctacagaatggacagtgagaccatttactgaggcagagaagtcaggaagagcaactgtgttggaggtagagaatggaacaggagagttctgttttggccatgttaagattgagaagtttatgaattgtctaatttgatatacaagaaataaggacctgacagaggtgggtctgaacaaaaagcaaaaattccaatatcaggccgtagaggagccatcaaaggactcttagaagcagaaagtcatgaagagtgtcactgcagaatccaaaaaaggtgactagttcaataagaaagaaatgtaagtgagagaaagccagacctctactcagtactagtgttaattatattcttctgacctgtaaacaactcgtgttgtataaaaaagggaactgaggaactttttgaatgttcagtgctatgtatgaccagcatgcagaaggagagatgattggcgatatcacttcctttaagaaaaaaaaaaaaactctctaagaggagtaagagtcaaatccttccagaaaattcttaatagattagagaaaatgtccttgttaatcactgcaacattaagactgttgagttaaactacataaatagtaatactaataatagagatcttttcacctattgattttgttaaagtattagagattcagtttttggtcagatgtctaggggtgaatctaagttacccaacaagtcatttcaaatatcacagtcttgctgacagacagggtttaagcatttctaataaaaagctgccagagctcacttctgaaactactaaaccttttgctaaacgtttacttctggcagtacttgtgcttttgtgagcctggggctaaatttctggaacatgagatgcaaaggcagcagaaagacaaacagcatcaaactatatgacacttcagaactcactgtgatgattctcaaatcacacttttggtgataattaagctgaggcacactggcaaagtgacttgcccgaggtcttatagacaatttcaagccaaggtagacccagttatttctgattcctagtcttgaactatgaacaccccatcagtttaattattaaaatacaattgctaccatatggaagaaaaacctagaggactcagagatcctctgcctaaatcattaactctgaataattatttcttttggtcaggcaaccagaaaggagggaacacctttttaaaaaaaaatgatttggttttaaaaattaacctgtctcttcacaagttgttaaaattgacatagctctttctaatagacaagacattttcttcagacaagaggtggtaaaattgttgtcagtgtacttggcaactcttcctaagactatgtaaaagttttccaaaaggcaaaaagtattgaaatcaaagagttgcttcaatccactgggtcaagatggttatttcactgcagagtatttgtggtataagagcaataaaatttacaatgaaaagctttaattttgattcaaataaaaaattttgaataggtcaattttctcccctggggtagaggacacctggttattgtaaggttattgaagacaccctcaaaaggctgagctgtgaaagaagcaatcaatttttttccctgtcaattttgggacagttgtgcatagtaatgtagatttcattacacaaccaggcttggatatacccagcaagtccaaggaattccatgattctaggtggatggacaaagtttccaggatatcactagtgagaccaaatttaagctagagccccagatgtcagctgcttctgctttccacagtcatttacaagaaaacacagaataagcttcgatttcttaagctcttggatgactactgatggggctaattaacacaattattataggaaacgagaggggaaattttaggcccagattgtgtagggctcagagtgtcttgctaagttgtcacactaagatgtctccgtaggtaatggaggaacacgggaagctttcaagcagagagtaacataatcaaattatgtataggaaagcccatctagtagtgacattccagctaagtaaaaacagggaaatgctaggtcagataactgaaccttggatgtgaaagcacatctgacctcaaagacgactagacctggggacactagtgtgttcaattcctgccacctcccttctcttcctcccttcatgtaagagctctatgtcttcctacagtagacagtaagatgcgggagaatagggcagtggaacatgtttgctgaatgttctggtctcacattttcacagcttcacaatcaaaaaggaaaaaaaccttcttcctgtactttcgttttgaaaacttgtgggaaggaatcccattgtcttggtatgtgaggttggtcaccgtcaatgtatcactctggacagagagtcagtgcttgcctgacctatctattaaagctgaagagtaaaagatgacaggcaaacaggaactttcctcagaaacagtcaatcctcttgccagaataacgaaagaagaaatcattggtatctgttgtagctaccatttgaacttgtatgtgaaagagggttgggaaagccaaaaatcatttatgcttagttcctaagtgacaaagaggctgaaagtacctctaagcaaggtgcattatgggagggaaaaaaagggaagaaaaagataaagtgagatgataaatataaaatgaaaaatgttgaatgtgactgctaaactgaatagaaaggaaatagcaatgaggatctggaattcagagaagttggtagagtgagagatttggaggaaagaaagataaagtttaagttatgaaagtagatgaaatcacttcagcagaaaatgtgagaaaagacatgggcttatattaaagtgtttatagaagaagaagttttgtgactacagcaaaacaccacaaaaggcaaatgaaaaagttaattcagtgtcagaaaacttgcttcaactgattaatgcagcagaagctgcagagaattagaaatatataaaaataatacaaatttagtatttagcctttagttactagaaaggctattgtgattcaacagagccattgtagcaggcaaggtgagttgaaagctagattgcttttgtttaagaaaaggctgagaaatgaagaagagtgagtttaatgtattctttccagatatttatcataatttacatagtcttatattttggggtgataaataacttgactttaaatctcaaatattaccaagttcttccaaaaaatgaaagaaataataagaacaggtctagtctgcaacaatagaaagttttaattctacagtaagtagttgaacaatactagggtacatatcacaagtaaataatatggacaagaaaaatctacttgcagatttaaactgacaggcttattatttatattaaagaatttatcagataattataacttttttcttttcttttttgtggacacttcatttaattttagattctgggtgcatgtgctggtttgttatttgggtatactgcataatgctaaggtttatacttctagtgaacccatcacccacatagtgaacattgtggtcaataggtagtttttcaatgctcactccctccccagattcctcccatttgagtcccgagtgtctattatttccatatttatgtccatgtgtacctattgtttagctcccacttgtaaatgagaatatgagttatttgattttctgtttctgaattatttcccttaggatagtggcctccagctccatccacattgttgtgaaggacattatttcattatttttatggctgcgtagtattccatggtgtatataccatatattcttaagctattcaatcattggtggacacttaggttgattccatgactttgccattgtaagtaatggaatagtatcacaatagtattgtgataaacatgtgagtgcaggtgtcttgatgacatgatgtcatttcctttgggtggatacctagtagcaggattgctggaccaaatggcagttctaattttagttctgtaagaactctttactgttttccatagggattgaactaatttacattcccaccaacagtgtataaacatttccttttctctgcatcttccccaacatctgctttttttttcttttcactttttaataatagccattctgactggcataagttggtctcccattatgattttaatttgcatttcactgatgattagtaatgttgagcattgttttcatatgtttgttggccacttgtatgtcttcttttgagaagggtctgtccatgttctttgcccacattttaatagggttatttttttttgttggtttgttgagttccttggagattttggatatcagtcctttctcagatgcatagtgtgcaaaaatttttttctcattctgtaagttgtctgtgtagaatgttgattttgttttcttaagtccattttgtctacttttgtttttgttgcatttgcttatgaggtcttggtaataaattattaccctaggccactgttcagaagagtttttcctaggtcttcttttaggatttttataatttcaggtcttacaattaagtctttaatctatcttgagttaatatttatatatagagtgggacagatgtccagtttcattcttctgcatgtgagtagcgagttttctcagcactattttttgaatagggtgttcttttcacattgtttatttgtgtcaattttgttgaagatcagttggttgtaggtaaatggctttgcttctgggttcctattctgttccagtgatctatgtgtttatttttatatcagtactatgctgttttggttacagtagccttgtagtatagtttgaagtcagataatgtgatgactctagctttgtttgggttattcagggtcttttttggctccacatgaatttttgaattatttattctaattctgtgaaaagtgattttggtaatttgatagaaacagcattcagtctgtagattactatgggcagtgtagtcattttaatgatattgattcttcctatccatgagcatggaatattttttcatttgtttgtgtcatctacaatttatttcatcagtgttttttagtttttcttgtagagatctttcacatccttagttgaatgtatttgtaggtattttatttttgtgtgtggctattgtaaattggattgagcttctgatttggttctcagcttgaatgttggtgtattgaaatgcaactgatttttgagcattaattttgtatcctgaaactttactgaggtcatttatcaggtctaggaatttttttggagaaatctttagagttttctaggtataagatcatgtcatcagtgaacagaggtactttgactacctcttgtccaatttggacacctttccttctttggcctgattgctgtggccaggacttccagtactatgttgaataagagtggtgagagtaaacattctcatcttgttcgagttcttaggggaaaatgctcttaattttccccattaaacatagtgctggctgtgggcttaggaactatactgcccacagtaatctacagattcaatgtaactcttatcaaattaccaaatgacttttcacagaattagaattatatgtatctttatattttgaggtatgtttgatgcctcatttgttgagaggttttatcatgaagggatcttgaattttatggaatgctttttctgcaactgttgagatgataatatagtttttgtttgtaattctgtttcacatttatagattcatatatattgaaccatccttacatccctggaataaaactaacttgattgtgatgaattctttttgatgtgctgcagaatttggtttgctagtagtttgttaaggatttttgtgtctatgttcatcaggtgattttgcctgtagttttcctttttggttgctgtgtcctggccagattttggtatgaggatgatactgatttcatagaatgtgataaggaggaataactcttcctggattttctgaataattttagtagtttggtaccagattttctttttgtgtggtagactatgggtatgaatgcatctggtcctgggctttttatggttggtagattattttttgttactcattcaatttcaatttttttctggtttaatcttgggaggttgtatgttttcagtaatgtatccatttcctataggttttctagtttatgcacatagaggtgttcatagtagtctatgactactctatagtcgtctagagactaagatgatcttttgtatttttgtggtatcggttgtatcaccttatcatttctgattgtgtttagttgaatcttctggtcttttttgttgttgtttttaattaagaaccaacattttgttttgttgatcatttgtataatttatttgctcttaattttgtttagttctgttctgatcttttaaaattcttttcttctgctagcttttagttggatttttcttgtttttgtagttccttgaagtgcaatattagctggttaatttgagatctttttattttttgatgtactaatttagcactacaaatttttctctttacactgctttggagattttggtatgttatgtctctattttcattgatttcaatttttttttatttctgcctaaatttctttgtttaccccaaagtttctcaggggcaagttgtttagtttccatgtacttgtgtggttttgagaattcctgtttgttttgatttctaattttattacactttggttcaaaaagatacttgatatgattttgatttttttgagtttattgaaactttctttatgaccaaggatatggtcaattttagagagtgctttttgcacagatgagaaaaatgtatattcttcagttggttagaatgttctgtagatatctattaggtcaatttgttcaagagttcagtttaagtccagagtttcttttttatcttaagagtatgatcacggtatatgttgtatatggtcatttggcttttgtttcattatttctgcatcaatgatctgtatagtgctatcattggagagttgaagtccccaactattactaggggctattatatggctgtctatctcttttcttaagtctagtcatactttttgttataaatgtaggtgtttcagtgatgggtgcatatatatttaatatagataaatattcttgttgaattgaactgtctatccttatatactacctgatatggtttggctctgtgtccccacccacatctaattttatagtccccataattcctgtgtgttgtgggaaggacctggtgggagatgattgaattataggggtgggtatttcccatgctgttctcatgatagtgaaggggtctcatgatatctgatggttttaaaaacaggagttgccctgcacaagctctctttgcctgccaccatccatgtaagatgtgacttacttctccttgccttccaccaagaatgtgaggcttccccacccacatggaactgtaagtccaattaaacttctttcttgtgttaaatgcccagtctcaggtatgactttatcagcagcatgaaaacagactgatacagtaaattggtaccagaagtgcagtgctactgaaaagatacatgaaaatgtggaagtgactttggaactgggtaataagcagaggttggaacagtttggaggtctcagaagaagaaagaaaaatgtgggaaggtttggaactccctagaaacttgttgaatggctttgaccaaaatgctgataatgatatggacaatgaaatctaggctgaggtggtttcagatggagatgaggaacttgttgggaactggagcaaaggtgactcttgttatgttttagcaaagggactggtggtattttgcccctgccctagagatttgtggaactttgaactagagagagatgatttagggtatctgccagaagaaatttctaagcaacaaagaattcaagaggtgactttggtgctactaaaggcattcagttttaaaagggaaacagagcataaaagttcagaaaatttgcagtctgaccatttcatagaaaagaaaatcccattttctgaggagaaattcaagccagctacagaaatttgcataagtaaagaggaaccaaatgttaatcaccaaggcaatggggaaaatgtctccagggtgtgtcagaggccttcacagcagcccctcccatcacaggcctggaggtattggaggaaaaaatagctttgtgggccaggcccagggtccctctgctgtctgcaacctagagacttgatggcctgcattccagttgctccagctgtgaataaaaggggccaaggtacaggttgggttgttgcttcagagggtgtaagccccaagccttggcagcttccacctggtattgagcctgtgggtgcacagaagtcaaggattgaggtttgggcacctctggctagatttcagaagatgtatggaaatgcctggatgcccagaaaaaagtttgctgcagaagcagggcccttatggaggacctctgttagggcagtgcagaagggaaatctggggtcagagcccccacacagactccctactgggcaccacctagtggagctgtgagaagagggccacagtcctccagaccccagaagatagacccatattcagcttgcactgtgcatctggaaaagccacagacactcaacaccagcccatgaaagcagtcagaaggggggctatgccctgcaaagccacaggggtggagctgcccaaaaccatgcaaacccacctcttactttagtatgacttggatgtgagacatggagtcaaaggagatcattttggagcttcaagatttgattgccctgctggattttggacttgcgtggggcctgtagctcctttgttttggccaatttctcccatttggaatggctgtatttacccaatacctgtacccccattgtatgtaggaagtaactaacttgcttttgattttaccagctcataggcggaaggaacttgctttgtctcagatgagactttggacttggacttttgggttaatgctgaaatgagactctgggggactgttaggaatgcatgattggttttgaaatgggaagacatgagattctggaggggccagggcagaatgatatggtttggttctgtgtcctcacccacatctcatcttttagctcccataattcccatgtgttgtgggagggacctgatgagagatgattgatttatgggagcaggtgtttcctgtgctattctcatgatagcgaatgggttgaggccaggtgtagtggctcatgcctgtaatcccagcactttgggaggccaatgtgggtggatcacaaggtcaggagttcgagaccagcctgaccaacatagtgaaaccttgtctccactaaaaatacaaaaaaaaaaaatagctgggaatggtggtgtggtcctgtaatcctggctactcaggaggctgaggcaggagaattccttgaacctgggaggcagaggttgcagtgagctgagattgtgccactgcactccagcctagatgacagagtgagactctgcctcaaaaaaataaataataataataataaaagatagtgaatgggtttctcaagtctgatggtttaaaaatgggaattgccctgcacaaggtgtctttgcctgctgccatccacataagctgtgacttgcttctccttgctttccaccatgattgtgcggcttctctagtcacgtagaactgtaagtccagttaaacctttttcttttataaattgctcagtcttaggtatgtctttattagcagtgtgaaaatggaccaatacactgcccttaattgtctttttattcactgttactggtttaaaatctgttttatctgataaaagaatagcaatccctgctctgtgttgttttccatttgcatgatgtatctttcttcacccctttacattgagcttgagggtgtcattacagattaggtgggtctcttgtagcagtagatgattgggtctctctttgttttttttttctttttatccagtttgccaatctagatattttaagtgcagcatttagactatatacattcaaaggtaatattgatatgtgaggctttgattctgtcatagtttgttaggtagttactttgaatcacccaatgtctgccttaatattcacatggaactctccctgtgtgcttgtctgtctccaaatttccccttttataaggacatgagtcatattgaattaagagcccaccttactcaagcacgacctcatctaaactattattatatataaatatgtctgcaattaccctatttccaaataaggtcacattctaaagtactcaggattaggactgcaacaaacagatgttgtggagacacaattcaacacataagactttgagactttgcttccaatatggaattgatatcccaaaacccatatgaggtgccttctctctgagacttttagcctgaatctactaatgtgaaggaggagggttagttgctacggtagatgctattttgctaatgttccatagaagtgaaggcagtgaggttgagagttgaggggctcagtggggaggatactgttgtggctgctccagggattgcatttgaattttgtctgggttcttgatgacctagattcccttggttccttccaattctcttagctttatttgcccacatgtctccaaattcttgagttgtttaataactttccagtgaaagtcctgtttggctccagttagccagagttggtttctgttgtgtataagcaataaacttgtcaagtacacatacttcatgatattttatatcttttcagttcatcctatattaaaaagtaagaaaataattcaattgcataaatcaggaaattctttaattagacctttaaagttaaacagccattacaatgaacaaattccatgttactggaaataatatggttttgtttctaattgagtttaaggtaactaacttcagtctgagcaaatgagaactatggtatgattaaattatatatatcattgaattcaactccaactgaagtcattatcagaaaagtcattattgaagaattatgctactattccttgctgagatggatgagggaaggaaaaacataatcttattaacttttaaaattatatttcatttatgaggtaaggaatttatgaaatgaaacactaagcatcatatttcaggtaaattttgtgatataaatcagttgtatttatagattcaaagctaagcttgaaaaaagtctcagaagctaaggggctgatgaccctataaactgtaaaatgtgttaacaccaataaattctggtccctcagttcaaagggcatttgattatacgctgcactgtcagtgctactcacatcggagctcatcttggaatgataaacaaggcaggcctgtaatgtataccagagaatgacaagatgcacctgtccctacaagttttgagacaaaacagtaggcacttgcagacagctgtgtcatctatgagaaagtctactcataggctcaccaacaggcaagaagaaacacccccagccagtttagactacaacatcacaatgtttgcattggtatatcttttatttctctgagattattttgaatagaaaactatgttggctaaaatctattagtaaaattcctttgtatgtaataaagggctgttgatctctggtggctttcatttctatgcacaacattttaaagtattttaataagtattacgtaaatcaatgttaataaatgttcaattggcagaagaacatgaattattatataattacctttaaataatttgccttatggtttttcatcagtatgatttttaaacattctgagggtttgatttacatctctttaagagggaaaaattttttgccttaatagaaatttttccagtcctgaatgttttactttggtcatttatgcctaatcacgcatctctcacaaagaaccaccccaacaaaacagatagttatttaaaacttattacaagatgattaattgaaatactttatggtcagttcttatgtttaacagctggtacttgtgctggcttgttatcaaaggaatatttattgagcatttggtattacttattatttggaacatatataggaaattattcctgctttcttgttatgtatattctgaagaaaatctgtgtaacctcctttgcagaatatggtgttttgtttgtttattcatatatattttattctaaaaaataatttgaaacagatttgacattcttggggcattgatttctattttttggtctgtttttttgtgattttgagaaaattacaactaagacagaaatttcttattttagtctgaaaaaatgtatcttgacaatttttttaagttagaaatttcaggttccatgaccccattatattttgatagacattattatttcattttagagcttgcaattttcattgaaattttccattttgaaatgacgatggaaaaaacccatataacttactaattcattattaggtttattacagggtcaactattcaatactttgtgtttgcatattttgtaaaacatagtattgagctggattttaaatatttttgctatgctaatttctaaaggaaggattttgagtcatgagatgaatttaataaattgcaattgtttggagaaagtctgtgaatcaatttaataacttaatagttttaaaagttttcaataaagttgaagaaaatcagtattttctttaatgcacacttgaatgtaaggcacacttaatatcaaatgttgtcttatgctcaaataaaattaaacaaacaggaaaattatgagaattagttttccttttatattggtgttgacaaatctaaataattacttactgcaatctgttctatcttgattaacactgtggtagactataattaaagtaaaatatgttacaatttctacaaatatattttattctatatcgtgtatttctcataggaatgcatctcaatggacagtgttatattcccatacctataattaaagaataagatattgatctgataaatggttactcagcaaatgcaatgttgctgagttattatgattatttcatggagtattagtctatttttattttattatactttagatacttagaatattcatagtgttcttggtatgtgggaagataatgccgacaactcatacagtttagagactggctttaccctgtactggataacaaaacttattagcagtaaccagtcatgtgttttttttcctagagaagagtaaacagatcagaacaaccaaactagaaacttaagaccctttcagttttatgaatctttttttgctttcccaacaatttttactgcaaagctcttgtttgatgttggtataaatttaatttttaaatatgtttttgttccttgtcaacatcttttcacctgtcagaccattttatgttcctttggtagattttgtaggagagcagttgtcatctatggaaaattaccaacaatattaacaatgccaggtgagagtaattacaaatgaatgtgtcaaatacatgttggacatgtggtatcagcgtgtgcatgaattacattcctgtcctctcacaaagatcgattttctctgtttcctgtaaatggtgcattcactggatattgcttctgctgcatgcaatgcttgccacatttttggcattcaatgaatattgaaataataataaaagagtaggctttttttctttttgaatatagtgacacaacggatgttttcaaacacgctttcataacatatttaaaaaatatacttgtgggtagaacttaaaatggctattttgaatatcaacaacaaatactttatattttttaatattttgaaaactaggatttctgtctgccaccaaaataaatgactccctctttctgcttggtccttgcattgttaacaatcacttcccctgccaccgaagggttcataatgcttgcaatacacacctgtggtctacacatgaatttctcatcatgttcagtcataataggtgtaaaaaacctaattttgggtaatttgtcattggagaaagtgaaaatagtttgtgttaataaaagaaactatgagatacttcccacgtgttctgcagaccatggaattgtatgaaactcttgtaaaagcaacatgagtgtatccagatatagttcaatggggcagtaagaccatagccatcaattatttgaagaaagcctgtctggagacagtcatgccaagcacctgaatccactttaatggtggaagtggacacatatgcttagggagttcaaatcctttatgagtaacactcacttatgatatatagacagaatgcaaaactatggatttttttcctttagcaatgtgattattctgaagtacatgccttaaatatccttttgaatgtagtaacattgtgattgttatctagaaatgcctagaagccaatctttgttatggtaccgaagacaataattggtcctttcaaagaatctggcaagtatatttgtttccttgttaaaaaaattaggaactttaattgattcatactaatattgaaatagtatttctcttgacaaacttggttggaagattctcatcacctttgggcagactcattcacaggagcacctgtattgtcaaaattatatctcattcccataaaaaagatgatggagtaaatgatatttgatggtagagcaatatgatttaaagcttattactagactcaggttggacatacttattcatttcaaaatgaagaacacatatacatttactaaaaatccaaacattcttaggttcagaacatcttcggacataagcatattcatactatcccgtgcatgctttcctttctttcactctgtaacaaccattttaaaatgtggtgaaatatgcagatggctaagagagccacaagatacattataatggataaagaatgtaattacatcagaaataaatgtactttttctgaaaatagagatggtaattaaataagagaaaacaccttttattctgatttttgctaaattaatcacatgtattttcacagcatatatagacatatataatatgacatgtacacacatagtatataggtaatttataattagatttttgtatatctatccttatgaattaaataattaaatctcaaaatttcaagtgttgaatatactaatcataaagcattaggaataaaattaaacatttaatctcaaatgatgttatcaaaagaaatatggaaagcacaatttttaaagtatgctcctctcatctagaaaccagtttcctaaaactcttaagtctcatataacccaccataatcttgagagtctcataatttaatttaatattctttgttatttccaaataaaatttcctaaccagataattttgatttttgttttgttttgttttccattatttcagctttggcaatgaaacaactcagtgacaacctgagaaacacagaaatcagacctgtgagaattgtggaatctaatatagtttcactgcaggagatttcaatgtgtaaatcctaaatgcaagaaaaagggccctaaaggttaacatttacatacttttttttaattttaaaaattccaggttcccatcaaaatttataaattcctgggcagcaccatagtgtacacatggggacaaataaagtaaagccaaaagagcaaaataaacatgaaatatgtacaacttgtgcaattatgaatactttaaaaaatctcctcgggttttttacaaacctgtagtcgaaagttttctctctcatcaaatccctcgaagcacctcaaagaaaacaactcttggaatttgaaattcacttctaaaccttgtggcaagtctggagcactctggcttcatgcacatgctgtgtctacttctgtgctagttaatgccttccttggggaaccactctgtcagacacctttccatgtagctggaattcagcagtatttatcttttccctcttcttttttcacttctcaagtcttaaaactgacatctgaggaaattgtgagatatgtaagaaaggaagaaaaaaagaaataaaaccatgatcatatattaactaaaaagcaggaataaaacagcatgcaagtatgtgatttttagcacaaaaaaattaaggaaacaaaaggaaattgagcattattaatatctactccaactgaatatcaggcatgaataagtgtaacatttaggaccactaaactgtaaaattattaccaacaggatatggtaggatcctatttttcaagtcattcaaaaccaaaaaagaattatagggtatatgtgggtgagaaagcaggccaaaggtttattagctccatcttctgtatctcatatgatgctgtgaacttcagttaaaaaaaatagatcagaaagattgaaaagtgttcaaattactagtctcctaaaatagaggtgtagagatatcttttgcagtgctaggtaattctttctcttcaattgctactctaagtaattacctacatagaacaaactacatttaagaaaagagattgataattttcatcgattccttaaatttcctttttttccactttgaatttgaaacaaggtaacaagatc

SEQ ID NO: 2661 - DNA, 754 bp, Homo sapiens
gatggattaaggaccattttaaatgaactaaaatttactctttggtttttatgccttcaacactcacttttaaaaataggcctttattaagacttctaaatagattgaagttctttctcccgttattgaagataacagatctatcaatctaagagaatggaccattaatattattatttatgcttgtattatttttatcttaaaagatatgtggataatttcccactttggtctagaggaaagaatacagtaactcaatatatgtctttttttttttttttttttttttttttttttgagacagggcctgactctatttcccaggctggatccagtgcagtggcacaatcttggctcaaagcagcctcaacctcttgggctcaagtaatcttcccacctcagcctcccgaatagctgggaccacaggcatgcgccaccacacctggctaatctgtttatgtctttagggacaccagtattcatctgaggagtcagtgcctctcgaaagctgccaaaataacttgtaggatcatttaaaaactaattacagaaagctttacccaggaacattaagggagttaagataaaatgttcctgatgctgtcagagttgaactataagaagacaccacgctaaaagaaatcagatagatgctgtctttaaagctcagtttactgttactaaggaagagagatttggtctggtgctgacagaactacacgattttactggagagtcactcgagccgttgtgg

SEQ ID NO: 2662 - DNA, 8748 bp, Homo sapiens
ctgagacagggtaatgagatctggcattgctgggtggctgctttccattggatggtcagggaggcttcttggaggaacaggatttaacttgaggccaaaacggcacaagggtagagccatataaaactaaggagaaaccattttaggatgagggaacaaaccctgaaggtgtgaacaagctcggtgcatctagacatgtaaggaaggttccagcatgtgaaggagcgaggacggagaagggtccggtgaggtcttacagcaacagagggtccagccacatgaggctgagcagccaagctgggaaagcggaaatctggagaactaaaatatcttgctgaagatcacaatgcagtaaagcatagggcaagtttccaactcgaacatcaccccagaacacttccttttaaacataaattatgttgctaacttttttattgttacttagcaggcagatttcaaactgatacaaatgttgaaaatgatacaaaatgttttcccaccttaaaggcattctgaaacctagcacataacatctgtcactgaagtccatagtttccaatgccatgattggataaagaccctattgagactcatgtgtttgtctctcactgcttaaaacactcatgtgttttaagcaacatgacaagcacaaaagagaacaagtactgctcctgctctccaggaagttaccataaaataaaggggataaggtgccttccaaagaaaaaacaaatactaggagaggtcagaggagaagagagattattccagaaggagagactgaggcagatttcaggagggaagaatataagagtcccaaaagaagaaacaggaacccaggttagagagcaatgggcaaggggtaggaggtgagactaaactcacaaggaagttgcttcaaaacaatagtgccccaaatgccaagctgatgggttggacccatttaggaaaaacccacaaagtccacaggagagcagactgcacttccatgagcttcaagctgtaaacagtaacctcaaataaaacttttcccggatcggtaatttccatcctgaacaatggccaagtcaaggaagctgaggatcgagccccctaccgcatgccacaaagaacctcaagggaccccatgctctggggagctcgcaggaggaccagcacagaggtgtgactgcgttggggcagggtggccacatgtacaatgttgtaccttccaatgttcctccttaggctgtgcttatgaagtcccaacatgtcttctgggctgtgttttcaaccaagagagttaataaaaagtgggatgggcaccaactatgcctccagagacatcaggcagaatatgccacagcgtgccatgtcctcctgcaaacagtcagaaagaaaagatctctaaaagcagattggaagagactatatatacagagcgagtgccggtacagaagttttgctgcaaatacaccctctaatcccttgcaacccactgcaagctcgagagaccagtgcccttggtaaaacataggagagatcattaattaaagcctaggccctttctttgatcctgagggataaggcttgggaaaatgcacagtgataaaagtgaacattttaaaagagcagagtgagtgtgaattcccaaagagaccattcatatcaagacccaagccatgagaaaatgctacaatgcccttgatcaatactttataggcattttgacctcagatctaatcccatgaggcttagaccaagaccttgcttgatgcagacctctctgactgctgaaattggtcaggagctcagtgatgaaaatttggaaagtcaatgctgatacctgaagaaagtcccatcagagatctgtgacctgaatcttcataactttcacaggccctttctaaatgccaaggaggatgtgtgtggagaagaatatgccacctatggcatcccaatatgcctgtgcccgcctgctcttcaacaagggaatgaaacctgggtattctcataggttttttaaagcacttgtccacatattttattccgcaaataacacaatttaaaattcagctagaatttgccattttctgtcagggttgtgcatttcttccagtcaccatgacttcctgagatagccaaaacacaaaatttaaattgtgtttaaattaaataaacacaatttatgctgaagctgactttacccactctgttccaacattacttatcctcagcatctctgaattcaaatatcagccaggtgtggtggctcatacctgtaagcccagcactttggcaagccaagatgggaaggttgcttgaggagttggagaccagcctgggcaacatagcaagacccccatctctacaaaaaaattaaaaaattagccaggcatggtggtatgcacctttagtcctagctacttgggaggctgaggtgagaagatcacttgagcccaggagcttgaggtggcagtgagtcatgatcataccactgcactgtagcctgagcaacagagcaagaccccatcccttaaaaaaaatacctgccctctgtacttcatagcacctggggcattttgaacagttcttccttcacctgaggtcattatttgagaatccaattttagagactacaatgctctcattacttggattgtatcatttaatcttcccaacaatccaggaaggggagtctcttaatgattgtccttgatttccagttaaaaaatctagacccagaggtaaccttgtgaaggtcacagagtttcagagttctaagatcccatgcgagattgctgaacttgaacttgtttcttctgatctcatgtcaataagtgacttagtcaacacctgggtagaaatcatcactaaagtgagaaagcacatggtgagggggatgaatcctgtgcccacatggtccctttcacctgcccaatcctcaggcctctcacctggggtacccctcacacacatggcactttcctgaactcatggacatttcagtttgtaacgatcctcctaagattatctactttcacctatccacatttgaactatacttctttagtggaaaaaaagaaataaagccagtgctgagaatgatcaaactccagaaatagtagactgctgtataatttgtcttgcgtgacaccagatctttcaaggaactgcaagctcaagtgcacagttaagcaagatcaagatctacctttgtctttcagagccttcccttggcgaggtcaaggatatctgctgtgagcctgggctggctgaaccaaagggcaatggaggcggccaagaagccccagccaactgctcccctccccaacccccttctccctggaggtcccttcagctagaatttgccattttctgtcagggttgtgcatttcttccagtcaccatgacttcctgagatagccaaaagcatttgctgtgagcagagccccatggctggctttgcacatcaaacatttcagacagccatatatttcatagaatacaaggggaagataacactggacacacagaactttccaacagcttgagaaaatgtggtgcctggtgactgactaaatatacaatcggacaacagccaggccatagcaaaagatggaactctgatccacaaggtgcagcaactttcccagaaaacaatacccttacccacaaaaagcaaccccggaagctggcctgctctaaatcagacctgctggaagccaaattgctctctagtaactatccaggaagctaaataataacttctgtaacaattgactcaaaatgttcaggactggattaataactgatggcttccctaatttttgtccccgattccaacttaggacccaccagagaaagccaaatatggtcccctgaccaagcacacaggatgttcgcttctagtgagccgcctccagcttccccgcattgataacctccaatcagggcacacctgaagccttcgcctttttccactataaagctctcccactcgtctgcccacctttgagtctctgccaaattgcaaatgatggtgtctgactcccttgctgtagcaagctctgcataatagcttgtgcttattctctttgggtaggtcttcatttcttttcacaccagataggcatcatctttgaaaacatctttactgggtctcttgtctccctcctgcagccactgatctaaatcacagacttttttagaaagagggaaaatagtaaagaaagaaagcgattgagttgatgctcccagccactgtctgtaccctgaattttgtttttctgccatatgtcaggtggcctctcctggaccatcgtcactgtttctcctgcttccctgcagctgcagacacaggagcactgtgtaggtctggccttgagcacccacccacccagtacagagccagcccctgctgttctgaatcagtgcagtgaccacttagaacacagtgcccatgcctctgtgatctgaactgctctttccagttccatacaatgttaagaacccacttaagaatgttttaatcattcagtagtttttcgtggtatataataaaaaagtgatttaaatacaatctattttattttagattatatcattaggggttattttacaaagttacctttaaatactattgtaaataaaattaataacaaataagcaaaattcttacttttccttgtttgacaattgacatggtcaatttaatttcctttaaattaattatgcaagaaaaggatatttcctcaagaaaatttaaaatgatatatatttcttggttgggtgccaaatattcattcagaagaagacggaaatttaaatccttgtttctaatttaaggaaaaaactactttcattattggatgtgtgaaattcacccattttgtgtttatctagaaaatctagtttattgtccaaatgttcttattttccccaaaagcatcagttaggagagaagatttccagctgccattaaaatacaattgtgtgcaatgaatacattttgggtatagatagtttttattctctataaatgaaatgccaaattggatagaaccatcctttttttttttttttcaaaaaaaaaaggcttttggagtatcagagacatcctcttatgttattttaaaataaataattatttgagctgtttgcttcttggaagcagataacaagggggcaggtgagataaaaaaaaaatatatccaaactgaggtgagaccaaagatggccaatctaagaaccaggcagatgtctctgcctgtcctgggaagattccctcaccaggctccctcactggccagaggagcccacttgttgggctgccaactggttcctataaattctaaggcaattagaatcatgtggtgactgtaacgggaatgacacagctgcccaggcattagaaggaaaccacacccaatggctcaagccagtggcgagagataaaaactgagagacatctcccctgactagcagactgggctccctgcttccccattgcttcctttaaacaggccattcacacatttgcctgaaaacttacagtggcccagaccctactccctatacacactgccagttgccatgtgccttgtttctctctctctgcatgatgcttcattcctatctggagtggcccagggacaaaggactgccctcccgactctctgtgccctccctgcccaggatccgtaaattacactttttgaatttgtttcctactgtggtgtatattgcctttgcaccttccatctgaagaccaggggatgccccaggccaggttttacctgggatgcccaagagagcacaaggtttggctcccagcgccagagcaatgggcaggggggcataaactgaacacaggaaaggcaagagccacaaagacatataaacaagtttcccaggcgaggagcccctggtcacaggtcagacaactaggcattgggccatctaccaggtaaaagcagcatcctatgaaaggcacgcagtaaataccatgtccatctccccttcatttccccttagggcggtttgctagctgttctgggactggaacctcagtttagctgggggctctcagaacagacagctagatgaattaaacaatgaagtctctcagccttaggcacatcttccaggacaaggggaaggccaggggagagtaacatcagtgatcctacaagatgtgcttccaggccaaggccaggttgcagttgcagctacttagccatggtacacggtgggcctggagcttctgggtgtgcaaagatgtgactcaagagtccatctgccagcagtgagcagggcaggccagctctcctctcactggtacggtggttccagccctcacaggacattaaaaccacctggaaactgtttatgaaggttcctatattcaggaaaaatccctagagattctgaccgaaggaatttggtgctgcctgggtaccagtatttttaaatttccccagatgatcctaacatgcagtctgagtgaaaaacccaagtttgacggctacaggaatttagagcttctctaaaacatacagggaataataccagggccatacattggaagtccttccattgggaatgcaaagaaaaaagaaaaagatggccaacatctaccattttaaagggattccagcaagcatattattaaatgcagggctgcctctggcatctggaagcagcttgggtgccctggatataattctcttttaaaagtttttttcacagcttttatagaccacttaaaactggccttcatcttgtgccaaaatagcagggctgtgtttgtttagcttcaagattttcaggtccaattgattaaaaaaggtgagtgagaagcctgccaacacacagtgaggctgtcacccaggcagctgctgctgctggcttccagcatccagaagctggaacatcagccagctccaatcacctgacagaggatggatcctatgagaaggaggaccggggcttaaaaccagacgtacccactgaagtcagggcaggagatgaaaatcttaacaagtgaaggaggtatgaaaacaacagattctagggatcagcaaccaatgaatgagggtccattttttgaaaaacaaatacttctactggctgtcttttgagtgccaggcattaaacaaagtggaagaaaaaaattggagggtgactcaacagatggaccagatcaataatgaggggtaatttgagcaggacaaggctggagctggaagtgcatgcaggatgccagcatcagagcagccaggcatcagagagccagccttgactactcgccgggcctcaggggctgagccttcgtcccaggacaagggagtggccagagcttggctggccccgttccagatgaggactgtgataccagtcaggtcaacgagcaccgatagaggtagggcccaatataggaccgtgtctcacaatggtgcagacccgcagtccaacacacaggaaggatgcttgttgctaagtcttagacacgggaactggaggagggttgagggcccccagcagtgggaaggcaggcatggcatgcagacggtggacgcggactcaagacaccaactctcatcactacaggtccgtggtttggaaagtcccagcaccattccagagaaggaaacaggcccaggtttctgatggggatgggtagtagccacagagcacaagtcagccgcacccaccacacacttgctgtagtgccacactctcggccctagagggcactgacgctttcccttcgctctgccccagggccagggccaaagccatcaagtcctgggcagagggcgggagcgttcagtgagagcagcacagaggttaaagagctgctcttttttgagatcttcgctctcacttcctttccaggcagccagttcagcaaggtgggtctggggctgcctcctgggagaagaggcctttcaccctcgaaccctgcaggacctcagtttgtcccagggcaaacctcctacattgggcagttaggtcagacctgcttcaggccttggaagactgtcttctccttggcttctcttactgcactggatccagccaggacactgatcagacctccagggcccaggttaacaatatgtggcccagctctgggagagaagccagcaggtctcccaggcttttgaactcggagctgaaaaccaaacaaaaaaacgaatccaccccattgacaagtggcccagcctagttggccagtcaggagactgcacaggcactgaggccaaagctgccttggattaagaggtatggatgccaccgctgcccttttactacaggtacactggccgggaacctgtagcactgagtgacacctgatcagagagtcacccactggctgggtctcccccaactcagatgcatggctaacaatcactagctaagcatgtattcactctgtggaaagccacgtcacgttcatatatttattatctcatgtattaatatactgatgtaccacattattctaatttactacctcacttaattcttacaacaacctaatgtgatgggcaatattattattagctccattttacagatgaagaaacaagacctgaaaaggttaaacaacttgcccaagatcatccagccaagtcatgataaagctgcacttgaacacacacttctcagattccaaagcccaagtttctctctactaactgtatggcccctgcactcaaaaactgagaaatctctctgccctgggtgctgcagaatttctca

SEQ ID NO: 2663 - DNA, 57200 bp, Homo sapiens
cttctctggaggaagcaaccctgcacagagggaaagaagaatctcaacatacagtcctcagcagctttagcatgggcaacaaattaagtctctgtaaaaggcccaaaggacagggtttggtgagattctggagagctggaaacatggaggttgacaggaatgtaaagaagaactcatttacatgccaggagggtggaacaccccaattccatgaggataactgctcctgtactccagacctcaccccatgtgtctcttcatctggctggttatttgtcctttaagatctccttactcaaccagtaaatgtgtctttacattgttttagtcttgaactagaagatgaaagcatcaaataaagaaatatactgtgggtatatggattacaaaaaaaggtactcttataaggaatagaggagaagagaaaagaagagaagacaagagaagagaaagagaagattgcaagaagggaagacaagagaagagaaagagaaagagaagaagacaagagaagagaaagagaaagagaagatgcgaaatagacgcatgcatttattgaattttaatttatgacagaagtagcatagtcaataactgaggagtggaaggacaatataatcagataaattgaaaaatgcttattgacatggaaatatcaaaggaaaaatataccatgtgcccactgataaaaaataaatggaatattcatgaaaggtcccaattactgttacaataattttttaaataattaggcatttggattttatgtgctttttgatttgagtagtttaaagtgttttaaataacattaaatattattataattataataattattatttttgagaccgagtcatcttgctctattgcccaggctctagttcagtggtgcgatctcaactcactgcaacctccgcctcctaggttcaagtgaatctcatgcctcagcctcctgagtaactgggactacaggcatgttccactacacctggataatttttgtgtttttgtagtagagactgggtttctccatgttggccaggctggtcttgaactcctgacctcaagtgatatgcttgcattgacctcccaaagtgctgagattccaggtgtgagccactgcacccggtccattaaatattattttaattatattaggtcaaatatttttgtttctttcctgaattttaacactatttagaatgagtacatagttgttagctaataaaatctgtagttcaaaaattattttgtgacttactgagcatttcacttgatcaatttttataaatgtttcatgatctcttaaaaagaaatgtaagtagcatgttatagtagtatcttccgtcatcataatagtatgttctatatgtatcatgtgtcatacttctgtcatttttgttttattagtgctttgcttatttcacagattctgcttttgtttatttgtttcttaataaactttctaaatctgctagtttgggaggtttcgactttcatattggtgcacatttaactttatataatatgcttgatcatctatttactgatgcatagacttcagagagtgtcttctcttaactatccactttgatcgatgaaaaaataacgaccactcctgattttagtagttttgttggttttcatatatatgaaatgctactgtatgaataaaaatcaaatgtagatctatttttctattgtttcttccccagtgatacttttcagataagaatatgggcaaataatgattgcagattccatctttggttttattctttttgctaaacattttattctgaggtatagctggtcaattcgatagctcatgatcttaaaaatgtctttgtattctatttctttttttttttaaattcaattatttagcctcattgactacatcattcctccaggcagaaggtgcaaaagacagcaaaacttgaggactttcaccaaggatgtgctaggaggggacgtgggaaatggattattccttgaacattttccctgggccattctcttccttttttatttttgttctggttacatggggctttcaagactcaagcaattgtttgtttttttttttttactttaatttttttagtatttcaaatgtttttattatgaaaaatttaaatatgtataaaatatgagaaattatataattcatccccagatatacgtcacccagcttctataattattaattctgtccaattattttatctatactaccatgctgtttctcttcctttctcctggattagtttggagaaaacaccagacattatatcacttataagtattttgaatatatctctaaaagataactcatttaaaaatataatccctattatgacacacagagtactaacacaaattccgtaatgtttttgaatatacaaaaattgtttaaattcccacaattctcagtctttttaagaaattaattattcaaatcaggtgccagacaaattctatgtatagcaattagtgaacacatttcttaaatttctattaatctttagcttctatctccaactcactgttttttttttgtaatcatttgttgaagaaagtttaaagactgtgttacagtttcccctagtctatattttgctgattgcatttttttgtttgtttgttttgtttttgtttttgttttttgagacagactctcgctctgttgcccaggctggagtgcagtggcataatctcggctcactacaacctccgtctcccaggttcaagtgattctcctgcctcagcctcccgagtagctgagattacaggcatgcagcaccacgcttggctaatttttgtattctcagcagagatggggtttcaccatgttggccaggctggtctccatctcctgacttcaagtgatacacctgccttggcctcccaaagttctgtgattataggtgtgagccactgtgccctgatcacattcttgtggtatttctgaatgggtccactgctccttttcttataaattgatcagactgaggcttgaattttttttggcaaaaagatttgacaggtactattatatttccagtaaaaagcccttaatatctgactgtttctctttttgtgaatttagtagccattgatgattactgctggatccattatttcataaagggttataaaaggatgatattgtaattaaataactttaattattatctgaactaccttgatgaataaaaaattatcttccatcaaatatttgtttctctgagttcagagcatgtaggatagaactacaatatagatgtgttggtaattttcttatttaccagtattcaaaataacgagttggctcccagtatctttgcaggttgatcaattttgttttgtaaaaatatatattattaagcgcttatggattttgaacacctaatttgtcttaactaagtaaaattgtaattcttattggtgttcaaactttcccagctttggatagtgtgagtttctctcagctggctcctgagtcctttttatgatgatcacaacagtctttgtattcttactgtctggtttgacaatatgttctagatgcaacatgtatatttgctgtcccatcttgaaatctaaaatttttttaagaaccctagctcctttatgagaaatgccatttggagacaaaaatctgggtgaaagaatacttgtttctgctgcccaagaacaatagtactgcccagttcactttttttagtgaacagaagtatcacatatttaaaaaatatatacaatatatcatatgttcatgtttatactccaagtcaaatttagcaaattcaggaattcaggatttttttcttaaccaaattcctctcacatatgtgtcgcctttctctcatgatcaaaattccaattcttaatgatatcattattatttatttgctttgtcctgtgtagcacattcaggaaaaccgtagtagcactcaaaagtctgattactgaaaacagtttgaggattttttcttttctcatttttttcttagtgtataccacattgggaataaacaaccaatttactctgttttaacactcacttgaaagaaatatttcctcccaatgtagttatttttattaattctatacaagctgtgccaattttttattaacttgttagaattttaaaatttaaaaacaacttctgtttagtagttttggaaaatatttatataattcttttgactctatttccttagatctgaaaactggttttgtttgtttgttttaggttcatttctccatttttgaataatgtaagcaaatacattatttcccctttccaaaattaatggcagtattctatgcataattttcttcacgttggaccaaattgttttttaaagatcttatgaaattacagtatcttcccttcactccatgctattaaacgacataaacatttactgaataccttctaagtgcaaggcacagtactttgttttgtggtggaggagacaatgaagtagattttgcctttaagacacttttacaaacttttttctatggtttttgatattgcagagatctaaaaatatcactttggatgttcagataatatactgattgttgaatagttattgggttaaaaaaagtcaaaggatagtattctgtgtaaaatactaacaataaggaaaaaacaaaacaggcataatgtaattattccagaaattgtagatcttttatgacattatgatcaataaactataaaacatagacgactgcatctataaagcaccttgaaagatgaatagcctctgtgtgtgtgtgtgagtgtgtgtgtgtgtgtgtgtgtgtgagagagagagagagagagcaggcaggcagagagagagagacagaaagacaacatagattaaagaatgtgtgctaaacatttgcttagcaagtaagctcatttttcccattattttgatatacagcaaagtaaaatttcttattaatatataattgagttaggtacccttatttagacatttggatttatgaaaaattcccataatgatttcaatgtgtgggtttatgattataaataggagtccacttaatttgactgttaatatgctaaggtttataatttacatgacttctctttctaacatgatctgtgaagtagtttacgtttcaaactttacttggattcaactgaatttattttaatgattatcaatatggtcttagttcacattcccaaatgtaaaggtatctttgacaaagataaggatgtttgaaaatacatttttttgaacattaaaatttaacaatgagttgaatgtgatttgataatattcacttttaactgtgaataaaataagcttatcattatatattagcactactatattgatctttcagatttaatttaacaaaattctaatttttgagcaaaaattttctattttatctattttggtaatcatcaatgatccttgcctccttgtatttaaccacttgtgttctttcctcccacattggatccaactggattcagcaaatttttttctgtaccttccacgaatgttaccactttttatagtatttgcataagttgataactgtcaaatctatgatgtgtttttaaaaaaagacattatctagtagggttctaggcaaactgctcatctcaagaattcagttagtggatgatggatgatactttccaaatggttagtcatggctggaaatgtatcaaagcttggaggaaatacaatgacaggtgagcagtgtggcggtgtggtagcactgggacaaagtggaaggaaagagagattgttaatacctttggaaataaaacataggagcataagagtttaaaaagagtttttaaagatgtctaccagtttggtggcacagctgtgtgccacactttcaagaaagcctacggtcaaactcttctgattggttaatgtgtgagaagatgaactcatattctttgtggtaaatcctgggttttatagcctgagcatgccaacctacttttacactgattgtatcttttgtttcatctcttttcttccttgaactcattgtcctctctccatccacagcccaaatctgctcttctgactctgcatcagtgcatgtcaataccatccaagttatgactcaagatggaaacaagaaagtcatccttcacatttgcctgccccttaattttcactgagtctcttaaagattattcctgaaatatctctcaaatttgtcttttctgattacaaccttactgacgctgcagtaagttagaaactcaacatctgtagtctaaaccgttaaaatagctgcttgacttttccggtctctgtgtagctctattctctccattttcattaagtttctttgcaaaacacagacatgatactgccaaagtttcgaacaaatacctttagtggcactgagttatctactgttaaatcgccagacacctcaagagagcattcaaggttcatgatcttgaaccaatttacttttgggcattctccaaaagaattcccttggtagtaaatagtatccattgctgaggctcttggcaacatttggtgggacaaaggatgggcaatgggcaacaggaagggcattctaaaccttctctcccgaccccccctccacttttttagggatggtagatttagagttgggatagagaaagaaaagagagaaaactagccattgaaatttgatctctctctgtgccttgtaaaggaagcctggtccccaggcaaaaaggggtttatttcaagaaggagcagttaccatcttagtttcaaattaaactataaactaaatttctcctaaagtgagttcagcctgtgcccaggaataaacaaggatagtctggaggttagaggcaagatggggtgggttagatcagatctctttcactcccataattttgtcactgttatagtttttgcaaaggtgttttcacaaagcctgcgaggtggttgagaaacagaaagaaggccaatgggcatctgaactgcatagaatagtcagttttattgcttaaaatgtatttgcaagagtaagtctgactatagtaatataaatgactttgcttttttagtttttcaatacttaataataaaatatatcttaattttatattcatctttttctttgttagaattattataatgaattagaaaaattatgaatgatctttagatactcattgcaagaacaagtcatatgtcctaaatgtagaatgagatattgttttcataagaaatatctttcatcacagacataaatatccagaaattttatatgaatgttacacaaagttctgtcagcaacatagggcaagaaattccagttaacgccattcaaatagtttcatctgaaaataaaaggacatgctgtctactcttcctgtcagttttcttggacggtttgaacttgctcacctaatgtggttatgttaggtagaatttatcttttttgttcaaatcatagatctttttttcctttacctagaggaattggcaagtatacagcttttgacttactgtaaaactttcaaagtcatcactttaaacagatctttactttaagatcttaagaagactatcagtaactaatggagtaccatggtgatttaatcaactggtgacttgcaggaagttattgtaagtcaatatataaagttcatcagtgcagtgtctaaagcagcagaaattgacttgcaggcataggtgtacttcagtattgtaggtattagcttcatttctcaataaggagaaatgaaagccgagaaagattattaattgggtttgccaaagttacaaaacactgaagtgataggtccagaaaaagagcctatgttgtctgacacccaaattccatctcaaagtcctacataatattgcccccagctaaacgctatgagtttggtggatagcaggctcaacgcaatgctttttattgtgacttttcgataattaatgactagggatgccttctctgttctttctaagatgttaaactgtttctcagtgagttctcagccatgaatctctgctctgtacttgactatatttcttgccccattgacttcacagcgagatggaatatgggaaagatgtaaagcctctgcccttttttccattagtgacaatatttttccagttcagttacaggtttaagcacaggctctttgttagccaattcatctaacacctcactcacactgagtcccaaacacacaaatgcctcctaaatctttatgttcttattctattaatttcagagaaaaaaatgatatttcaccctattttactttatatctttttatcatgaaatatatatgagttctgcaataacttactgataagatggattaccaagaattattgattaaattctactcatttgtgagcaactactttttaatcccatttctcatggactgggatttatttcccaaatcagatttgcctttgtgataggtagcaatattttgagaaatgtaaataatgacattgatgtcttccagtcaataaatagaataatatatttaattaattttcttacctcatcctaaaggcaattgaaaattgaagacttttcctctccaaactgtgcaaagtgtttcttaatagaaaaaaaaaaaagactgtggcaaggtgcaaaggaaagaaaatgcaataaaaggacttgttactctggaagcaaacgtacctgggtaattagttgccagtccacttagatcgtaacacagataactgagcaagatattagtaacgctgaatttgaggagaatataccccaaactgtatttctagtatgtgatctttaaaagatttgtgtggtttatttatcacactgattttttcatttaaatgcatgcattagtaacatctaatctaaaggtttttttccctcctatgattgatggacatttttttaagaatgcagtttgtcaagaagactttcccttttccttcttgaaattcctgtttcaaaccagtggaagcaatgtcctgcctgtgatggcattcaggacatgaggtatccttgtctttgacagcaaaggacatttgttttgtttgagttgcactcttatcactgacaacaacaaaattgtcaagtgtgttatttgaaacatcaaattcaataagaacctttgtgtatgtaagctacattgtatataatgttttctttcctaaccaatggaacaaacagctagaatttgtgatattcatatattgaatgatgaaatatgatacgaatgtaattgcacagtataattataaggaaccaggagtatatttttgtgttaatgatggagtataatataagctgtttgtgaaattatacattagaaatcaaagggggtagtataacaaatagttaaaacataaataaattttatttctcaacacaagttaaatgttttagttgtcactgaaaaatgcaattaaaattagatttatatatctctgtttagaaaaagtcactatcaattggaaagaatattcaattatttaatcattcattcatttcttatgtgtgttgaatccattttcttctgacccaaatctgataaacatttttgaatgaattcaatatttgtaagtgaaaggaaatgtacctaaccaccttgtgacttgctgaggcaaattagatgaaaagaaatttaaggagtaaatgtaagagtcataacttttaaagctatacaatttatactactgctggcaaaaattacaattacattgaatctcagaacaaatttcagttaaaatgtaattcatagttctacaaagttctaactatattctattaatttaaaataatagtaaatctgccacaatataagatcctagacactgtgtaataactatgagattttttaaaaagtcaccaacagtttttatttttagcatctgtgaagcaactctcatttacattaaagttacattataattagaccatatttttataagtatagaaatctgtctttaatttcttaatttcttactttgtgaaattcctaaaatataatttagaagatgtaccttgaaacataaaattaataaacatataataggaataaaggtataatattttcttattttaaacgcattacattttcttaaagcactatacctagctatatatatatagggtactgaggtccttacctctatctctatatatatggtactgaggtccttaccaacaaaattttaggtaagaattatcatataatattttcttaagtataactaaaacaattcttctgaagttttattccttctgaggtaatatatagattacatgtcttcaggaagatatgacttcttttcaagagatgagggatataatacattaaatgattttctgtgtgcgtcagcatgtgtaggtatatccagtgtagagtccattcatgcttaaaatgcacctagagttgcatttgtgttcaaaatggagaaaaaggggaagggaagtctccctattctattatcattacaattctctcacttcttcatttcattgccttttgttgtttcctctccctcacttgccaatctacgcaaagccctggttcacatatagtctgagaatgatggtcagattcatttctagattcgccactgagttgcattagttttcctgccagtgaatgacaaaagtccaagagactattcaggcatttgagaaataataacctagattttactgagaaaaagagctagctatgaattagtagattttagaagttaaaattaataggtgaatacataataaaaattacttagtctgagacctgtacagcctttaaattttttaagccatagaattttaaactagtcaaatacaccaaaataaaatcaaatcttggatgcatttactctttttaaaaaatgattatgtattcacaatatgtataattaaatacatagttattaatctaataataatgctgatgaaatatcctaggatatagtagatggtgtgtcatgtgacccttccctctaatgcagagcagatagctgaaatttcacctgactacattctatctgggcttctaccagagtatacttttgatcttctggcattctccagggaatgcatatatatctgttcgggtcactgtttgccacatccagcaaccaccttgacctagaatcctgctcactgttctgctcacagtttaccaggcccttgtaacatgtcatgtcatcctctgtcttcagtctaacttctcaaaggcagctgctactggtccgaactgcttccttccaattttgggcagtgagccacctcttcagttccccacaggaatcactgagaacaggttgtaatgtttaacaagattttactgaaggcttaaggaacaatagaagagaaatataacacgacgacctttaaaaagatgctcaatggagccgttcttagcagagccagcatcaacatagtccttcctgcacctagtgcagagtctgacaggtggaagtgctggatgagtacagtattttttgttgagttaattaatggaattagtttgtagaacccacatattcacatgtattcacagagtttttgaactaggagcctctctaccttcaacctgccaacagtcccaagttctatctcttcgaagttagcacaaactaagttttctcctccttatctgagtatgtggattatttctggagtagtgatttcaaaatacttttattattctaatatctgctctactttaaagccccccaaattaccattatttcagttggtgtgactattctcttcctggccttcgtcctcctcttttttttgtctgacttttcaccactactttctgcccaaacaaacttggcaccctcacagtaaaccctccagctgctcatttccactcagttcctgcaattcttcttctatgcattccatttctctgtgaccgcctcctgtctggcaacctcccaactcttaaggttcatctttcatctgaggaaagatagtagttacagcaaaagatcggacgtgctggaatcaactattctgcaaaattgttcttagaaaatttcctgagatctccctgagtcaattttaagtatgtcaaaaaattctgaagactaatgaggccagctcccccagagttgggagctctcattctgaggctgccttgggtgcaactggactaaagtcaaaaggaacagctgagctcagaacagctagcaatttaaattggcatgataataactgagacacagtcatataaatgcatttatattttacacaatattttgctttaaagttaaatcatttgtgccttcataatttctaacacaatatttaataaacagtaaattgctagcaattttctttattaagctatttctctaagaagcttaaaacttatgtacaagattttattcaacattttcaatttatatatatatataacataaaaggaatagataatgtcaatattcaacaataataatgtttcctgatttgcttattagtaaactcattgaaatagtatgtcacctacatgtgtgggctataacaggagtgatgtttgggtgcctagagaatagttggtacattctcaaagggaaagacaatgctaatcaaggttggaggtagaagagaatttattttagtgacagcaaggtaaaatagcttggccacaccaatagtgagtgttgaagagtaatgagaagcatgtttgtattgatgaggagaatgcttattttcaagtaagtcaaaacaattttacattgagagaagtgggaaatagtaaattcaaaaaattctagtttgctaaagaaatcacagaaattttactgcttttcgattgtgtgttgatactacagctggccatattaactaatgaaacactgttatattttattctatcataacaaaaggaataaaactgtatgctttttatgcattccagagttacagttggaatagtacattctattactcacgtaaattcagtggttctcctaaaaagataactctggaagaaaatgtccaaatctctgaagtaaaactcaagggacaattatttaggagacaaactgcaagtgcagaatttgcctgtgaaagaaaatgctctgaatcgttttcaaacatttgatagaagttgtgaatctcctttgtgaatccttgaaaaaaatctaattaaatagtgaaaggcactgaaatttagcatttacttacaaaaacaaaactatcccttcatatgtatcatgcatgtgtataccctagatcttgtattgatgttagcactaatgtaagaggcaccataaacacgagtgtttgatgcaagctagagagataacaaactggcagcatattgctatttaaactttgtgacacatgttgcaggtgccaagataggtgcaaaattttcaaattatcacctggtttgtttgcaagaaggaaaagcatcatgctacttagaggaaatagtgtggcaatgtgattctaacgaacgcctactgtccacataagacaaacccttaaactcttcaatctgtgatgttgccacatttcattgaaaaaaatatatgccaactgtacagctgtgtgataatagccaaaattaaaaagaattccaggctggaatgcagtggctattcaaaagtgcaatcatagtggactacagcctctaattcctggactcaagcaatccttctgcctcagcctcccacttaggtgggactaaggcattcgccaccatcttagtttatttaagattaagatttagttaatcttagtaactaaaaatgcttttcagtttctttaggtcatgtttttgttaaatttttaacagtaactcataattaaattagtgaatttcatgttcatagttccagtcttaaatagaacacgtatactacagtaaaaaaaagaacacaattgcacattagttttgttaaattaatgtattctacttacttgtcctaaatattcaagtgatggttaattagctgtactcttattttagggcactatctgctcgtattgaaattgttgttactgtttgcttaggtgacactgttcttgtaagctcctaatactcacaaaagataaatatagagcatttagatgttggaaaatcttatgcattgcataatattttgttgtaactattcaaatgaatattgacatgaggcctacgcatattgtttgcctgacagcatgcaggttttagaaacaaaactgcaaatttatttcacataattaaaaaaaacttgtgaattattacaataaatagtctataggttaaagtaatattatatttattatagaaagagtctgtccagatttctgggagtagtaggaatttggtatttgaaaatacttataatctgtatagtgtctgaccgctcatgagcagtctcctaagtcctataaccttgattttgctttccatctcctgactctgagtaatacttcttcacacattcttcagtaacaactagctcaaaggctcaaaggtcaatagagtttccttcttctctcatgaaaacccatcaatattcactgtggcttcagtctgtgatttgctctcatttttcttcattaaaaaaaaaaaatccttccagcattccatttcaggcaagctctatccctggttctatttggtgctttcttctctcttcaactgactatgagggacaaaacaaaaacaaaaacaaataaacaaaaaaactcccaaaaaactgacatctggatgtgtagggaccaatatttcagagtctactctgtatcttaggaatctaaatttcgaaaccaaagcactcataaattccttatcggattgacatgctatttccattatggtttgcatattaaataactataacttctgtatttcaaagatgtcactatataacatttactttggcagtaaaatactttttgcatctttattttttattttttgtcttttgacgcttttcgcttctacctccatggcatgggtgcacacacacaggcacataacccaaatcactcaatggattagacatggggaaagatcccttatgatacatacaatgtagaagagaacagaaattcttatcaccatcaaacagtagttttgagctgtaaatatattttctatgagcctattgaaataataattcagaaaaagactagattatgccagcagtttttaactattttttctttagacttgttgaacagtgttgcattttcagttgtattggttttataaattgatccctgtggaactgtatttccaaaggtagagtgccttctctttcaaacctggattaataccactgaatttgccctttgatgttaataattaaaaagaataaaacctccttgtggatttttccttcaatgcaatttaagcttattttctttgttagtaatagccatctggtaagatttacatcaatgatgaagtctagttggagcacatgtttcatttttgcattgacaggaataatgctgagtatgttccttagtctctctggaatcaccatgctctttacaaaaaaatgttgtgattttcagtaattctatatatggtggggtggtatagttggttttatttaatctagaaatgtatagtgtgcatgaatcattttgaatggtaccatgtaggcatcaaagcaaataatacaaggctattttctagtttctataatatattagggaatagaaggcaactgcaaataactgtactaaaattaaaacatagaaaatgttctaaaatggtaaaacatattataggagtacagcgaaaggagttttttcatcatttgatattttatttctacataataataggtaactaaccctaaaatatttgatgtttatgtatgcaatttatttaaaaaacatcctcttcaaattttactaatgcttattttcaaaataatctcagagcaaggttattcgtcaatttaacacttctgatttcagagaatacaactgtcaattttacttgattatagcaaatagtgaaaataatgtagacaatcctggatactgtatataacttgaaaaaatattataatatgttaggtttaatttacataatgttatgaatttgtgaaagtagaaatcacttgtgtaaataattacagcccagtgaaaattgataaactgctgggccattcatttaatttcccaatatagtcttgaaactgctacagataaccaggaaaccaagaaaacattaaaaacctgaagaagattaatagtcgtacaagaaactttatgaaacagagttttagggacagcaatccggttggaagacgggttagtagacttgtcttatggctgagtttatttgggaagcccattatttttccacagaatatagatgagaggggactgatggagatggaggagacaccatcctcaagcccacccatgcaataaccatggatgaataattaattggatgagtttagtgtgttaaataaccttatttgttataattactttcttgggacattttccattgacctgaacaaatgctgaatttacttactgtgacattaacagagaaagcatatttgttatattactgatatatagttaatatatgtttgctattcatccttaaaaggattttttgttgttgttgtttgcgtgttttgttttgttttgagatggaatgacacccaggctagagtgcagtggtgtgatcttggcttactgcaaccttcacctcccttaagcgatcctcctacctgagcctcccgagtagctggaactacagatgtgtgccaggctaatttttgtatttttttgtagagacagggttttgccatgttgcccaggctaggctcaagtgatctgcccatgtcttcctcccaaattgttaggattgcaggcatgaaccagtacacgcagccaaagggtgtatttttaatgtttattttaaacctgaactttaacaggatctctgatcaatatgattaattttcaatatgcttatggtgaatttgctatttagacgaattctgctttaggaatttgttaggaatgccataactaaatattacagacactgggtggtttggtttaaacaacaggatttgttttctcacagttctggaggctggaagtctaagatcaaggtgtccgtagggttggtttctcttgaggcctctttccttggcttgcagatgactctcctttcaacatgttcttgcatggcattttcttcatacgtatgtatccctggtgtcactaaatgtcctaatctcctcttataaagacaccagtcatattgaattagggcccacccttatcacctctttaacattaattacctctttaaaggccttgtctccaaatatagtcacatttggaggtagatacctgaattttgtaggaacatggttcagtccataacagaaaatcacaagggtttagatttctggaacaactagaaatgctaaaacataccctgagtaaccaggggaatagcatatgctgttcagactcttggtctgatatttactgactgcttgtgttgtccatcaggaatgatggcaattgcttgagtcaggaatctgggaatcattcttaactcttcattcttccaatatttcatgaattgcctgggagaatgaaatttgctccctctcctaaatatctgttcaaactattcacttttctccagtctcaatatgaataggttagcttttcacttggctagcttactacagaaacttcctaattaccatttctgccattgtcttatttttaactcctttcatttcatcccaaattcagccttctgagtgattttgcataaacatttcagtgacttcccattgaccacagaatttggtcaaattccctgcattatttgatagagctccccgctacttaggtacccttgccctctgtctacttctccacccttgccttttctcactcatctcttaccctccatcctttggccagactaagctcatattcactgagaagctatgttatctcttagctctgatacgctgcacatgctgaaattttagcccagagatctttctgccaagaatcttattcatatttaaggtctcagcttaaatataactttttataggcacctttattgaccccgaaatctggctgagatgttcttttaaggtgccacaaaaaaaaaaaattgaaaaaatatttaattaattcacacttctcccatggttacatttctctcattaccttggaattacatttttaccagtatatatgtactactaaaatctaagtttcttaagaaataggaatctgtcctgcttatcactctaatctaagcactagtataaagcctggcacaagatagatgttcaacaggactgaagtgactcgatgtataattagattagagaatctcttttaacatatatcaatttttattaggttagggattaatggcagggtaagtattctcaaattgtgttttccttcattatatttcttttgctgtcttccattattttcatctctgtgtctacacttttctatacttgagagttttctatatttttgatcctaagaatcaggtcacttgtatttttttcaccttgcatcatacaaagaaaagcttgaaagatcctggtctgttgtataaactgactactgggatgaattggaaactgaagcacagtgaccaagttaacagagaggaagagaataaaaggacagagccatgacacagtgaatgcttcagggcagccgagctgcaggcatcaagtttctcacagataacagagttggtagctatcgttactagattgttttccaaagacagttgatgctgcagcagtatgtgtatgtgagcattttaagagaaaaaaatgtccacccaaacatcaatgtggtaaattgtatgtgtcaatgaattagggctttattctccacatgatgaaactgaaatgtgattgaaaatgagtgaagcgtgaaaaagggactcatgtttaaaacactcccagaagaaataatgcctgtgtaatgactatactaaaaaaagtatcatttctaaatatgtgctatcagtttcaccaggaattagatccaagtttgaaaacatttagtcaaataataaatttcaaaataaaatcaccctttaatattgatagagactttgactatatgattactatgagaaattcttgtagtctttattcactgtttcatgtgtacacagtgaaagctttaatatagaaacttttataatatattaggattgttttcctttaaataaagtatatattgaacataccaagttctctgtggattatgagtgaacattctagaaaatcatatttacaaatcatgccgcttcagtgggtataaagaaactattttgttgccccataaaggaaatttgccttttggacaatgtgggcagaggtaatgacctgttactggaattttactcctagaaacgaaattctttggtaaataacatacagatgatgaaagaatatattttcccagttgcaagtaatagaccaacagttaaaatattttctcaaataactagaacacttccaggggtaggattaaggttgctttctgtctattgcaatttcataactgttttgaaatcagtaattatacaaacatttattaactatcatgatgtctaggcctgtgttgggtaacggaaatacaaaagtatagtttctagatattatccttgccttcaacttgctcatagctccttggaatgcttacaatatttctctctaatatgatctttaaaaatttgaaatcttagcatgttacttctttgcttaaaaccttaatgctttcccttttcagctagaataaacgaatgctagaaaccatgattcacaagattccagctgatcttgtctaagtttcttgtctctctccctattcttctcttccctcacctggaacatcactttttgagatctttgaatgattcactctttctcatgatgtcattctctgttcatacgtccttttctcagcaagcctctctctgaccaaatattaaaaaacccccttcccagtccacaaccctaagtcagtcccatcccttacactgcttaatattctttatggctcttgtcactgtctgaaatatttgtttacataaaaaatatccaaatagaattaagtaccatggagaaaagactgtttttgccaactgctgaattcatatcacattaaaaataagtttgtggcccacagtggtacttggtgagtttgtgctacatgaatgaatgaagttctggaaaggcctttgctgttcaacatatgatgtcactgtctccacgtatcagaagtttctgcacaaccagaatggcgaagaaggcttaggaagtcaatcaaaatgcttttgtaaaatgtgttttctaatttcccattcaatatatgctcataaagtataatttggaacttagatgcagaaatagaatttctcctcaaatgagacctcaataccaaaagactgatgttacatgccgattttcccatgaatttatatgttagatgtagtctttgacattttttcctgaaaatggatatatatctaaaatttgattttaaaatcaatttttacaaaaaagcattaattgtgaaaaaagttagaaagctttggtaaatatattaacattaaaaataatatatgtatattataaagctgtgtttttatgtaaggatttcttaaaatagaatgttattataataggtatatgtgttgtaaaataaaagttgcacttcaggttatcttaaaacatgactgggtttcagactttacaaatgctttactacagtataccaagaaagatattttggactaaatgtatacacatgttaggcactgcatcatacaccatttaaactgcttcaactgtatctgtcttattttaaagactgcacttgcaaatactgagggtgtattgagaatgtttatctaccaatttccttttttgcttgagagacagtactcaatattataaattacccccctggtagaaaatccattccaggaaagccctctgaagtgaatacctgttaaactaggagatctttaaaatgaatacattttatgatgagaaaatgaaattgaaaaatgaagtactgaaataaaatgcctgatgcttgtagaaaaaaaatgacatctagtaacaagtaaaatttacctattaagccacatctcattaaaaacatgtatagaacagtagaggtgatatgaaatagccagtgtcatgctcaggatatatttgtgctatatgtaattgtgctattttaattcatacaattaaactatacttttgtagatcactttaagtaaatgttaaaaatctgatattgtaaactaagtttatgagaggtcatgattcatgggtgagaatttttgagttgtaccattgagcaatgttcagattgaattatttccattttctgtctgcccttggggttcctcagcacaaatattgttgaagaacatgcctcagtggtatttccttatacatacaggcttttctgggtgaaaaaacatgttctacatataaaatacacaataaacaaattgcttcagtgtaagcttctctcattcccttcctctttccctctctacttcttcctctgccttctctccatcgctctgtctctcccctcccagggaaattttgcttttgacaagtaacttttaaagtgactcaatgactgttttctcatttgaatctcatgtcatatgcagtggagtttgtcgaagaaagctgctcctgaactgctgtaataacagaagctctactaacttgaagtttgtaacataaaagcactctaggaaggatgaaatggcagctgggaacaacactttaggcaccggaagcaatacagcagctgttgggggacagcattcctcttatagacgtccatgtgattttctcagccagggacacatctgcagggcattatgaatctgccagaagattaaaaaattcatttacacttttcgaaatatctgagggaaccatttgaagtgttagagtcttttgtagcttttacaaggaggcctttatggaagcaaaaaaagtcatgtattggaaagactagatttaaattaacattttttaaaaagttcatattttaggaccaggatagtaaattttaaaaagtgaaaagaaagtaacattctatgagctaaaaatggttattggtaaaaaattatcagtgttctaagtcatgttataatttatatattaatttctctctctgtatatctaaacacacacacatatatgtatgcacatatagtctctaaaatattacatacctaaaatattctgcacaaatgaacataattatgtaaatgatatttatagagggcttttatatttatcaacaaaacctatttaatgttaatgtggaacttcaaagctgaaaggtattatagggtaaatattttttagtagagattggaagaactgagttttagaaaatttgtctttggcgctccaaaattaccatagcaattgaatacagtacttctatttctaagttaacacaatgacaaatacagtgcctaatgcataatagttctctttttcacactaaagagagatattttaaatgttaaacattttaacatataattttaattgtcaaaattataatatgaagaatataatttagtaacattaatcatgtaaaattggtgaaatacatgaaaatacttgaaaattaattcaaatggcatgtggcttttgatatgatgtgacgggatccatcatattcttggggcaagacagataagcagtcaacaggttactgcttaatacctatgtattagaagttcaagaataaacaagaagtggagctcacctgcctcaaaggaaggtcgtgatccattgttcaatttctccacaagagccacttctcagccccagagctcacggactgagcagcagtgatctcctgagctcctctgaagaaggactgatggacatttatttaggtagctacacatttgggaaaggagaataccagggctttagaggattcttggatgcagaatctgagttggcactgatatttaagatccaaaatgtcctccctgttaaactcagaattatgtgatcaagttataaacagagctcaggtccatcttaaagtgggtccactggatttatgttggcagaaccttcaccctttttccttgatctgtggaatgagagatagaaggaaagtgagaaggaagcttctgaaactgtaccctctctttaaaatacttaatcaagaagcattggtcagtcactaacagaggcatgagttcaagtttgcaaggcaatttatgtccctaacttccctatgaaattagactgaagctactttctggaggataccacattcttgttatgcttttttcctctcctttttccacttccatttcaccccttggcctgaaaacacttcaataaatcatttgaaagttacccttgactcaggctcttccctagggaacgagatctctgacatttgaaatagcacactccactctctacctcttttgttttttatcctcttacccattttatttttacatagctcaaaagtacttcatattatagttctaagtagctatttttaaatttatctaaatggactcttcccctcattagactgtaagttattctgagtgtaggtactttgtattgttcactatgttagccctcaaagaatagaacctaaacaatacttgatattaaaaaatgacaaataaatgaatagatgagtatgtaaatgatttgaaagagcacattttcatttactttattattttgttgttctttagtattataggtagttcactaagttactcctaaggaaaattcagttgctcaatttaacaagttcttttttttttttttttttttgtaatcctattgcgtatgtagattcaagtagaatcaataaaatattttgaattaaattatataaactctaagtgagaattagggggtttatatgaacacacatttaactttagttttatacttagattatttttccatattcacaaaatgagttatttcctttttatgtttctaatctgtgtcttcagtattctagccttacatgctacaatctacctcctcttggaaacatagcatgttctgaattgctccctgttggttaatagtcattttataaatggaatagtataatctttaactatcccgagatgccatcaattttaaaaatttcaaccttttacacatttaagcttctgaaactcagtgtaaggtggtggatacattttactatactcagtaaatcataaaactccagtaatttctggaatcaaatttttgaaatcattgtaatttttatagcaatattatcttatatcaagatttccttttttcacttaaactaattgattgaattatttctctacatattttatagtaactggcctttaaaatagagtgagataactttaaaatatagtgtattaaatcaagaagatggcatatattgagagaaagcagacactttgagtttatctcaagctgtcatgcatattataaagcctaaagatttaagaaatgaaacagtattactcggtgggagagtggaggcaataagaacatgaactaaacaattcagattttttaaaggtacctctaaacaatcaaggccaatagtagaggcattggaactaatttggcatcccaactctgctattatctaactatgtaatctgggatataagtaatgccatttataaaatgattttatttggtgaatgttgcatgaatgattttatatataaattcctattgtgtttttacatcaccttattcttccctgtaactccatacaagtgcccatttgagccacaaagtcatgttagtcaagccagtgaatggaaactgtacatgcttgaattttaagtcacagtccacaggtaaaattaggagttcgggaagaatactttctgggtaagttgttcccatactataagaaattgaaactctgggctgaggtttagacatgagaatgacgggaaatcaaagtagaccacagtgaatgaagaggctttgtgctctgacttgtcaaccctgagccttagcatccaggtttgggataataaaactcagatatgtcaaccctgagccttagcatccaagtttgggataataaaatctcagataagtttgcgcatctgagagtataaaggagcccttgctctccagaagtgtcagttaaacctaaaaatggcagccttgcaaatgctctggggtgtcattgtggcatgagagcaagagaagatagatggttatcagagttggatgtaggataattatatagtttagtttgcccaggacatttatgatttacatctgcttttcagtaacatttatccatgacagcatgtcctagttttggctgataaattagataatcactcaagttctaagtggcaaataggatttgaagtagccctatcaagttccctatagccctcaagatggataaaaatgtggcttcattctattgtgcttcagtaaattaaaggagacaaaacagttgaaagaggcatacatatgtagaacatatctcaaaataataacagctgtttatgacagtcccgcagccaatatcatactgaatgggcaaaagctggaagcactccctttgaaagctagcacaagacaatctctctcaccattcctctctcaccactcctattcaacatagtattggaagttctggccaggtcaatcaggcaggagaaaaaaataaaaggtattcaaatcagaagaaagaaagtcaaattttctctgtttgcagatgacatgattgtacatttagaaaaccccactgtctgagatcagaaaccccttaagctgataagcaacttcagcaaagtctcaggatacaaaatcaaagtgcaaaaatcacaagcattcctatacaccaataatagacagagagtcaaatcatgcatgatctcctgttcacaattgctaccaagataataaaatacctaggactacaacttataagggatgtgaaggacctcttcaaagggaactacaaatcactgttcaaggaaataagagaggacacaaacaaatggaaaaacattctatgctcatggataggaagaatcaatattgtgaaaatggccatactgcccaaagtaatatatagactcaaagttattcccataaagctaccattgactttcttcacagaattagaaaaaactaccttaaatttcatatggaaccaaaaaagagcttatatagccaacaaaatcctaagcataaagaacaaagctggaggtatcatgctacttgacttcaaactatactacaaggctacagtaaccaaaacagcatgtcactggtaccaaaacagagatatagaccaatggaacataacagaagcctcagaaataacaccatacatctacagccatctgatttttgacaaacctaacaaagagaagaaatgaggaaaggattccctatttaataaatggtgttgggaaaactggctagtcatatgcagaaaactgaaactggaccccttccttacaccttgcacaaaaattaactcaagatggattaaagacttaaatttaagacctaaaacaataaaaaccccagaagacaacctgggcaataccattcaggacataggcatgggcaaagacttcatgactaaaacaccaaaagcaatggcaacaaaatccaaaattgacaaatgggatttaattaaactaaagagcttctgcacagcaaaagaaattatcatcagagtgaacaggcaacctacagaatgggagaacatttttgcaatctatccatctgacaaagggctaatatccagaatctacaaagaacttaaacaaatttatgagaagaaaacaaccccatcaaaaggtgggcaaaggatatgaacagacacttctcaaaagaagacatttatgcagccaagaaacatgaaaaaaagctcatcatcactggtcattagagaaatgccagtcaaaaccacaatgagataccatctcacaccagttagaatggcgatcattaaaaggtcagaaaacaacagatgctgaagaggatgtagagaaataggaacactttcacacggtgggtgggagtgtaaattagttcaaccattgtggaagacagtgtggcgattcctcaaggatctagaaccagaaatacctgtttgtcataaacagctcattattttgagatatgttctacatatgtatgcctctttcttttgtctcctttaatttactgaagtacaatagaatgaagtcgcatttttatccaccttgagcactatagggaacttgatagagctacttcaaatatttgacccagcaatcccattactagatatatatccaaaagattatagatctttctactataaagacacatgcacatgtatgttatctgcagcactattcagaatagcaaagacttggaaccaacccaaatgcccatcaatgatagactggataaagaaaatgtggcacatatacaccatggaatactatgcagccataaaaagaatgagttcatgtcctttgccaggacataggtgaagctggaaaccatcattctcagcaaactaacacagaaacacaaaaccaaacaccaaatgttctcactcataagtgggagttgaacaatagaacacatggacactgggaggggaatgtcacacactggggcctgtcagtggcgggaggcaaggggagggatagcattaggagaaatacctaatgtagatgacaggttgatgggtgtagcaaaccaccaggcacgtgtatacctatgtaacaaacctgcacgttttgcacatatattccggaacttaaagtataataataaaaaagataaaaaaatccctggatgcaaaaagctgtagaggggactagactaaattaaaggtactaaacctgaaatgacagtgtttatctgagatttaataagatcatagttttgatgattacttgaaataaaagtttgagacaaaaactaagttcagttacagtaaaaaataaaaattaaaaaaatatggattgagaaaagtgtacccactgcaagtgtttttcaaactattctctgaagaggtgtacaggtctaggccctcagaaagatatcaagggcaaaggggtgacttgggtgagagatctgagctcatcaccccttccttaaacagtttgattctgttcctacttattctaactattttaattaaagaaaagatttaactactaaaataaaacaattgatttcatttgttacttttctatttttctcacagcccataagtgacccaagtcctactgcttctattttcaaaaatacatccagactctgatcatttcctactagccccactgttagctaccatgttccaaaccgttatcattcctcactcacattattgcaataacctcccagctggtcctctttgatactcttgttaccgtatagtctattctcaacagaatagcctgaataatgcttttaaaaagataagtcaagacagttcacttttgtgcttatgactcttcaatgatatcttatcacttaggctctctccagcttgctccataatgatatcacaaggccctgtgtaagctgaacccttctacatactctgacccttttccaagtttcttttgctgtctctgcattacctgttctctgggcatctatgccgtttgcacaaacatgctaatcatgcttccattttgggacttttgcatttcatgtttgctatgactagcccctccttgctccagagtaggcactcaaaagtaagtttaattaccattaaaccacatgatttctaagaatacttttataacttaaggtctgtaactataagaaattgttgctttggaatacctgaaattgaaccagatgctttttttcaaacactgtaaggatgatggactctgctgtttctgttttggtgctaaagtgttaatttcaaaattgtctattttgtctcttgatagggaaatattggacgattgatgtcaataccaaacaagctacaaatagtttgcattcaactaccaatatttgtaggagaaggataccactgctaacttacattatgtagcaaagaatttaaaaattgcactgctgttaaaatttacaaactttgtaattttcaccataataaattcaaagattactgtcttatgttcatggtaccaaattcactcctatacattttacttatttaggtgttacttataacagttggctttaatatcatgccaaaatattaccattcaaaattgttcagcagctatatgttattcctagaagtagacacttaaatgttaatttgtcaagaaactcatgttctattggtcaagtcagttaactttttgaggactcaattaatttattttctttaagttgtaggcagccacaaaaatatcaccaatgatcctcacctcccagcatgaatgcccttgtataattctgtccccttgactgtgagctggacttaaatgaattcatttctgaggaatagaatacaaggagaagtgttgggtaggcaattctgacatcaggcatgaaaaactctatgacttctgtcttaagtgtttctcattttttattacatttgcttgttctgggagaagtcagttttcatgtcccgaagcagcctgtggagagtcccacatgagtgaacttggaagcagatatgaaccttgtcaacaggtatatgagtgagtttggacatagatccttgagaactaagagccatgtaagtggatttagaagtgatcttctcttcattgacccatgagatggcagcacctgtcttagtcaatttgagctgttctaacaaaataccataaaccaagtggcttataaacaacataaatttatttgtcacagttctggaggctagaagtccaagagaagggtgccagaattgtcagactctggtgagagtgctcttcagggttgcagactgccaatttcttgttgtatcctcacatacaggatagcagaaaggagacacaagctctctgtaactcttagactcttataagggcacaaatcccatttgtattagtctgttttcatatcagcattagtcctttcataagggctctatccttatgaccataccaaatcctaattacttcccaaaggccacactttctaaaaccatcacactgggaagggagtaaagtttcaacatatgaattttggaggaacacaaacttccagtctataacacacctgatgtcacatacggttgcagcctcatgagagacactgagacataaatacccagctaaactattttcgaatctctagctctcagaatctatgaaatattaaatgattgttgttatcatatgtatggatatcccatctaggaatatgttacctaaggatgacattattgattactataagattttttcttctgtctctgaaatctctctttgcttttctaactataatcagactagaacataggaattgccattttcaccagactgtaaaaatagtgaacttgagaagacatgtgattttgcattgtgataaatctgttaaatggctaatttagcatataaaatatgtttaacatatgcaaaattgtcctaaaatcgctagtctttttaaaaaagtgaatttcttaaatcattcgcccaactttagtctgaagtaaaattaagacaaccaagttagagtgactgctctagccctcttgcataagaaggtcacttaaaggagacttggttcaatttagatctaggctgcctcaaaaggacagcagtagacagactggtcagaaggcagcagccttgatcttcatgactcttgtccttacatttccagcttacaccaatgccctttgaaataacatgccttgatctgtctggtccatccacattgctacagttttaattggtcaaattcccttgatatcaatccctcactcatggccttgctatattatggctctcgtaccaggagcctctagcatcactgatcctttcatttgtataaaaggagaaatctttcaacattatttatataactagcacctccatgggtcaaagcaccagcttgcaacatcagctttcttccaatcttttaaagcctttatgagattacaggagcttcactattttcatctttaccactttctcatagctaaacctcagtatggatttatatacatggatacatgcagacaaatacatatgctgatacacacgtgcatataaatatgagaattttcttcttgtttctagctgtagtcagtgtaataattatctgacagttcataaaataagtaaatttttttactatataacagatgacaccttatattaaagtgtacataaggaataacttaactataggctaaaattaatcagttctgtttttctgtccctattgaaatcagtaataaaatgttttgtctagtcacacatacatacacacacacctacacacacatttctccttggagaacatttagcaacaactatcttctatttgttcgggcattttcataagcaaatcatctttacagttctttagtagtagtctccaaagtgcatttcttggattattgttttgttaggtgttgacatactatatactaataatcctcaggttatgtgtgtttggaaaatacacagttaaaaaagggaaatagattctgttatttcaggaataccagatgttaatagatttttattaaataactgtaagcctgttaaaattaacataagcctattaaaatttaattattaatgtgcaatggaaactatgggataccatattattaaaatgaaacgataaagaacatttaggagaactaaaaaacaattctagaagagacatttaaagcaaaagtagatcgctcatggtcagcatcatttaactattcagcaactggaagtcagttttgggtgaggcacctcagtgagcatctagctattattcatcaggagcctcaggatgggagcaaggttttacttaaacacttttaaattacatagtgacgtgcatggcttacaaaaatgagatattgttgtattagaatactttcttacataacaatattttatcatagaagtccacttgataatgtaagattccttgatgaattgattcttgtaggtgaatattaatatacacactaaggacgatcagtaaatacttgtctaataaaaatgaccagaatcctgagagggtccaacattcctttctctgttgatcttatctcttaaatatttctccagttggctgggggcggtggctcacgcctgtaataccagcactttgggaggcccaggcgggtggatcacgaggtcgggagattacgaccatcctggctaacacggcgaaaccccgcctcccctaaaaaaaaaatacaaaaaaaaattagctgggcatggtggtgggcgcttgtagtcccagctactcggaggctgaggcaggagaatggcgtgaaccaaggaggcggagcttgcagtgagcggagattgagccactgcactccagcttgggcgatggagcgagactctgcctcaaaaaaaaaaaaaatatatatatatatatatatatatatatttctccagtcttagcaccatctcctttgcccaagttcatgtctttatttcccacctttaaaattaatttttatttccaacctagactgtttttcctatgtaattttgcatgcagctttattctctacattgcattttctactttgtcaccagaattttttttaatgcaaatgtgattatattgctttcatgtttatttgcagtggctctgtgcacctacagggtgcagtccaaattcatatgttgaatgcatatgtttatagttcagctatttcatgactttatgcttttacacctactctcctgacacctcaaatgccctcttcagttcagtagttccaggttcctagaactacttttaaaaagtcaaggtttctagaaacataaagagggaaacactcttcaagacatacatggaagcttttaacatgcttgcttttaaaatgagccgatatttaaattcttaagaatatttttatgttctcttttgttctttgaaacaacttcaaacattctcaacaaatttgaattgtgaatagttctcatagttctaggaaataaaatgaaaatgttattaaccatttctccctcctgagggacatgggagaactagaggggagtaaggaccacaatagtttaatgaagacatgaaatgtgaaataccaagttaaatagttcttaataatatgactaacatagtatgtttgcaattgatattttattgtgatgtaaatccttcagacactttctcacataaatattaaaatatgcttttaaactatttcctgaaagggcttgtatttaagctatgttctaaaagggctttccagatctgaagttagacaaaactattaccctcatcaatcaggaaaaaaaaaacaaaaaacaaaaaaacaagcaaaaaacaatgttttatagtggcagcaccacctcctgatacctcattttcctacttagttaccacagcacagatccatttctcctgagcttattaaaatatttgtatgtgtagtattcttgaatgaattaatcaagaggaggggtagtggcacatacagagagggtatttggtatcataagaatgtcagtcactgagagacacttatagaaacttcaccgaattaagtggatgtgaatcctcagttacatcagtcaaagatgctaaatcagaagggacttctgatttcttgtgaagacaagatcagggagcattggtagtcatttcagacagccttgcttggcctgtcttctctaaagtggggcatccttcagggctgtatttccacgtgcttcccctcaaaattatagtaaaacactaggtgctgtttttacatgcaataacaagtttgagctctgttcagctggaacttccatcttccagtgatccaccaacatgacaaacacaaaaagaaagaagaaggacacccattgtatgctctctaggcattttagaaaacttggaatttttcctttggccatatacctatgagtctacaagaaaggaaatattgtatacatcaagggaatgagcactgatcagaaagaaatgcccgcagatgttaccgtgacaaaactagaagagtctacaatgttacccaggatgctgttgtcatcttggtaaataagcaagttaaagccaagattcttgcaaagagaactaatgtaggtattgggtgtattaagcactctaagagctaagatagttttctaaaatctgtgagggaaaatcagaaaaagaaggaagccaaatagaaaggtacctaggttcacctgaagaatcagcctgctccaccctgagaaacacactttgagaaccagtcgaaagaggcttaagctgttggaacctattctctatgaattcatgccataacagcataaataaaatgcataaaataacaagttttggattccaaagttagctcttttatttttctcttaattaaatagaagtgtggtgtttcctcccccaaaagagtatttaaagcaaacttggtgtcctaattcattgggtgatgtccttaattttaaaatttagtgccattcttgctgggaaaggaaagtttgagctcatttctggcctgcatagaacaatatgattcaaacatagaacaatatgattcaagcatagaacaatatgcttctgttttccatagaaagagcaaaacaatttgaataaaactatatcactttgctcttccgtaggttatccagagataatctccccttttttgtcagatctttgtgtatttctcttcctcattaattttgtattaacacccatttttccctactaacctctccatttctaatttttctttagatcaacttcactcctatattatttacccactcctggaggtaaggaaaagtgttaagggaacacaattggagagattaaaaagataaactgaagagttggggcaaggctaaaaagccaagaggtataatggggaccaaattgtggagacagagctaaatgtttttctccctgaaggcaataaaattcaattaaccaattggtaattttttgtcccatctgcctggtacagtcttctaggtgggtgcctgattagctctttatcatacattagagctcagctcatatactgcttcctgtgagaggtgtttcttaatctcccaaggtaaaatgctgtcctcactcccaccatttatatcacatcagcatgttataatttctgcatgtcacctatgactatgtgaatatattttatttcatcatttgtctgtttccttccaataaaaagtaaccttcatgtgaacaaggtccatgatttgtggttgttctctctatccctaatctagtacaaagacacataagaaaatagttctataaagataattatttcttttcatagaaaatcataatttaattcacagaataactagaaaatgataaagagtgaaatgcaccctgtaaaccataagtaatacactagttcagtggtaagaggaattgttatggctagaaacatttagggaagacttcatagaggatgagagctttaaaatgaccctgaagaacaggcaaagagaagaatgggcattaccacggagggagaggtcttgggcagggaataggggtaagaattagacttaaatgctattaaatgccttatttctcaccacccacttctaatttctttcatgtaagcgtggtatttgatttgaaattacccttctgacttttttatggataaacatgaagccagatattcactacgacagcttgttgaaggaatggatggtgaaggcatcacttgtctcagtgctgaggtgcagccctcaataagcctgcggttcaatgaagtgctgtctttgtgacaggatggatgaggcagctatgttgtgagcagcagttgtagattacgtgggctgtggctttcacaggaatttgtcaggctaggctaggtttcatgtgagaaacttgaagcacccctcgtgaggctgtctacatgggctggcataagtgtctacatgggctggcataagtgtttctcactattgctataggccagcatatacacattgccttctctcaccttttgatttggaagccaactgtcagttttcgatgtcttcacctgataaaaactctgcctaagaatcatttttttccactggggatttagttagtgaaagggaagccctaagtatgcaattttaatattgaggaaagggcagtacatagcattctacccattttcactacctttggcagtgtcttgttttgtgacattgtgtgtgcttgtgtatgtgtgtgtgcccgcggggttttttttttcctgctccttttcttttattgccatattgacagaaacctgtgcccttttgggctgcacagtcaaaatagagagcaatctaatttgaaatggctattttaaagaataattggcttgcagagacagaaacctctagtgggaaagaaaaaaggaatacagatgataaatgagcagaggtctgaaaattattaacaaaaaatagtgaagtatcttgatgacaagaagactttgatttactaaataataagaacatctgaattgaaggcatcattgtattgattttcagtaagtccgtaactacaaccaaacactataactgatgtacagaagttgagggcaccatttatattcagaacatataattttacctttggaagttatgaatgacactttttgtgcccattggtgacctcctaaatattctataaaatttttgaaaactataaaaattctataatgtataatgatatattaaatattgtgttaatagtttagttaaaatctttccccaatgtgtatataatcttaggtatgttttgttatgtatgattgtggcatatttctgtagacgtaccaaggaaattttgttttatttttttgtgtgagacttagtcacgctctgccacccaggttggagtacagtggtgtgatctgggctcactacaaactctgcctcccaggttcaagctattcttataccttagcctcccaagttgctgggattacaggtgccagccgccatgactggctaatttttgtatttttagtggagacagggtttcaccatgttggtcaggctggtctcaaactcctgagctcaagtgatccacctgcctcagcctcccaaagtgctgggattacaggcgtgagccaccgcacccagtcaagaaggtctatacttttttaatttaaatttttaaattagcaaataataattgtccatattcaaggggtacacagggattttgtgatacatataatgtgcagtgatctgatcaggacaattaacatagctgtcatctcagatgtttatcatttctttgtgctgggaccatttaaccatcagtgatccatatttactttgaaatgttatataattatttcaaacctacagtgcttgataaaacatagaaaatagaaatactacagaaacacaacatactttccaaatagtgacaaaagattcacaaagtatggaactatacttaattgtttatttgtttattcatttattcatccctttattcttttccaatttcattgtgcttgttaatagatcacttggttagttgattgaataaattggtttatttagtgttagaaataccctaactgttccagtttggatttaggccaacattttccatgtcctattttgtagaagaggtctatggaaggaaatgtattgcctaggtcatatgggtggttgcaagcctggactcatccaaatactaaatagctaagctacatctgtccttcatgactccagttttatttactgaatgttcggtcctcttatgtccatattttcttcatttactgaggaacttgtatcctcacatgtacctattctgctgttctttcatcaccccatataaggtgaatatttaatttatgaaatatctgtaactcagatattttgaattgcaacatctaattttgaaatgcaacatctttctctattaagaggttaggttttaagtagttagtgattgtagaatttggggagctagggtgtgacatttctggagtgcctttttcacagcagaaaacacgagaagaaaaaaagaaaaagaaaacaaatatttatttaatacttttattatgtgacaattaccctacatatacatttacacattttatcttatttaataatatcataaacttgaaatgattgtcatcataagtaattttgtttttgctaatgagacctaaaaattgcttgcctgagatgtccacaaaatatctgactacccattataatagattcatgttccagtcactcaatttctccactgtaatgcagctcactatgtatacagatgtcatatactcctcttcactttgcccagtgggaatcaccaattggaaaatcggcataagaatgctgatattctacctgctgaccaaggggcctcatgtcttctaccagcatttgtgagactatagaaagttaatttgtttggtttacttgagtggaataaaatctcagatccttcacagttcttgacaatgatgtcatcatttacttggtcatgaattttcttagtggtaaatgaaataatggttaaaataccattaaataatggtaatttttaaattaatgactttttagattcagtgacatgtagtgtctgatatatattcttgcatttatacatatagaatcaatgacatccacactttctctctaaagatcttatcaaagcttcaagttcctataccgtgaagctggccaaaacagtataatctcaatatttacacttaaagttagagatagagataagccgagtcaatttatacttttattgtcactttctattcccaccttgtaaacagtatcctagaaaatttccttggaagagatttgtttgacatggctggcttcaggaatttttggccgtaacatcatctcttttcttactttagtgaaatcagcaagccaatgtattactttagagagggaaacagctgtgaaacagccaagattttaatacttccgtattatcttcctatatttatgatcttcccatagacaagcaacagggaaggcaaattataagattttgtgttaagaacagaattagagtaaataatattaatatcattttgttgtctactggtgcctgactggaaaaaaacaaaacaaacagaacactattattcttgccctggaacatgccccagtgcatcatttgctctattgtcttaacctcttttttttttttaacaaaaagacagagtatcactttgtcaatcacactggaatgcagtggcatcatcatagctcactgcagcctcaaaccccccgggctcaagtgatctaccggcctcagcctcccaagtagctaggtctacaggcacatgccaccacacctggctagttgatttatttttagtagagatgggatcttgctctgttgcccaggttggtcttgaactcctggcctcaagtgatctctgccttagcctctcaaagtgctgagattacaggaatgagccattgcacctaacctaaattaagcttattttggtagtttcattcttcaggaaaattgctttagcattgcacttaaaaaattctattgagatggctgaggatttctgaacaaaccacattcctgtgggcgttgttttgaatgagcatttgaaggtggctggatgtgtagcagctatcttcaaatttatgtagaactagcatgcagacaaggccacaatactgagagatagcaaggtagaaagattaaatgtccccaaatcaccagactccaattctgttactctatgttcaaccaatgtgtttcctgagctcgtattttgtgtctctttgttgccttcctttcctggcaagagctgaatgtattggtgggaatggaatcaggttgagcagaagatgtatcaatacatgagctatcacttattccttattatagctcttctcataaattttcagcctagcttagttctttcctaattgagaggagagaaatcagttttttaaattctcgtttaacagctgtttttctttttttctttttgaccccagttttagagattctttaatattaaagattacaaggtgatgttctttttctcaaaggtccttatgaaggacaaagaaagagaactgtatggaaataaaagtgaatcagtctttgacataacaaatttctaactaccataaaggatactttatgtgtcatatttctacatatgtaattcaccattatactttcttattatttgtagccatttaatcacttccccaaacaaaccatgtcttcaggcatttcttactctgtcttttgtaatttctgttacttcttcacttctaacaaaattattattacatttattttacagttgttgatggagagttttaatacatcagatattgaaactcatatttttttacaacatcactcttaatggacttattatctgattgagtttttttctgttttgcactttaatatttgttcttattgatagaagcacttacatgttaaaaaaaataactttcccatttctgccatggtaggtgccatgttctcccatgctaggtgcatgctagttgcagggaataattctctttcataatcacaaaagtgcctccaaagatagttctgtactatttcctttgaaaggctcttttgaaatataatatttctatgaccacatataatttcctgaagacctttaataaaaggctaaatgctagcttttatctcacttagttggcacaattttccacatttatatcacagattttaattttatttcagcaaccttatttttaaacttcaaatagtcatagaattctatgtagcttccaaaccattgatcggctattataagtaacatctcattctccaacatgatcccctgcattactctcctgcacattcgctgcagttacaaatggaacagggtcaaagtgaaatcatttcaatcactttgagtatgaatgaagagtagcccctgaaaggtagagtcaaagctcagaatttggatatggcaacaaattgagtggtctgttaattctaaggatgcccaccagaatgtgaactagaatgtattaaatattggggacctgcatacagggcaggtaggactcctagagacctagaaaaatgttcaacttagttttagatccaagaagctgtcactgttattatttagcatgatttgtaaagtcttgccaatgtaataagattgtatacagctgaggcaggagaatcgtttgaaccagggaggtggaggttgcagtgagctgagattgcaccactgcactccagcctgggtgacagagcaagtctccatttcaaaaacaaacaaacaaacaaaaatcgtatacaatgtaggtagcaaaactatggggaaaatgaagaaaaatggtcattatttgcaaatgacatagctattacattggttgaaattgcatgtcaactgagagtcctggaaaacagtgatgtacaggaaattggagtttattattattatttctgaacataaaagggtctgaaggtaggaatttcagtactggcatgaatttctatgatataagcaggaaatgaggctccttctcgtttttgttccctcttccttaaggcatgattgttgttgatgttttcaagataactactggaccctaattgtcattacctaccctgggcaaagagggtcaagacaaaggcaataataattttaaaaaggtcaggctaaatgagtttgtcctgctgtttaagtccacctaagaactctcttagataacaaagaaagtgaacgtgaagacaggactggagcacagtcactatacaatagagtacaaattacagaaaccattaatggggaagtattttgttgatagaatagtataggcaccagaatttgcaaaaaaagacttagtttcaacctatgtagggtttataacgggcaggttttacactaccttgataggttttctcaagatgagcacacctataacatatgcacaattcatcgccatgagttatattaaatcatgacaaatcataatgtctgatagaccagtcctgatgtgacatttgtcctgatgtacacataaaacttaaggtatacaaatatactcatgtactttataacctctcaagtttggttactgtgtacttcccaacagtgtatttcaactttatacactttattgctctgctgccatccaagagatttctacagttctcatgttactatttactcttgaagtgcctattgtacatatattttacttcaacagctataaaaatgtctgctagctacttaagaatcattacattttggaaaagaaaaccacctttaaatcaaattgaatatgcatggatctttaaaaggtctgacctcacttaaacaaatgttaccttaacagaacagttgatcttatggaagatcaattatgacaaaaatcactaagtccaaaagagaagtcttgtctttggaaatgaacatgaaataatttatttgacttctaatcatatttatgccattagaaaaatgaaatgcctttaccacagaggcgatacagaaatgtatatgagaaaattgattaggtgctaattgctttcttgatccttaacttcactaatattattcacgggataaatataaatagatcttatgtcctgtagctaggtctttttctaaattatatgagcaattttaaaggaacaactgcctttattcttagggagaaatttgaataagatttttcttgattaaaacaaataattgctttattgtggttaaacataatttgacctaaattgatcactttcttggatacgttatctttgagcatcttaaaaaatgaaacacaccttttagatgagataattctttgttgatatgaattatttttatatggtttatttttctattattaaaaaatggcaaaaattctgatttccctataatctcacttgttgaaagtaaagttgagccatgtccacacaaaacaatatgtttaaatgaaaactaaaagctcatttagatctatctagccatctgtaattagtcaaatatgcagaattaaggaagcagattctcatttaactctgtttacatagtacacaaaatttaaaccacaattgaatgatttacacaaaacttaaatagcaattgaattgttaaaccttcatttccttcttccacctttccagcttaaacaaattttgcacaaatattttaaatttgataggcattttaacatgtattaaatttttttctcattttgaagataataccttatttatgagaaaatgtctttctttttctttaaaggaagattggtgtctataattactgctatgattcatagactgtcagactgtataataatgagtctgaaatggttacataggagccctttctgagtttatatagcacgaagactgagaaggtaattttaatggacttgcataggaaatgtcataatatccctatttttggccagtgtggctatgttttctgcttggaccttacatctgtttgctagggttaccataacaaagcaccacagtccgcatggcttaaacaacagaaatttattttttcacagtgctggaggccagaagtctgtgatggagttgctggcagggttgttttcttctgaagctgctccctggcttccggaagccattttctctctgtgtctccaggccatctttcctttgtgcctggctgtgccctaatctctttctctctctcttttttttttaagacagagtctccctgtgtcacccaggctggagtgcaatggcgtgatcgcggctcactgcaaccctctgctacccgagttcaagtgattctgcctcaccttcccaaatagttgggattacaggtgcccaccaccactctcagactaatttttccgtttttagtagagactgggtttcaccgtgttggccaggctgttctgcaactcctgacctcaggtgattcacccgcctcagcctcccaaagtgctgggattacaggtgtgagccacctcacctggcccctaatctcttcttatatgacaccagtcatactggattagagcccaccctaatgacttcattgtcatttagctttacctctttaaaggttttatctgccaagatagtcacattcagaggtactaggtgttagaaccttaatatatgaattttggggaggcataattctgcccataaaagacctcaacagccaatgcatctctctgccaaaggaatttaagacatctttaatattatcacagtaggcaaaactatgatgatgatgagcatgctgactagggaagaaaggatagtgcttacaattcacaaaaacacagaataaaaaagttgaggttaaagagctgcaacaatatacagccatgtttttcaattaatgaagctggaagccaccattttggataacatattaggatgaagaaaatagatatgaatagctctactaacttaaggtgtgagtgatattatatttatttgtctttgtatcagaatgccaaaatgatcttggaagaccaagaataaaatatcagtttgtaagtgctccagcattccaattgaggtgctagacatgtaaatgaagagactaaaacttcattttgcagtctttagctcaatatccaccttaagctcgaaggcttagtttgggaattagatttcttgaagaagcttgcacttgttttacacggggtaagggaaacaatattttacatcacttcaagtcaagtatgtgggtcttgatttacagtgcctgcagtttgggagcatagtggactggctggtattggatgcatatctgaataccttctccagtcactctctcctctcaaaaaagtttagaagcaaaaggctggctgaaatgttctgcagcaacagaatagagtgctgcattaacaaagtaactacactcccactcctgatacagtagatcaacgctgtatgtttcttgttcgccaaatctggcccatagacaaaacacagagccaatcttaggctgtcttagacattaatgaagagcataagacatctccagccatgagggagggaatttagagatccataacacgacagcctgagaaaaagagatgttttaattatctacctggtccagaatataccatgaccctcatgatagtaatagtcaagtaagactgtgaccaacacgatgtccaagttgagaaaggagagaaacatatttgaaatgtaattcagagttctgactattgcatattatggacattttaattgtgtgaatgaaattagattcataactaaacatgaagaaataccttttgttttctgagagttaggagataagttttaaggcctgcccaaaattttactcagggtcaggaaagaaccagacatacacgatgaatatgaatgaatatttaggatggaagaataatattggttgcagaattacattcaatgaatcccatttgtttaattgatttttaaattaaattaaattctgctcaatctctgaaattatggtaatattcttgtaaggcccccttcttgcccagttgtccaacaaacctggagggctaacatattttcaaatagtgagaagaaagcccaccttccatagtcttgtggatttatctggttctttttctgagttctattacatatttatgtggactcccatgtgttgccatggatgaacatccatagtgcatgaagtctggctgggctgtagttcccagcagaagccagcatgatccactgaaggtaaaaagtggctccccatttatgctaagttcccctgaaagaattctttagttagatcataaactgtggtcttttgcaatttccaacagcataagtagacatcatcttcaccctgccacctcttacatgctatataccagaaagtctgccaagatgcctatattactgccattcatcctaaaagatcaggcaggttttacttgtcaccattcaagagtggcagtcgatccctcccactcctttcttcagaggtggagtcatgctagccctgcctcaccactcccatttctgtcgactattagcagatattcagagagaaagttgcaggaacaatgacattctctcaatgagtcattcttccgtatcaacttttaaagaattggcacttgatttctgtcctttcaacaaataggtttgcaaatatttataaaatccctaaaataacaaatattcatactattgcaaatagtctgggacaaactaaaacctgtttgtaatgggaagtgatgcactgaaacttctgtagtgaaatccattctagatcagaagagaaagaatgattttaacaatactagttaaggattatcatgtttccttaccgataaactgaaaatagatttgagaattttctaaatctccctctctctcacacacgcacacacacagaaacacctgtacctatttgcatattattttaaatatattaatttaagcatatgcatatatttttaaattgtttttctgatggtatgattgtcattcatttaatttgagtaaaatatttcatcatcctcataaagtgatgttaaaaagcccttgctctaggtagaatttctttgactattagaatcaaaattttgcagccaaagtggaaaaataaaaggttaaaaaaaaaaagtataggttaggcgtggtggtgactcacacttataatcccagcactttaggaggctgaggcagatgggtcacctgaggtcaggagtttgagaccagcctggttaacatggagaaaccccatctctactaaaagtagaaaaattagctgtgtgtggtgacccatgcctgtaataccagctacttagtaagctgaggcaggagaattacttgaactcgggaggcggaggttgcagtgagctgagatcgtgacactgcactccaccctgggcaacagagtgagactccatcccccgcccccccaaaaaaagtattacaaaaggatatttttaagagatttaattcctcctcgagtaaacataatagatgaatacattccatggttataattgtatattttaaactagatagcttagttacaactggcagataacttttttcccggaagcaagtatgtttgtaaaaatattaaaagtgctggggtaggtagatggctatctaaatttgcatctcatttgatgaatattaaacactttttgaaagggtgagataaatcaacactcagatctaattaacctaaattgaacacataaaaatatttgccaccgataaagttgattttaggagttaagatcagtaccaatacataaaatactctagcaagtaacatctttgagcaactattagcagctttcagcccctttgatatttgctgtattataaactcaacacaaaaactacaagtaaacaggaactaattaagcaaagacagtgtaagcaatttaaacagtaactattgagttggagtacctgaactacatcttaaatactatgcataaaataggattttccttatttatgagagtttttacagactttaaaaagaaaacaaaatattaaagtttagagaaagaaaaacataggaaaacattgtataatgttctattctccacattaagaaatattttccagaaacaaaataataaccaaacaatagaatacatttcccagatccaacattcctcacagttaagatactaagttagagaaaatgatacacaggtaaagtagagacacatttgaagacagtatctaaaaaaataagtaggcaaacaaaacagtattcttgaaatactgcatggcactgacacatttttttctttattgaaaaatttttgcaccctgagaagctcttataaaacgcatcaagttatttttgcgaaggcggcagcagaacagcagtcgcgtgatcacattttgacaggcttcagtagcacacaaatagcattaacgcaagacccttggtctatggcagcgaacagcgatgtaacagacaactctaatcaatcagaatttgacttccctttattctgacaaggattcttaatataagccatcaaaagtagtttaaaacttgttagtccttctgccctgcttttaatagaacaggtacatacctcagttgccatcttttcctttattgaaaaactgacaaagcattacaaaatgcatctgccttaaatatttgaggccaactataaaacatcaagatgtgtggcaataaatgcatcaatgaagatgtgctgtgaaaggtaaaaggcataaaaccgtcaaaggcaaaaaaaaaaaggtggggggtgagctggattgaagtaagaaaaataattctgttaaaaaggcaagaaacttggtgggaacaagatagaatttaggaatcagaaaaacctgacttttcatccttcactaggagctaataactaggaaatgtgggcaaattgttaagtctccccaggctttgcttgacacatttggaaaatgaagaggcagcctggatgatttccaagattccttccaaagctacaatctgatgatatattggtgatttacaattgttagaaagaagacaagaaaattcaaattctgggtttacaatcttcagatgagaataaagttatctttctttttaatttatagaaattataaatgaaataaaaatggacatagtccattgtgtttctagtcaatggatatatctagtcaacagatatgacctctggattgtacctgttctatactattctccatttacagttaaagctgaaagttaagataatacaattgatctctagggcaaattgtagagagaaaatgtactcttgtactagataatggtaaaatttaccatcaatgtactagagtgatgaactatttaacatacatgaagacggctgatcaatatttagttaatataggttggtttgtttttttcctccaaagaactgtgttactgagatgggtgggtgttgaggtaatactttattatttagattttattaggagacatattaactggtttaagtagggaggaagagaaagaaagagagagagaaagtgggaactgagaggagagagaaagagagaggtggattgcagggaaaaacagtgaaattgttgaagtattagaaaatataatataattacatagagggaaagaactactgaatagctgccaggccactgaagagtcctagcctttgtctgtaacagttgctaaaacaaagagcagactaggctatttgtaattccctcttgtattgtctaagcaggaatgcacttttccaggctataggtcttggtaaactccacctgttctatgttagactctgcaacctggagctatacttgggaaaatgtatgctcaacagtttacagctaccttagagagtttcttaagcaggtgcagctctgggctggccactctacagtgtgcacctttagtttcaagaagaattagcattatgtaatgtcacagtggcaagataatcattacaggttagaccttggaatgaaatcccaattccaaacagttatgatactactattactactaagaatgataatcatgataataataatagctaatagtaattgggttttaggctaatgcaaatgctttacatatgttatttctattaatacttgtacaacgctatggagatattattaaccatacagagaaatgaaataatttgtttaatggtggagttatcatttcaaagtagttttttgacttaaattctcttgttctcactacatgtgacaagggcaggccatttggtttatcttagaatcatagcttcagttttctgagataaaataggataacaatatttccctctccccacgtttgaatgttattaatatattcaaacacacacatatatgtacatatatggacatatattttacacacatttatctctatgtctatcatctctatctccatctattgatctaacaagttaaccagtgataaacaggagcttatcttctcttcacttgtgcaattggcctactgtaatattcaactaaaatcagagtgcaagaggtgagaatgcatcagcgacagatacttttgctttattttacgtctgacaaattcaataaatttacttaagacaaagtcaggtctagtctttttgatttctcacacagtggctaaattataaaaatgattaccaatatacaaattcctacatattcataatactttattcataatgataacaattgtaaaaagttgttatcacttcctttttacagttaaggaaattgagagttacacaggttaaatgatttgtcctaggtcatatagataaagagagtatgggtatgtctgtgtaactgttggctcatattgtttatgtgagtcagatcatctctgtagcagacagaccctggggtggccctcatgattcctacccttgatggtcatactctttgagtggaggtaggaggatgcattgcttctagctaacagaatatggaaatggttaaggattttgaagctgcaatgaaggtcctaaatgagctgattttgaattaagcaagaaagagattaacttgagtggacctgacataatcatgcagaagcctgtaaaataggaattagggcctccatcgtgggcttgctgaagtaagcagccatgctagagaagcctacatgacttcatacagctgcaaggctataaactctgcccataacttaaaacagcttgaaagtagattcttccccagtcaagcctccagaggaaaacacagcctagttgagacgatgattgctgctgcatgagatgctgaataaaagacccagctaacctatggtcagattcctgatccacataaattgtgaggtaataagtgtgtgttgttttaaattgctaagtttgtactaacttgtcatgcaacaacaaaaaaacccaaaaacagaaaaccagtataaactcaaaaactattcatttagtaaatatttgtgaagtgttttttatatgcaaggtactgtgctaaaggccatataaagcacaaaaatagaaatcctctagaattcctgccctcaagaaaattataactgcaatagggggatcatgttggctttctggtgccctttggcttattctaggacttctgttagcttttattataaaaaaatccttagtaaatcaaaatatgatagctaggttgcaggctttatttcttgaattaggtcatggattgaagtaagaaaaatattttcaaatatggaacattaatatgtgtatgagttcttttctagaccatatgaacacatcatctccaaagataaacaaattggatatagatattttttgtggtaacttcgagtttggttgcatttgaagattagcttctagaattaaattccttttaatttaaaaaatttatcattatttattactatgacaaaataagtcctattatcccctgaatttgaacaacatattgtagttcctaaatttagggaatacaaagagattatttaaattgaagactaatttacatgaagttatattagatggaatgtcctttgaagtccaatcatggggttcttcgagggaaaaaagatttctaaattgaaacttttgtgtgtgtgtgtgtgtgtgtgtgtgtgtggagaatggggtctcactgtgttgcccaggctggccttgaaattctgggatcaacctgtcctctagcttctgcctccctaagtgctcagattacaggtgtgagccatagtgccctgccaagatttctaaattcagttaaattgcatagaatattaaataagtgtgttcttatcattatctaaacctatgcttcttaactgctacaggatttttaatactgactttcattcaaatttgtttgcatgttgtaaaactcaattaagccatataggtcgttcttatgttgtagagcatatcaatttaaattcccaaggaaaacttaagtgcttacatcgaagttatttttgatattaatctttcaagcaagaactgcagacatttccttatactttgttaacctcaaaataaaatagtctttgtaggagataccctatgtttttggtctttttttttttttttgagatggagtctcgctctgttgcccaggctggagtgcagtggtgtgatcttggctcactgcaagctctgcctccctgattcatgccattctcctgcctcagactccctagtagctgggactacagtcacctgccaccatgcccggctaatttttttttttttgtatttttagtagagatcgggtttcactattttgggtcttttctaagcaaagactacataggcaacattaaacatcaatatgttcaaattgtttgcaaattaagcatattaacaacaaatgcagataaaagataattaacatcaaatcatcataagttatcagaagtgaaaattctgaagtgaaattgtataatcagggtacattcaatataatatctcagaataattgagactgagataaattatactaaacataatgatgaatttaaatgtttgccctcctttaagtcttttctgtcagtttctacctatatattcttaaaaaaaaagacaaaaaataaacaatcaaaaagacagctttcagaaactatctctttagtgaaaaatacacttctttcagtcttaacctctcagagaacactctcttttcccctaacttcacttgacttacattacaaattcatagcaagagaaacaaaaaattttactctaggagacaaagaaactggtagaaaggtttgaaatatcagcatataattgtttgttctctatagccaatcttaaaacaaaaaataactagttttgttaatatgacctactatcttttttcctgagtctgtcactcttactagaagtacctgctgggctcgatgctttttcattaatgggatctgttgaagaagagtgtaattttcccaataacactcttggagagctttttgactcaacaacctcaaacatgtaccgagagatttcatttataatcacctctcctactagtagtgtctgtagactctgaaggcacaacacagtgtgaaataaaagtaaataataggaactgaagtgagcatcatttccttttcaattcatctgcatatggaaacccctctttatattttgaatacatgagaaacatattttggctgatacctgcattgaaatcatctttaggaatttttattcttgctttatttatctttctttatcattagggaagttccttcatggatctctggttactgtgttttgttagttaaatcaataaagccctttattgaaagaagaattgcgttacaatgctgtcaataatgaatgcttattgcaagaaggggctcagagaaaataattaagaggtggaaatctcttaagaaacttctgcacaccaattgtggatgtaatctatgtatgcaaatgacgggcatacattgtatagcagctttcatccaaatagacacttaacaaatgtgactattatactcatgaatgcagtgtattcttttctttttctgcagttgttttcatgatgaaatgttaactctgcttaataaaaactttggtatggattagttaagcaagaaacatgaaagaatgaataatcaatttgaaacaattaaattacatcagaggagttcattaaagagcacatctccaaaacattgagatctgtggaggttataattaggaccagtggaaaaaaatacctcctttcccttggcttgcatcacctctcttgtaatcattaattgtcaaatttacccaccacaactacctcatcttttcttcacctcatgcaaaattctcttgttcagccattctcaatcagaagtatgagaacttccattccgtatggttgttgtaactttcttctcaccaaactgcagttgtgtctacttacatttttgggttcttcttcctatattttataaaattcaactctttaaagatccatctttggttctccatccctacgagtagcatcctctttcttttactcatttcttttaataaaatcatgtatttctttatgtgtcaaatatagaaatttgcatagtggttgtgtattcaaaccaagatgagtttgcatttaaaaataatgtcaaagtatgctgttgctgtatgcacatggattggttgcaaaagcaattaagaaaataagctgaaaatacctgaaagatgtatgtgacttagtgaaggacaatttgttttagacaatagaagaaagcattaaggaataagatttccctatttgaaaaaaaatattaagttattgagatgtactctggaatagccagtaaatgaaatgtggaggctagctattgattctcaaaatttgaaccttaggagaattcccagttaagtagcattaggataagagtgttgaggcccagtccttgaggactgaccatgcatgatctaggccctgtgaatacaaaaggaaacagggcacagcaacatttgcttttcagtaattggtgcatttgagataaagaaaaaaaaattcatgatatttgttaaagatggtaaggcaagctttactgaggtgggaccatggagatagctttagggatgacttcaatgggatcttgcagtagaggagagagactggactcaagtctaactctgacaaggacaagtggagacttaaaaccaaaaagaagaatgagggtgagtggatggaaaattactaagaggaaacatcgaggataagggatttctggctaaactgatttgagaggaatattgctaaaggcaggtcagggtaataagatacccagggtgttcaggtaacaagagacttagcaggattcttactcaaaatgcattttacagacagagagggaaagctcaaggtcaagactagtcaaaatagaaaactcagaggtgcctcactaaaattttggccaaaagaaagagtctttgtcagagtttatatggataagtgcaataataaagaaaaaggaaaaaaaaagttattcatggtttgtggtcaaacagaataaaagcctattactgaggattagacaaggagaagtaaatagtatgtcatcatctttcagactaatttatagtttgtgactttaaatatattgtgatagtaaggcacatatacctttaattctaaccttgggaacttctatgaggcagaataataaacaaaattctctcagggcaggtacatgcctattttatatctttctgactttaaaaattaattggctcttaaagcatggcattggatgtatctccttaccagagtggttgaaaggaatgatttaaggatgactttaaattacaaaggccttcagaaattaagttaattctcccttgcaatagctttccaaggtagaaaaatattgtcctcctaaaaatggcagttaaaattgagatgtagttaaaataaattggttaacgtaggaaaaaagtcaagattattaactttatattaggcttgtggcctgatttaaaaatctcttcttccctgttaacggtaaaagccttcagagttatggctttcttagggcatgtatctttcgtagcatcaccatcatcatcatcattgttaaccgcatcattaacattttcagtgtgattacaacactagttacattagcatttcatgctgaaatattcttcttaacactctccagatagtgacaggatatgatagatgggctgcttctaaatagttgcagttaaggctttctctcttctggtctatgtgtgaaaacagatagcaaaaagagatgagtagaaagcaaaaggacagccatacctgtgagatctatttaagaactttatctggcaacgtattaaataacatagctccttgttgaactctgcactttattttcttccctttttattttttcttggctcaatcatggatttattttcctatattgttttgcataagccatgttaggatttgttctgagttgcaaacattataaaatgctttaacttatagtccttttagttaaaggtgtttttatatagaagccttatgatacagtgtgcctgtgtccccccgccaagtctcatctagaaccacagctcccataatccccacgtgttgtgggagggactcaatgggaggaaattgaatcatgggggtggttacctccatgctgttcttgtgatagtgagttctcacaagatctgatggttttgtaaggaactttccccctagctttgctctgcacttccctttgctgtcaccatgtgaagaaggatgtgtttgcttccctttctgccataattgtaagtttcctgaggcctttccagccatgctgaactgtgagtcaattaaacctctttcctttataaattacccagtctcaggtgtatctcttagcagaatgagaatggactaatacagtaaattggcgctgggtagtagggtactgctgtaaagacactcgaaaatgtggaagcggttttggaactgggtaagaggcagaggttggaacaatttggagggctcagaagaagacaggaaaatgtgggaaagtttggaacttcctagagacttgttgagtggctttcaccaaaatgctgatagtgatatggacaatgaagtccaggctgaggaggtctcagatggagatgaggaacttaatagcaactgaagtaaaggtcactcttgctatgcaaaaagaatcgtgccattttgcccctgccctagagatctgtggaactttgaacttgagagagacttgctgagtcttccggccttcatctttctcccgtgctggatgcttcctgcccttgaatatcagactccaagttcttcagctgttggactcttggacttacaccagctctgggtttgtcagggcttcctgggcctttggccacaggccgaaggctgcattgttggcttccctacttttgaggttttgggacttggactgatccacaactggcttccttgctcctctacttgcagacagtctatcttgggactttaccttgtgatagtcgtgtgtgagtcaattctgtttaataaact

SEQ ID NO: 2664 - DNA, 4478 bp, Homo sapiens
caggaagtaaatttctttccaagagaaaaaagctggaaaaataattgttcctcttgtttagaagatgacagcttttttttttcttcattaagcgcccttctcttcaaaagacaaaaaagggtgagagaaacttgaagacttcagtcctttttgtatctatgactccggaaaggaaagaaaaataaaccatgtagaacctgcttgctgtcctgtcctctgccagccgttggcctcagtaatcggattcaaggatatgtatgacctactttttgaatcactgcagcccaggctgcgcaatttcttatgttctcttgctgagaaaccaacatacaagcagagattgtgtatttttctgtaaaggtagaggtaggcgcttctggaaattctggaaacctttccaagtttacagcacaaacgaccggaatgttaagaagggcttttgttaacaggtctgttttgctaggattctgcagggggttggagccctggggaggcttcttcttgtccccattggtgttgattctgtctctgatattcactggtagcaatcagatctcacctggcataaagcactggctccatctgttttctaggagtggattttttttccattaagaatagagtcatctcagtatgaacggctgatacaaggggaaaaagaagcatttccagcagtgcttgtttaccagtcctttatgaccaaattgatgcaaagtgggccacaaacatgtttgttgacacctggagtgtccaaactccagaaatagataagagtccctcatgaaaatatatataaagcaaagagatagaagaaattgattaaacccataaagatatggacaaggaagagaaagcaaccaacatttaccgtgtctttctattaatagctacccaacactgtcctggaggctttttaaagagcttatctcattgaagccaaggctggggctagcgagaggccaatgaggtgagtcatgcttctgcaggggtggattctgtctttatttagaattttgaaattttgttccttatggattttttgcattgattttgattttttttaaaaaagattcctctattgagttgaatagtatctctccaaaattcatgtcctctccaaacctcaaaatgtgagcttatttggaaatagagtctttgcagatgtaattggttgtgatgaagtcattctagattagagtggagtctaaatccaaagactgcagtccttattaggaggttgtgtgaacacacagagacccaaggggaaggtggtcaatgtgaagacagaggcagcaattggagtgaggcagcaattggagtgatgcagctacaagccaaggagcaccaaggacagccagcagccagcagagctaggagaggcaaggaagggttctttcttgggccttcagagggagcacggtcctgctgacaccttgatttctgatgcatagcctctagaactgtggcagaataaatgtctgttgttttaagctactgagcttgtgatagaatagtcccctcttacccaaggttttgctttctgagggttcagttctgtagtcaacttggaaaattccaggaataaacacttcaaaagttttaaattgcacaccattctgaggagcatgatgaaatcttgtgctgtcctgccccggacatggaacatccctttgtcattgacgtcgtctgctcctgacattcaaccgtggacatcatcatggcttgaggatccagaatcaactgaggcagatgatcctcccttccgacatcatcagaaactcaggagtggcccgatgctatgtcacaatgcctggatcattcacctccattcacatcatgtaggcattgcatcatctcccatcatcacaagaagagggagacccaggtaattttagagtcactctggagggaagattcgtatcttgaaaaattcttccaggtgatttggacatacctttctgcctcccagccacccccccccgccatggctcatagccacgtctccgggattcctcagctctatttctggatttggtcagaaaacagcctgctctgctggattagctcatctctccatggaaatgccaccctggagttatgagagcacggcctctttctaaggctttctggtgcaatgcaaccctcctcgatggccacagctgattgactggagtgaacctgtgacctgaactgggccagtcagatttttcatactggaaatttggcgtcggagccctgagaaacaagtcaggtggtctcgggggctgaagctacccctgtggggtgactagtggaactcctggtagtgagaaaaagtgagatgagactgatgatcttcagaaggaaaagtttggactaaacacccagaggaaagctgaaatgagagaccacatggaatgaaggagaacaaagccaatcactgagacaagtattgccagggaagaaggcttttttgggtgctacagctgaggagctgggaggtcaaaacagtgtgggaaaagaaatttaaaaaaatgttattaaagaagctactgtcaacctaaaggaagaaactgaggcaaaattaatgtaagtaaagagtttatttgggccaagatgaggacagctgctcagaagattcaggcccaagtgatcttggataggagctctgtttggcctttgttaccagcaggtttttaaaggcaaaagcaaggggatacgtagggggatgatacaaagttgcttgtcaggaattctctttggtttacagaaatgtcattcattagttattgcctatacattgttgacatatagattatgacctaatgatatctatcatgtggtgtcattaggttaattttgagctacttgtgagaaaaggcctagagtccacatagcaagcaaattcaagagatgattatttagctcaggaggggaagtgggatgtgactgtagcctcattctcatgcctcactgggcctgataatttaaaggaggttcacattcctcagatagaaagtttcttttctttctcgctataagcctctgtctttcttgtctctctattgctaagtggtttggcataaaatcatgtgctctggtagaaacctaagggctttttattcagctgttgaaattcatacccactggagattctagagccatcagtggccatggttcctgccactggaggaaactgtctttagagagtgaaggtgaagctgacatttataaacagccacggtgagaggcagggctggaaagcaggcctggctctgttccagttcctgtgtccattttggagacgagtttccgtttcctatggtttgattacgtgatcccatgaatctccatctcctgcttaagctgttttgagtgtcttgtccatacatgaagtgtcagggtgtcctaagaagacagtggaaagtgatggggtccagcatctgggatgttgggcatcttagtactgggggagtgtgtcagtctatagcaaaatcttcacttctgggctgggcttcaggatggaactcaagtcttttggagggaggaggagttcctagaggaactggggtcgcaaatgagttccaagtcaaggactcaagaccatgagtcaaatatagatgcctgagtgctgtcctcagcaagcagtcaagggtgttggacccagacgcccagatggagtccagggtaggcatcacttacaggtcgtctttgatgcatagaaataaaaaaggcaatctaaagggcagaatttgggttgaagccccataataaaaatcaagcagcttgttctaagtagcagttgtcatttggaagaggctaggcagaaagggtgacatggtaacatttacagatagaaagaaggataagcagatgagagaggaaaacttcaaagaaaaatgaaggaggtagaatctgaaaaaaaaaagtcctggactgaagagaacatggtgttgctgcttttgtaagttatctgtgggctaggttgtggatatagagaaagctgctaaaggtgatagttcactgaagatggcaaaagcaccatgagcagaactgggacacaggatcagggccagatgagactacaagatgacaaattttgggggtcaggaggggaagtgagatgtgactatggcctcattggtagacttttccattcatggcccccaagggaccgtgtctctcagtattcatgctcttgtgcattgtctcccatattggactctgggcttggcaaggtgacttgctttggccaataatatgaacaaattaaatagggataaattagaggcctgataggcatttgcatattggacctatgctctttgaattctgagattgccagaggatggattgactagctgtcattaccttactacaagcctatggatgaagccagcacaggaggtaatggaaggaattgcagagctacgaagctgtgactgtaatgcagcatgcctagtccccttcctacctctagtcttcttgttatatgaact

SEQ ID NO: 2665 - DNA, 9860 bp, Homo sapiens
ggttctgcttggagtcacacggcacacaagattgctgtcaagaaagcctgtccataaatagtggctgtacaccctcctcacttacaattcagggaaaagaagagcggggaaggaaaggaggaaaaacaacaacaacaaaagccacgacagagaacgggaaaaggcagagactgaaagcgaaggaccgtcggaggaggagggcgagaggtctggagaggagggctcgccggaggaggcgggcggggcgggctgtgcggagggtgcggccagcgcggtacccgccccggcgaggcgctggggaggcccgggtggggagaagaaatggggcctgggggacggtaggagcctccgtgcggagaccactgttcaaggccacagacatttatgcagtgtgtgattctttctaaaacaactccctggaagagaggacatttaattcaacaatttattggccacctactgtgcaccaggcagtgaacttggaactggggctactgggttacagcagtgaccaagacagaggtccctgttcttaaggagcaagtgagggcaacagaaaagagcagaagtcagctgtcatgcgagggcactcaagcagccctgtggaaagctctacgtggtgagaaactgaagcctcctgccaacaccaacaaggaactgagacctacttccaacagccatctgagtgatcgatccatcctggaatcagatcctccagccccagtcaagtcttcagatgactgcagccctgaccagcatctcaactgcaacctcgtgaatgaccctgagccagaaccatgcaactaaactctgcgtggattcatgacccacagaaactgtgagatggtagctgtttgctttgttaagcctctaagtctggaaagaatgtcttaagcagtagcagacaatgaacacaagattattattcagctgttgaattggaagaggaggggaagaaaaaattttcagatcacaaaatattcattgtgtaaaacttcaaaaattctgaaatttaaggaaaaaatatcatttgttgggaatttgttgggattcattgtctcagtgccaagagacacccactctttttttttttttgagacagagtcctgctctgttgcccaggctgaagggcagtggcacgatctcagctcaccacaacctctgcctcccgggttcaagtgattctcctccctaagcctcccaagtggctgggactacaggcatgcatcaccatgcccggctaatttttgtatttttagtagagacggggtttcactatgttggccggctgatctcaaactcttgaccccgtgatccgcccgcatcagcctcccaaagtgccgggattacaggcatgagccactgcgcccggccgagacactcactcttaacattttggtatattttttctctctgcacattttttatccagctgactttattttgtctcctgaaatcttcatttttaaattatagcttcagcatttaagaaaatgtgtctaacaaagtcttcgcaagcatacatttttcccatagttagtatacttagaatttatttgtcaagcaattttgaagggctttcactatgaaaaactttagggcttattgatattctctttaagtagaagtatgttttttattattacaaaagttatatatgtatatatatggtgtttgtgtttgtgtgtgtgtgtgtgtgtgtgtgtgtgtgtgtgtggagtctcgctctgtcaccaggctggagtgcagtggcgtgatctcagctcactgcaacttcctcctcccaggttcaagcgattctcctgcctcagcctcctgagtagctggaactacaggtgcgtgccaccacgcctggctaatttttgtatttttagtagagacggagtttcgccatgttggtcaggctggcctcgaattcctgacctcaagtgatccgcccgcctcggcctcccaaagttttgggattacaggcatgagccactgcgcccggccttatactgaattatataaggcgaaaagtgaacgtctcctgtaatctagaaaaatggcattataatgagtaaattttaaattttaatgtaattttccagaattttttttttttgagacgggacggagtctcactctgttgcccaggctggagtgcagtgacgcgatcctggctcaccgcaacctctgcctcccacgttcaagcgattctcctgcctcagcctcccaagtagctgggactacagccgcccaccactgcgcccgactaatttttgtatttttaatagagacggggtttcgccatatcggccaggctggtctggaactcctgaccttgtgatctgcccgccttggcctcctaaagtgctgggattataagcgtgagccaccgtgcccggccttttttttttttcgacaaggtctctccctgtcacccaggatggggtgcagtggcgcaatcacagctcactgcagcctcaacctcttgggctcaagtgatcttcccacgtcagtgtcccaggtagctgggactacagacgcgtaccaccacacagggctaattttttgtattttttatagagactgagttttgccacgttgcccgagctggtctcaaattcctgggcttaagcggtctgcccaccttggcctcccaaagtgctgggattacaggcatgagccacttcacctggccatccagaaacttaaatgcttataatcacatgcacacatagttttttttacacaagtggaatgttactatatgtaatttctagtaacctgcttttttcacatctcttttctctttccatgtagtgcgtaggttctcgtccaggtctgccgagtatattgtaattcatttaatcagttcttttttttttagagacggagtttcactctttttgcctgggctggagtgcaatggcgtgatctcggattactgcaaactctgcctcctgggttcaaatgactctgctgcctcagccttccaagtagctggaattacaggcgtgcatcaccacgcctggctaattttgtgttcttattagagatggggtttcaccatgttggtcaggctggtctcgaactcctgacctcaggtgatctgcccacctcggcctcccaaagtgaatcagttccttcttgaaagacattttgattgttttacccctttttgctattataaacaatatggcagtgaacacctttgtatgtatgtttttggccacttatttatttagagatggagtctcgctctgtcgccaggctggagtgcagtggcgcaatcttggctcactgtaatctccacctcctgggttcaagcgattctctttcctcagcctcctgagtagctgggattacaagtgtgcgctaccacacccagctaatttttatttttttttgagacggattctcgctttgtcacccaggctggagtgcagtggcttgatgtcggctcactgcaagctctgcctcccgggttcacaccattctcctgtctcagcctcccgagtagctgggactacaggcgcccgccaccatgcccggctaatttttttttttttgtatttttagtagagctgggttttcaccgtgttagccaggatggtctcgatctcctcaccttgtgatctgcctgccttggcctcccaaagtgctgggattacaggcgtgagccaccgtgcccgacctgtatttttaatagagatggggtttcaccatgttggccaggatggtctcgatctcctgacctcatgatctgcctgcctcagcctcccgaagtgctgggatgacaggcgtgagccactgcacccggcctgtctgttatttctttaggaaaaattcatacacagagactccacaatataacagaacagacatttaaactggctgtcccccaaacacaacaggcttgggcctacctcagggccctcattcatgctgtctcctttgtctggaactcttttcacccccatccccacatgggctggagcatctactcatcctagcttcggctcaaacgggctccccagagaggactgtcctgaccactctctgccgtttcccgttcatctccctctgtctcaggtatacagaatcgcttcatctgcgacacattctcattgttgcctgtgattccctcactttatgcttgtgtgggttttttttagagacctggtcttgctctgttgcctgggctggagtacagtggtgcgatcatagctcactgcatcctggaacttctgggcccaagtgatcctcctgcctcagcctcccaagtagttaggactacagatgcatgccaccatggctggctaatttcgaaaaattttttttgtagaggcaggttctcactatgtttcctaggctggtcttgaactcctgggctcaagcgattttcccaccacagcctcccaaagtgctgggatacaggtgtgagccaccatgcctggccctgtgtgtatttatttttacataacataataaaaatctgtggagtcagcaatctgacacaagaactggaacattgataacctgttttccccaatgaattcctttaccatcccatctcctgccttccttcacctgaggtaatgtctatcctgattcttccagaacattaaaaaaaaaaaaaaacagctttgttgagatgtaattcacataccacactattcagtcatttatagtttacaattcagtggctttcagtgcattcacagagttgtgtaactgttgccacaatggattttagactattttcatcatccccaaaagaaaccattagcatcagtactcattagcagtcactctcccatctgctctgccttccctctaatccccagccctaggccaccattaatctgcttctgtatccatggatttgtctcttctggacagttcatgtaaagagaatcatacaacatgtggccttttgtgcctggcttctttcacttagcatcatgatttctaggttcatctatgttgtagcatgtatcagaacttcctttttattgccaaataatattccattataggccagatgtggtgtctcatgcctacaatcccaacactttgggaagtagaggttggaaggattgcttgagcccaggagttcgagacgagtctgggcaacatagtgagaccccgtctctaaaaatagaaaaattaactgggcctggtggtgtgtgcctatagtcctagttacttgggagactgagtcaggaggatctcttgagcctgggagttccaggctgcagtgagccatgatcacaccactgcactccagcctgggtgacagagtggaactgtctcaaagaaaaaaatatatatatggccaggtgtggtggctcacatctgtaatcccagcactttggaaggctgaggcaggaggatcatgaggtcaggagatggaaaccatcctggctaacacgatgaaacccatctctactaaaaatacaaaaaattagccgggcgtggtggcacgggcctgtagtcccagaaggctgaggcaggagaatcgcttgaacctgggaggcagaggttgcaatgagcggagattgtgccactgcactccagcctgggcgacagagtgagactcggtctcaaaataataataataataataataataataatacctattcttaatgatacctgaaggcaggatgaagccaactcaggtgtgggtgtggctgttgtaggtactgtcgtgttactccactcaccctaactgtgtctagctccaaaatacctatttgccaactggcatggtcctcaaagacattcataatgagaagagaacaatagggacaaggtaatttcttttttgattcatctaaatttcctgattttaaaaaagtcaggccaggggcagtggctcgcacctgtaatcccagcacttttggaggctgaggcaggcagatcacctgcggtcaggagtttgagaccagtctgaccaacatggagaaaccccgtctctactaaaaatacaaaattaactggaggtgttggcgcatgcctgtaatcccagctactcagaaggctgagggaggagaattacttgaacctgggaggcagaggttgcagtgagccaagatagcgccattgcactccagcctgggcaacaagagcaaaactccatatcaaaaacaaaaacaaacaaacaaacaaaaaaagccagtggctcatacctataatcccagcactttgggaggctagcttgagcctaggagtttgagaccagcctgggcaaaatattgagacccacatctctacaataaataaaaaatttaccagttgtggtggtgcacatttgtggtcccaaccactggggaggctgaggtgggaggatcacttgagcccaggaggttgaggctgcagtgagcagtgatcaccccactgcactccagcctgggcaacagagcaagacagtgtctcaaaaaaaaaaaaaaaaaaagaaaaatcagagattatgatagtgtgtgcattacaaggtctcttttcttttgtatgtgtgtgagatggcatctccctctgttgcccaggctggagtgcagtggcatcatcatagctcactgctacctcaaactctggggctcaaatgatcttcccacctcagcctcctgagtaactgagactacaggtcctttcttttcactaaataataagagatcttttaaaaaacaatatagctaggcacggtggctcacacctgtaatcccaacactttgggaggccgaggcgggcagatcacgaggtcaagagatcgagaccatcctggccaacatggtgaaaccatgtctctactaaaaatacaaaagttagctggtcttggtgatacgtacctgtagtctcagctatttgggaggctgaggcaggagaatcgcttgaacccaggtggtggaggttgcagtgagccgagattgtgccattgcactccagcctggtgacagagcaagacgcagtctcaaaaacaaaactcagaaaccaatataatagtataaactgcacagcggctattgagtacttgaaatgtggctaatatagctgggcacagtggcacacattgtagtcccagccacttttgaggttgaggcaggaggattgcttgagcccaggagttcaaggctgtagtgccctatgattgcacctgtgagtagccactgtactccagcctaggcaacagcaagacccctgtatcaaaacaaacaaaagaagtgtggctattagacatattacaaatattcccagaggtgactcagaagttaatcatagaagtcaaactttgcttattgttatgagtctctagggagtacttcaactcatttgcatctgtttcctcatcttcaaaatgggacagtgtaattctggacctgggacatagtaaggattcaatgggtggcagctgtgacaagagcaacaacaaaaatattgtgcgtctttcttttttttaataatggcacaaaaaggcaaaaccatagatacagtaaacggatgtgtggttgccagtgtttggcggggagagggttcaataagtgagcacagggggttttttagggtgaagaaatgtgggtatatgactgtgcattggttgatatccattaaacttaatagcacaaaaagtgaaccttaatgcatgcaaagttaaaaaaatcacttaggacatttagataattccaaaatgtcatgcagaatatgacaaacatcttcaccgtattacaaatgtgtgaaatgacctcatgaagaggatagaggaaaacgtgctgacctaagtaactttagaaatgagtgggccaggcgtggtggctcatgcctttaatcccaggactttgggaggctgaggcgggaggatcactggagcccaggagttggagacaagcctaggcaacatagtgagatcccatctctacaaaaattttaaaaaattagatgggtgtagtggcgcatgcctgtagtcccagctacttgggaggctgaggcaggaggatcacttaagactgggaagtcaaggctgctgtgagctgtgatggccccgctgcactccagcactccaacctgggcaacagagtgaggctctgtctcaaaaaaaaaaaaaaaagaaaaagaaaaaagaaacaagtggagtctgctggaacactaaaggcaaaagaaagtgttcagaagaatgtactctacttgataaagtttcccacaggggtatgggttaacaattttgataatcctacacatgtatactggacttgaacaattaagtaaatggatggtggatgtggatgatgggaaccaggtttcccgttattggagtgggaatttagagataagcaagcaggaagcaagccaaatgatccctggattcaagtggtaaatataaacaggaactcatgtttagcttaatatatatacagatggttacaaatggaaatatagatatgtgtgtatatatatacacattggtatatacagatatatttctttgttctgtcagttgagaaggcttaaaagaaatgataccccaaggccaggtgtggtggctcacgcctgtaatcccaacactttgggaggccaaggcaggaggatggcttgaggccgggagttgtatcagtctgggcaacatggcaagaccttatctctacaaaaaaaaaaattgaaaattaaaattagctgagtgtggtggcacacacctgtggtcctagctactcaggaggctaaggagggaggatcacttgagcccaggaggtctaggctgcagtttttattgtctttaaattctcttcagataatttacccccgcattgcctacacagcacactgcagagtgctgggcaacttggtaattaaccctctaattgtgtaaactggaagcttcgtgaggttatggcttcattaccatggctacgtggctgtagccatgagtgtgcactccagtgtgggtgatggagtgagactctgtctcaaaaaggaagggagggagggagggagggaggaaggaaataaatgacaccctagtagcaatgagtgcacctagcgcccagttcttggtttctaataaatacccttctccgaaacaatcaaagctcttgcgaaatggctgatttgaggactggggcaggaaatacgaaagatgagcctgaggcatcttgtagtgccagaaagtaaggaagtgcttgacggcaacgagaaaaccccacaaaaataggggtgtgtcaaagggagacgggagccaaccgaaagagctcccaaaagccaaagctggaacaacttgagcaacaaaatcaaatagtattggattataacctaaagtattaaataattatctgtgaatccatactgatataaataaattactgaataaatgagacaaatcttcagtgtagaaaaatcccaaataatctatgtagctattccaaccttaaggagatagagcataactcctcacttaagtgtggcccgagcatagtgacttccttccaaagagtacagtatgaaaaggggcaaaagaagactgactttccagtagagaaacctgacgcagcaccaacagtgatgtcatgttgctatgtgagaaaccgccccagccaagaggagcccagagagacacgacagctagtgcgatgaggcatgctggatggatcctggagtagaaaaagatggagtagaaaaagaacgttgggtaaaaacgaaggaaatctgaataaactgtgaactctaattaataaataatgtatcattattggtttattaattggaacaaatataccatgcgtctgcaataccatatgtgatgttaatagcagaaacaccagcctgagcaacatggcgagacttcatctctatgaaaaatgcaaaaatcagctgggcttggtggcatgccc

SEQ ID NO: 2666 - DNA, 8313 bp, Homo sapiens
gcccaggaggcgctaagtggccactttcgtgggcccagtgacagccatcccggtgctcctgttctcggggttcttcgtcagcttcgacaccatccccacgtacctacagtggatgtcctacatctcctatgtcaggtatgggttcgaaggggtcatcctctccatctatggcttagaccgggaagatctgcactgtgacatcgacgagacgtgccacttccagaagtcggaggccatcctgcgggagctggacgtggaaaatgccaagctgtacctggacttcatcgtactcgggattttcttcatctccctccgcctcattgcctattttgtcctcaggtacaaaatccgggcagagaggtaaaacacctgaatgccaggaaacaggaagattagacactgtggccgagggcacgtctagaatcgaggaggcaagcctgtgcccgaccgacgacacagagactcttctgatccaacccctagaaccgcgttgggtttgtgggtgtctcgtgctcagccactctgcccagctgggttggatcttctctccattcccctttctagctttaactaggaagatgtaggcagattggtggtttttttttttttaacatacagaattttaaataccacaactggggcagaatttaaagctgcaacacagctggtgatgagaggcttcctcagtccagtcgctccttagcaccaggcaccgtgggtcctggatggggaactgcaagcagcctctcagctgatggctgcacagtcagatgtctggtggcagagagtccgagcatggagcgattccattttatgactgttgtttttcacattttcatctttctaaggtgtgtctcttttccaatgagaagtcatttttgcaagccaaaagtcgatcaatcgcattcattttaagaaattatacctttttagtacttgctgaagaatgattcagggtaaatcacatactttgtttagagaggcgaggggtttaaccgagtcacccagctggtctcatacatagacagcacttgtgaaggattgaatgcaggttccaggtggagggaagacgtggacaccatctccactgagccatgcagacatttttaaaagctatacaaaaaattgtgagaagacattggccaactctttcaaagtctttctttttccacgtgcttcttattttaagcgaaatatattgtttgtttcttcctaactttctgactacctttaattttgcctaggttgatttaaacaaacaaacaaacagcttccctttcctcctgtatcacctcagctgcctccactgaacctggaagaatggggcttagggaaattcaggcacgacctttgagggttggctcagcaggagtggccagcagtgaaagatgggctaactgtgcaagaggggaggaggccaacgagatggcatcagaatccaagggcttaggacgaagtcagtagacttcagcatgtggaggcatttgaaacttgatcaaacaacgcacttcgagtggtgggagatttcatctctgggttttgcgacctcacagctgcatcaccgcctcagtgttaggcctgtgtaaactttgcacgttggaaaccgcttctttcctatgactgaatcacataagtcaaatcccgctagggcagaaacaggtgcctatctggaggtcaagtggtctttgaattcacaacaaggctgcctgtgagtttgtcagctctcagaagcagtttgactacatgcagagaaggtgattctggccaaagaagtccacctttaggaaaatgccattgtttactccctctagaatatcattctcctagaatcagggcttccgatggaaaggctgtgtttttgcgggaaaatcagtgaacctttctaagctacatttttcctcatctgtaaatagttacagtacatcatgcccaaggccatgccagctcaaaggtggtgggattccttggcgatgtccctgaagctcttatttcccacttcgaaagaacgaaaagggtctgaattttatttacacatggatttagtttgctaattcttagagattccttttttactgctagatcttttttagtaaacacaattgagatagatattaaagtgtaattttaagtgtgcttgttctatacaaatatggcattgccttccagattaagtttttaaccagagtcaaacttagcctttataaaaagtcctcatttaatttcaaaatagatcttcttgtaagacattgcacatagggaagacctacctaggaatagcctggtgaaatgcagaattggaaaaaggcaaaagtccttgctcatgactcagaactacatcgagtgaggtcagtgttgaaaacgcccattccctccaggtgagccttccccattgtggattagtgttgtggcttcatggccctaataggggtgtgtctgccaggaactgcactgcatggggcccacagccctgcctcagaagcagctttggtctcgtttgctgagaccgcttgctgtgcctcatcaatttcaggaggaaacagtgagatgcctctagattttaaatctggtttcggagagcacctaagccctctgatggaatgactctcgtaggaacttgatgggggtaattctaagggggaagagcttgggaaccatgagggctgttaggctgcaagaagggaatggatatgtgagaccatgtgggtttattttttgaagggtgaactggagtaggtgaggattctgcagttgacgccccaggatggctttgctcagccctcccccgtagactggaggaaagcctaccgccaagggaggagaggatgcatctgtcctaggtgcagccggcctccctcttccaggttcagcaagggtccctggctgggcattttcctcgtaacctttggcagcattggctcaaatgccattgtttagattcccagatatttccccactgctttttgtgttaaggtagtttggtaaaatgccttattccaatggcctaagataatatcaagcaactcactggtttacttttctaaccagctgtggttaagacacacacggcaatgtgctatctttcacatgttggacgttaaacccagaccaactccccaaatctaatttgtttcagtaatttctgaatgcattgaccaagatattcctttcatctctggttgagtttcttccattagaaggaaggattaaaccttggataaaagatttgcagatgccccagtggttagtagaggtgaaaatggaggtttcagggaaactgctggggccttttgcctttgtcctcatccaaagcattttgtgcctctctttcttctcctctggctgaatatccactggagattgaattctccgaaactccctgtgtgggtgaagtgggaagctgtgcccaggaaggggagtaactgtgcaaagttttatgcagtcagtgccagaattggattacatcacctgggggaggcgccttcaggaccaggaaatggtacatggagctttgaggtgaaaactcatcttagaaacccacaaaaagtcattcccccagcctgacatcagggacagaccacacccatggggcagaaaccgggcttggttgttgcagtgggaagagaaggcacgactctggtgcaccgagcacctttcctcgtggctgtttccaggcactgggctggatgtcctcagaaccccctgtcccctgcccactcctcaaacccttactgacccacccctctcgcctggtgctgtcccaggccctgggggtgagggggaggggactccaacgtgggcttgccctccagtgtggtgggagggaaccgcgtggccacttggcttagccgtgctcatggtgcagacgtggaacgcggaggcagggagaggctccgtgacgtccccagggccccagaacgaggaaggagcggagttgggattccagcccagttggacgctgaagtccctgttttgtttactgcctcctgttcatggcgtatgaatgtatctgagatgctttgtaaggcataaagtgcaatactagcttagtggctgttcgttcagtgattccttctgttaccaaacaggtggctgagatgagagggcaacccaagcctaacgcccttcagtggccttgcatcagagtactcgtgacaggtacctctccgtggagaggggctgtcctctgcccttgcctgctcctcctattgcaacagtcctgtggactagctcaggctctacaggggctggtgtgtgtgtgtgcgtgtatggtgtatatgtgtctacctacacacaagcacatgtgcacacatgcacacacatgcatgcaagcacacgcacacacacacatgcacacacactcacatggacacacacatacacacacatacacacacatacatgcacacacatgcacatggacacacatacatgcacacacatacatgcaggtgtgcagacttggctccaggcgtgtgtttgatagtattattctatgatatttccctcatctccatagaataccagcttctgaatcctcaatcagcctttactgcaagaagaaaagaaaaacctctctcattccaggtctgtggtgcagatgggaagagtatagtcaaaacccattaaggccttagtcaaatgccagccgaattagaacgcaatgaacgttagacaaaacaacccaactggccaggcgggggaggcgcagagcgtataaatataaagttagatacttataaagaataaagactctaataaaatattttatataaaactttttacctgtgttcagcgtcagatgcttcaagtgattggctttgcattctcctaagtcgatggattcttaggctgtgtctagaatgcgtttgttgtccctctgggaagagcactgatttgtcgctcatgttctggtccaagacgtggctgtagatgagccctttctcgatgatgttcatgtattatgttgaattgtcttaaagttttgtgttttctgttctcccagaatcctcacccatgtcctcctgcctcgtgatgttggccatgacctcgaaatgtgcctggaggaggctcgaggcagggctagcaggagggcactgggccacaccttccctttggtcctctccacccttgcaggggctccctcaaccggggctctggggcggtagctctggcagggcgacgtcgcttcttccttactctgctttgctggaaacccatctcccaggctgagctctgtagaggcagctgctagtggggaaggcagcccctctagaggttttggtcccaaagttgaggtgagcagggcctagcagttgctcagtgttatgtgctgcattagcccatggttccccgagctccggccaggcagtgaccctcagagtgaagactttccgggacaccagtggcttagaactgggctttcaaatccagcttccctcccacctctgggacacagagcagagagccgggctgggtgaggtcacagaatcggcccgcagtggcccctgcactcctcctatggcgggcaggcacaatcgaaggctgccccaggcgtgcacacaagctcgcgatgcacagttttcttcccccctcggtaaccccagcctttctggacggcccggccgccctgggtcccagtaatgttaaagtcacggtcctttccaagccactgtacttgggctgtcccgtcagggaggttcctccaagataattgccccctgcaaagacaggggcttctgatgtccacttgtggggctgacctttttggggaacctccctgggaccagaagcagggaagaaataagagaccctgcacccccatggcacagtctaattttcacttacaagctcaattcaggctgtccttaaaatccacgtgtcctgggcaggaaggaaatgtggggacaggcacacacgcacatccttctgctatgctgacctaaagttcctaatagctatcctacatcctgcccgtttcttttttccatatttgaggaaacagaagggtttagccttagcctagtttttttatgttatctctgaacaggccaacctggaatcacccctcacacagacacgtgtggcctgccccagtgtgcctgaggcccacccaggaaccctgctttgcctggggtttatgtgaatgacacacatgtgagcagaggctggggttaggaccctgaggcttccctgttctcagaaatactctcctggcatcaaaaggagaaaacggtccatgccactggctaccacattccagcctggcaagggtttactgtttatagaggcaccgtttgggggcttttccatgtagaatggccgttgtaaagctgaagagaaaggaacagaagcacaaaagcaccttgattcttcgcaaacacaggcaggggctgccggctggacgagggcgctgcattttgagggcgtgctggacccgctggcagagcccgccctgagggttttctctgcagctgtgggctaagcttgcccaagcccctccccttttccagaaagccacccccatggccacttgcctttcaggtccaggttgaggacacagccacgggcatatatgtatttgtttcactggggttcatggttctggggacagtcttctagcccccgagatcttgggaaaggcatgagctcaagccacataaccaaaaagtagcaaaactcaaaattattactttactttcagctgttttctctcaatagcgcgccaccatcgtctgtgtgtctgcactgaacaaacatacgagagaatctggctgatcactttgagtgcctttggcctaaactttgcacatgactttaaacgtggccctgatactgcacacagtaagaaatgttttttattttatggtccctgaggttacgagatcagatctctggaaatgtgtaagccacctgctgtcacctctgacccatgtggtccattaccatgagggccggtgagtggggcagagatgctgaggcctggctggtgagcccccgagcagtgaggcaggaccctccctggtgacctgtgtgggggccagtcctctagtcccccagacaaatctccctttaaggaggcttctgaagctctgagtgccggcgctcagaattaatttgactcttcactgctcaccgcacctgcctatgagcctctagaaaacagcttgcccaatgagagtgctgcagctgaggcagcagcagacatgtccgtttctggggaagttactcaaacaatcgtgcctcttagggggccctaatgtgccccttctggcaggttgaaatgcatctggccttgaaggggaaggttaggaaattatgaagtacgtgggtttagggttgacaaccccatatccgtggactcctggagatccctgaacgccgtctaatctgaatggtaccacaatttggtttgtctgaaaatatagtagtaaccacggcagtgatttcatttttacacgtttgcatttttacatgtctgtcattatgcatcttggggtctcttttccatgacctaccagcttcccaagcttaataatcagtatctcactattatgtcattggccaactgaaaacagtagcaaaacatcctatcatccaaattgctaataaaatagaacaccacacccacacgctggcttcccatttttatagtcttatcctcccacctggagggtgtgaatggggatcagtttttcaatagaacatgtatgtttggtaagttaatatgtgtagctgacccctttgcctttgtttttatatatttatgtttttctattgtagacatattgatgcaatacctgttcatagttgaatctgttacaaattgttaccttttatttgatgaagaactatttaaagattttccttttttatttcttctaaagcaaaagtcaatgcaagtaactctaatcagcgtgcaaaggcgtgcatatatatctgctatgtaattatataatgtttttataatgctgtgtggataacttttcactgatttagttacttgactgtaggaaacactgttgctttgcacgctgtgagaggtttgcactgttacagatgaaggcaacatatttacatatgtacatgtatatacatatatatatattcaaaaataacatcggctctttggggtgtctgtttccttggttgtctcacgccactggaacattgaacccagacagaccctaggatgtgaggttcctgactgcaccttacggaccacagagccacgtgtctatttctgtagacctatctccttagatttgtacatgcattttttgcggacttgaactttgttttctgaaattagatgcc

SEQ ID NO: 2667 - DNA, 4137 bp, Homo sapiens
cggccactctgtgaaactaccgaacctttgcctgtcaaagggcctgccctctaagcgtctgaggacatcatttgccaagcagactctgaccttttccctcttctcctccacccaacaggtattgtgttggctgcgtgccaggccttggagaacagcacgtccccgctgagtgacccgcccgtggctgcagcagtggtgtcccattttaatgactgcccagattcccacactcagttctgcttccatggaacctgcaggtttttggtgcaggaggacaagccagcatgtgtctgccattctgggtacgttggtgcacgctgtgagcatgcggacctcctggccgtggtggctgccagccagaagaagcaggccatcaccgccttggtggtggtctccatcgtggccctggctgtccttatcatcacatgtgtgctgatacactgctgccaggtccgaaaacactgtgagtggtgccgggccctcatctgccggcacgagaagcccagcgccctcctgaagggaagaaccgcttgctgccactcagaaacagtggtctgaagagcccagaggaggagtttggccaggtggactgtggcagatcaataaagaaaggcttcttcaggacagcactgccagagatgcctgggtgtgccacagaccttcctacttggcctgtaatcacctgtgcagccttttgtgggccttcaaaactctgtcaagaactccgtctgcttggggttattcagtgtgacctagagaagaaatcagcggaccacgatttcaagacttgttaaaaaagaactgcaaagagacggactcctgttcacctaggtgaggtgtgtgcagcagttggtgtctgagtccacatgtgtgcagttgtcttctgccagccatggattccaggctatatatttctttttaatgggccacctccccacaacagaattctgcccaacacaggagatttctatagttattgttttctgtcatttgcctactggggaagaaagtgaaggaggggaaactgtttaatatcacatgaagaccctagctttaagagaagctgtatcctctaaccacgagaccctcaaccagcccaacatcttccatggacacatgacattgaagaccatcccaagctatcgccacccttggagatgatgtcttatttattagatggataatggttttatttttaatctcttaagtcaatgtaaaaagtataaaaccccttcagacttctacattaatgatgtatgtgttgctgactgaaaagctatactgattagaaatgtctggcctcttcaagacagctaaggcttgggaaaagtcttccagggtgcggagatggaaccagaggctgggttactggtaggaataaaggtaggggttcagaaatggtgccattgaagccacaaagccggtaaatgcctcaatacgttctgggagaaaacttagcaaatccatcagcagggatctgtcccctctgttggggagagaggaagagtgtgtgtgtctacacaggataaacccaatacatattgtactgctcagtgattaaatgggttcacttcctcgtgagccctcggtaagtatgtttagaaatagaacattagccacgagccataggcatttcaggccaaatccatgaaagggggaccagtcatttattttccattttgttgcttggttggtttgttgctttatttttaaaaggagaagtttaactttgctatttattttcgagcactaggaaaactattccagtaatttttttttcctcatttccattcaggatgccggctttattaacaaaaactctaacaagtcacctccactatgtgggtcttcctttcccctcaagagaaggagcaattgttcccctgagcatctgggtccatctgacccatggggcctgcctgtgagaaacagtgggtcccttcaaatacatagtggatagctcatccctaggaattttcattaaaatttggaaacagagtaatgaagaaataatatataaactccttatgtgaggaaatgctactaatatctgaaaagtgaaagatttctatgtattaactcttaagtgcacctagcttattacatcgtgaaaggtacatttaaaatatgttaaattggcttgaaattttcagagaattttgtcttcccctaattcttcttccttggtctggaagaacaatttctatgaattttctctttatttttttttataattcagacaattctatgacccgtgtcttcatttttggcactcttatttaacaatgccacacctgaagcacttggatctgttcagagctgaccccctagcaacgtagttgacacagctccaggtttttaaattactaaaataagttcaagtttacatcccttgggccagatatgtgggttgaggcttgactgtagcatcctgcttagagaccaatcaacggacactggtttttagacctctatcaatcagtagttagcatccaagagactttgcagaggcgtaggaatgaggctggacagatggcggaagcagaggttccctgcgaagacttgagatttagtgtctgtgaatgttctagttcctaggtccagcaagtcacacctgccagtgccctcatccttatgcctgtaacacacatgcagtgagaggcctcacatatacgcctccctagaagtgccttccaagtcagtcctttggaaaccagcaggtctgaaaaagaggctgcatcaatgcaagcctggttggaccattgtccatgcctcaggatagaacagcctggcttatttggggatttttcttctagaaatcaaatgactgataagcattggatccctctgccatttaatggcaatggtagtctttggttagctgcaaaaatactccatttcaagttaaaaatgcatcttctaatccatctctgcaagctccctgtgtttccttgccctttagaaaatgaattgttcactacaattagagaatcatttaacatcctgacctggtaagctgccacacacctggcagtggggagcatcgctgtttccaatggctcaggagacaatgaaaagcccccatttaaaaaaataacaaacattttttaaaaggcctccaatactcttatggagcctggatttttcccactgctctacaggctgtgactttttttaagcatcctgacaggaaatgttttcttctacatggaaagatagacagcagccaaccctgatctggaagacagggccccggctggacacacgtggaaccaagccagggatgggctggccattgtgtccccgcaggagagatgggcagaatggccctagagttcttttccctgagaaaggagaaaaagatgggattgccactcacccacccacactggtaagggaggagaatttgtgcttctggagcttctcaagggattgtgttttgcaggtacagaaaactgcctgttatcttcaagccaggttttcgagggcacatgggtcaccagttgctttttcagtcaatttggccgggatggactaatgaggctctaacactgctcaggagacccctgccctctagttggttctgggctttgatctcttccaacctgcccagtcacagaaggaggaatgactcaaatgcccaaaaccaagaacacattgcagaagtaagacaaacatgtatatttttaaatgttctaacataagacctgttctctctagccattgatttaccaggctttctgaaagatctagtggttcacacagagagagagagagtactgaaaaagcaactcctcttcttagtcttaataatttactaaaatggtcaacttttcattatctttattataataaacctgatgcttttttttagaactccttactctgatgtctgtatatgttgcactgaaaaggttaatatttaatgttttaatttattttgtgtggtaagttaattttgatttctgtaatgtgttaatgtgattagcagttattttccttaatatctgaattatacttaaagagtagtgagcaatataagacgcaattgtgtttttcagtaatgtgcattgttattgagttgtactgtaccttatttggaaggatgaaggaatgaatctttttttcctaaatcaa

SEQ ID NO: 2668 - DNA, 1775 bp, Homo sapiens
ctcaagagcacttacgggtattaagacacagagaaaaggtactttttcctgtttcccattcaaactcttggagaaagattgccttttagactgccctgtgccactctgaaacatgaccacctcaaatttggtggctccatgcaatcaggcagaagaaaaccttgatgcaacgctttcttgggctgctttagattgcacctaataaataatctggatgacaccaagaagttcccacaggtccctgggtggggctgggaaggtggatgagttgccaacgaatggacctgtcattggacctgcctcaggtaaaggtgaggtgattccacagaaggagtcaggagtgaaacgcctagcagggagctagatggagaatgaggaatggatgaggcttttttatgtgctgccctagattttcttggcctctcccatctcctttctcttttgctccttgctcacaaaagagactagctgctgtgtcttatatctcattagaaaggtgattgaatcatccttcagagtgacttaataacatttaaacaataatattatgataacatataatgaacataataaacgttatttctgagtagcccccaaagcaagatatctctttaataattaaaatttcgagataagaaaatgatgcttgcattgggaccataacataatgttttttctttgtcgtctctgcatataaaagtaatttcagtctacctgtaagagcagcatttgcattatggaagtttttgtttgtttgtttgtttttgtttgagatggagtttcacccttgttgtccagactggagtgcaatggcgcgatctcggctcccggcaacctccgtctcccaggttcaagcaattctcctgcctcagcctcccaagtagctaggattacaggcatgtgccaccacgcccggctaattttggattttgtagtagagacggggtttctccctgttggtgaagctggcctcaaactcgcgacctcaggtattcgatgagatcaggagcatgcccagctctccactgcgggcttcatgtaagaggagagccatgataatgtattgcattattcttgtacagtaatcagatcataggtcaaaaaggacacacggtttctggcctgtctgcttggaacacttgctctagacacctggctgccataggagaggccaacgtgaaaaggaaccaacgccccagacgatagccccagcagggctcttacccagcagcctgcaccgtggaagtgagccaccttggaagtgaattctccagacctgtagagctacaccagctcattccatgagaagcagaaatgagctgcccagctgagtccttcccaaattctggcacacaagattgtaaacaagactattttaaattctcaaattttgaatgcagtttgttatgcagtaatagataatcagagaaggagtagagaatagtatataaagtcaacacagaaccaaaaaagaagatcaaattttaggtgacatgttttgtttccaattattattattgaaacattaaatccttcctgagtgtaagtgatccagatgaaatgaaagtaattggaaaagtcttgactgtgttatgaggccttagagaaaataaaatccctttaacacatgattcccaaagcacaaaataaaatatattcaaaatgttatggcattgaaatccatgagtgtcctttctttcctttctcactgaaatttattagaagataataatctgtgcattacctattgatggtttttcagagctattttctcc

SEQ ID NO: 2669 - DNA, 3023 bp, Homo sapiens
ctctgtgtgtctccaggtggtcatccccatgggctccacagatgaggacaccggccctcagctctgccccctctcagaagccttcctcacctgggggttctgggtgaagggagctccccgccagagactcatgtgggatcgtgtgtggaccgtagagccacagagcgtcatctgtaagccagatagagtttcactcttgtctcccaggctggagtgcaatggcgtaatcttggctcactgcaacctctgcctgctgggttcaaatgattctcctgcctcagcctcccaagtagctggaattacaggtacgtgctacaacatctgactaatttttgtatttttagtagagatggggtttcaccatgtcagccaggctggtctcgaactcctgacctcaggtgatctgccagcctcagcctcccaaagtgttggaattacaggcgtgagccactgaatccggccaatgttatgcatttaagtgtggggagcagaagactggatatgcaagagcatacatctggataccttttacctcttggcttgtggggaaaatgacctgcaggattttacatggagcttcctgtgtgcatgctggtgactgttggcaacaaggtgtcaggaagaaagacattgctttccaaactccttttcccaaatgatcctttcttacccagtctgccttacctgcttctgtactgttcaacagaggagggggaacagggaaaagcaggggcagttgtgaaaaatagaagggaaacttgagtgtgcctttttcttctccttctctttctccaccctcagtcatcattaacagaaaaatatttttaaaagatcccttgatggcatccccaaatgttaagtctgacattttcttagctgatggcctcctttgtgaaggtactttgtgtccgcccagcatgcctgctggatccctggtttgccgcagttgctgaggtaaatactctttccattaagcaccacagcccaagagtggcctaaagctcaaataaatgaccaagaagcaacttaaacattccctggggcgattttaacctatgcaatggctttttgaaaaaattgcctattttttcatgttttggccgggggggtgtctcttattcccttcttttttattttcctttcagctgagtacaccttctctttcatttattcatgcactgcatgaaggatggaagcaggatgaataaatcacagagcattgcccctctccccactcagggtctgtgaagagagctggagcagaatacagtccaggcattatgtcaactttcaggggacctggggcaggtggccgattctcacagagaccccacttccctttcctgtgaaaaataccacagcccaacagccactggagaacagtgttcttctggaagcttcctctgggcaggaggagtcaaagatcctggtcctcagggacacttgagatgggtgtgcccaaagctgtgcaggatggtttggtttgttttgtttttctttgcctcaggaagaatgtgttcacaaacctcaggacaaatcgtttaaaaaagtgtcctgacagttgtcatgcttcatcacttgatttagaggcaataggacagccttattttcttctaatctctggtggttgaggagtctggttggcctggcagaaggctgagattggctgagggagtcatgagcgagcaggggcctctggtgcctgaagcgcccctcaggaagagcgggtctcaccggaaggccacactcatctccttcctggttacccagtgtggggatttgctactttgctgagtgtgttttgtctacattcatggtgctccagaactgtgtctgtgtttctcacattctctttcgtgtctgccagagcaacattctcagcaaaccatctgaatgcaactcctgtgatcacaaaagtcaatcactgatggaaatgaagaccacgaccctgattcctcaggttggcccttttcaaaccacgtttctcagagctccaggaacaacaggagttctagggagagtttttttttttttttttttttttttttttgaggcagagtcttgttgtgtcactcagtctggagtacagtggctcaatctcggctcatactgcaacatctgcctcccgggttcaagcaattcttatgcctcagcctcctgggtagctgggactatatgtgcacaccaccacgcccagctattttttttgtattttagtagagatggggtttcaccatattgcccagggtggtctcgaactcctgagctcaggcaatctgcctgtcttggcctcccatagtgttaggattacaggcgtgagccaccgcgcccagccccaggagagatctttttaaaaacgtgaatagatcacgttagtttgctcattgcacttggacaaagctgcaccctgagagtgtggcctgccaggcctggtgacagcgtctcttggtctttgcctgtggtggtctctggacccttcagtcttctccatggtgcctgcctcaaaagctcttcctccactgttcacctgtttaactccatgtgtccttcagtttccagcttgaatgtctgccctcagaaaggccttccttgaccccccagatgaagtcagtttcccctaaagtgcacgaggcccacatgaaattacttagttatttggttaatgtgtcttccccactaaactgtaagagccacaggagaaggggcgagtctgtttcattttcagatgtagctctagcctatggtgtatagtaggtgttcaacaaacatgtatttaatgaaagaaggaatgagagcatggcactgcctctctatgctgaaatggtgtctggactacttgttttttctttcccattcatcagatgatcagtcagctgtttaacagagcagattaaagtaatttcgagagcacactcttttttttgtttttgtttttgtttttttttgagacggagtttggctcttgttgcccagactggagtgcaatggcacaatctcggctcactgcaacctctgcctcccgg

SEQ ID NO: 2670 - DNA, 714 bp, Homo sapiens
ggcgcatttaccatgcagagggatgggaccatttaagcccacgccccggttaggcctcttcccagttccagctcccacactgtccgctcttcttcctggcacggaggtgagggcccatggcctccctgttcacctattgccatcatctcctccacaagtaagctctccagtctcgtcctccaggaagccttccttcgtcacactcaccccatctgattatgctgtttccctgtttcttcccaggctttatatcatcggtggcttgtattcatggttttctaattctgtgggcgtatcctaatcacctgtggtgggaggactttcattttaaacaaataccgcaagtggtctgagggccacccaagtttgatatcctttgcttaatcagatgttacacccacgcataaacgtgtcttgagtcatttcaacagacagtgtggaatgtgcctttgatttattttgtgtcatgacctccccaaggcacctgcactgtgagcacgggatctgctttcctggtgcaataatatgaccatgaagaaagccaatcatgaaagtgtgaaatatcacaaacacgccctcccctaccccgcatcaatcagcaaggggctggggacctgttctgaaagactggtaggtcttgggtaccagttaatacaacccatggaggccgggtgtgagccaccgttcctgggaacagctagttttatgtttatt

SEQ ID NO: 2671 - DNA, 2308 bp, Homo sapiens
ccgatgccgtatcctgccgcccgttttacccgcgggaaagccgaggcccggtgctgtattctgccgcccattttacccgcggggaagctgaggcccagtgctgtttaatatcttactcatgttcacttgatgagaaagtgacagatctgagacaaacccagatcgacagaaaagaaatgagtcaacgatggtgcaggtgatctgtgcagtgctgtgcaggggatgggtcaaagctgtgatgctggcatgcaactaactcaccattaaagggaccagcttgacgaagcttctgcttttgtgactgtctcctaatgggagaagtgaaattctacctcacttttttaaaagaagagcctggaattggcctatccgtctttttccccgttggatcacagagcagaaaggaagctaagacctctagtacagtgttcaatggaactggtgagaaaagacgtccttgctgtgttcctgatatgaagaggaaagcagtccttctccattaaatgctgacaacatgagcctcccgtggtcggaacgggcttgtgaaggcggtgctggggtgcaccagggcagcagctacagggtcaagcctgagacacctgaagccctggacttggaatctgaagctgtcatcagccagtacacctatgaacctgtggaagacctgaagtacctgtttaaaagacagccaaaagataagtaaatacttcccaaatttccttggtgtctttgttgcatagttgctgtaggctggataatagtagccattgttatatttttacaattaatttctttcctccaaacagatagaatcacttcctttctaataattaagcaaagtaaaatgttgtaatccatttttgtaacaatcattcctgacaggataggtatccatcaccacccctaccccaaagttcccattctatagaacaaaataacaaatatgtattttttgtgttccataatagtcacccatagcctgtgtatactgggaccaggcatatgggaatcaactttattttacaacagcttctctttagctctccatcagttaatggattctgggtatttattaagaactttacatttaatggaaagaatgttaaataccaccagccccactctggcagaggactgttggctttgtttatctccatcatcatcccaatactttgccatctcaatcccagcccaatcttgggcctttgagaaaataacctatcattcctaactataagggtggaactcccttcaaattaatgagcctggatgacttatatgacttcaaaattatgtaaatgacaagggttagaatgacagtatgagtagtaaacctcctccagtcccatcagaacaaactttctggggttacgtcccattagaaacccatttggtggccaatatcaatgtacacagaactaaaattccaggtgccactttatattaagagaagccacaatttttgtcaggccctggaaaccttgaaaagtcatcgacacaactgcaccctggaaattaatccctcacataatcatgtaagctatgcagttacccaatcagcattatttagaaaacctgtatggttttcatggaaatcattctgagttaaggacactttaaaggatatacagtctaagtactgtcaaggtaggcccactagctgtgttcacattttccattgggaagactgtactgatcctcagatatctggttgccttttgatttgccggtatgaaaatagctttgggtgattgttggaggacactaagtgtaactaactccattcggaaaacagaactgctggggcaactcgggatacttcccaaggtcctttccagcctttaactggggccatcttagcagggaccttaactacttggaaaaacaaaaatggcaagctaacccacatgttcatcatagaaaacaatttttgtcttgaacaacaaggagctttttttcctgcgtggaactggttcctacttatgtttaccagccaactggactggaacctgtacacttgtttatttagccctggcaattaatatagctcccaataaccaattcctcattttacctttgactgcaactgccaggcacagattaaccagtcaactcatacccttttggtagggctaggcgtaacagctggaataggaacagaggttagcgggcttgcaacttccctatcctattatcaatgcttgtccaaggattttatgaaaagcttggatggcattgcctaaagtatcgtcaccttacaaaatcagatagacttcttggcagcagtcactttataaaataggagggg

SEQ ID NO: 2672 - DNA, 2871 bp, Homo sapiens
agccagccaaatgtgtttcagatcctaaatcctccacctaaggggagttgctgagtcagcccagaccggaaggagtggcagagatcatttgccccaagaacggcagcgagcgagtaaatgttgccttggtttacccacccacgccgactgtgatcagcccctgttccaagaagaatgttggtgaaaagcacagaaaccagtgacgtttgtggctgtggaatttccatggagaaaagagagcatctgaacacctggaccatcttttgcacctggcagaccctctgcactcaccccagcgtgttctgtgaacttgagtgacaacgcgtgcttgcagggtgctttttggacgactggggaagaggtggggagggggtggtggggggaagcatggacgagaacatggagcaaatgttttacaacctgaacctcagaactgtgatcctccaaggagcgcgctacttgaagaaaagaaaaaaaaaaaaaaaaagtcgaatggcttctcagggattttgttttccgtgcacatataagccatagttacagtacaggtggcagtatttagagcactcagatttcagttctgttaaatgtgaaagagggatcgactgacgttcattgctgttccataactagtgtaaaatatgtatatgtttatctttatttttataatatgcaaatacatttaaatttatacagtttgaagcttctagcgttagttcacactgggtgcaatattctgcatgagaactgtgccaagatggggctgatttcttattttagtataagacttttttgttttttctttattctttaatcctcttcacattaaaaaaaaaatctctctgttagcccatggattaagtgttggttcatagagattgccaataatcagaaagaaccttaaatgtgcatttaagacagtgtcccttcccttcttttcaatgaaggtccctgcctatataaatcatctggcacgctggtgggaaatcctttgctcttccaacgtgttattagtgctgggcagagatggggcacactcaggggccaaagaggacaaaaagtccatgcaaaacttgagtcttttaatggcttaagataatcaggagtcagttctgaatcttacaaagtgctctgcttaataagtaccttacttagcagagcactttgcaaacatattacttattagcagagctctttgtagaccttccacatctggctgtcagatcttaaggttgtgaatttaggctccagttacattcactggagagcataatcccacacgggttatttataaatacagagcctctgattggacggtctcctgccaagaactagtaatacccttgttttaaaatcttcacaaggtaaaacttaaaaagccaaccaaacaaattgctctccattctacttttaattgggccaaacagcatatgctacagtagtaacatgtttttcggagagtgtaaaaaactctgtttacatttgcctcctccgtgggttgatcgaaaatgtataaaactgactgcttctcgccagcctcagacaagaagagtgagttgctggtactcgctactcttttacttcttttgtaaagtattgactcttggaaggctacagtatacaaagtctcaacatgttttttaaaagaaataaggagcaagcgactgccctgctagaaatcacaaaccgatttttgtagaatattttgtgccccaggcattaatttcactgactccagaacctgcagttcagagaatgatttcttatgatgataaaaatcgaatgggatcagacgatgtttgcatttttttaatacttgaataggacacctcaagtttgagatttcattttcttttagaacacagtcacaagattaatctggtgaatccttttgtcacagttctcgtgtgtgtgtgcgcgtctccgtgtgtgtgtgtgtgcatgtgtgtaaaactgaatggtcacatttaattgctttttggaccattgaatagttgggaagtaagaattttttaattggcatgagacggttcctcaactgttaaattaaccaactttgacctgtctttagaaaaaggcttatttgtatgattttgggctaactccccggggaccatattaaatgacaaaaatgctcctttgggtgacacaccctacaaagtatttgctgttacgaacataaacgcccacattcttaatatctaatatttttgaccagtgatgttttatgctgtcatctgaaccctagagaagcagtgtcagaggaaaccttggtgtcacatgtgtcttagcaaaagggttaccatgatcgagggtcatgtgaccaaaagatgctccagagaagcttgagaatttgtttcaagttgggaggagggttggagatacaaaaatcactctgctctacaggactcttcagctgtctatgcaagaaattccgttttctctttcagcacctggaaagacacagcagcccaccgaggcgataggtgattcactaagcacaagaggaatgttttctaagcaaggcgtcccttgcctctcaaacaaatgccctccaagtttgttagggtttctattcctgcaacttgtggtatcaaaaccacttcctggaattgtcaaagcactgccaaaataaatgtttttcccccttctaagaaaaaaaaaatgacagtgctcatatttgacacttgtgtattggactctcttttgaatgaataaaaaggaaaaggggtttggtgtaattcctgatggggtgcgtgttgtttttcatgccatggtttgtgaattttaattgtggtttcccatttcgttgttgtaactgggcagaaattaaaaaagaaaaatcaataaaaatacaaagaaatggttaaa

SEQ ID NO: 2673 - DNA, 310 bp, Homo sapiens
ctggacagtcagacaagaaggctcactttctccaggaatctcctagtgccaggttctgggctgtggacaccatgctggccagaggaagctgctgcacagtgtcttcctttggctttggtatcaaggtaatgctggcctcataaggtgagtaagaaagtgttctcatcttttcaatgcttctttttgaaaaattcgaaaatgatttgtgttagttcttttttaaatgttcgttggaatttacccaggacccgtcaggtcctgggctttactttgttggaagattttaaattactgactcaatatccttcta

SEQ ID NO: 2674 - DNA, 1396 bp, Homo sapiens
gttctcaattgctatgtgacaaattaccacaaacttagtggctttgaactacagccatttctcatttcctagtttctgtaggttagaagtccaggcatgacataaagtggcttttctgctcagggtctcactaggctggaatcaaggtattggcagggctgtggtcttatccaaggctctgagtcctcctccaagctcaccggtgggtggcagaattcaatttcttgcagcagatagattaaagttctgttttcttcctggttattggaccagagtgactctcagctcctagagtccacccccaggcccttgccacatggccccctcacagcatggcagctcatttcttcaaggtcagcaggagaatctctcctaatctgctatgacagagtcttatgtaaagtaactgtaatcacaagagtgaatatctgatcgcctttgttatacatcataacccaatcgcatgagtgactaacctatcatattcccaggtcccgcccactctcaaggggaggggattatacagacgtgtgtgccacgagactggaatcttggaggccatcttatatttctgccaatcacaattgctacgtcttttaaactaggatagatagatagtagtattttctctttttgctgattaggaaattgaggctcagagaggtgaagggacttggccaaggttacacagtgagtacactttggagagagggatccaactcctattccctcagacttaagaccttgagggcttcttgagattggaggttgggttctccaggaggatggtggtggaggcctgagtaccaactatggtaggtgtgaccaaaaggtaggcagtctctccccagggatgggagaggccttccttgctaacagctgcctgtggttctgagcagcaaacccagaactggaggaatccttggggagcagaaaccacaaaaagtcacaggatggaagccagccttcgatgccatccagaccgcacggggccaaagctgggtctcatgtgcactcctagactagggacaggggccatcttcccggatttcagggagtcgtcatcagatctaaacaatgtggattctgtcagcaggaagagagtgggcaatgtttgctggatgggcaaacgtggcatctatggggccatttggaaagtaaggaggctttccaagagcctagaatttgcatctctgaggcctgctcctcagattttcctacggtcaatggacagtggacagtgttaggtgactgattctccaagcacagcttgactgaacccatgactgcctttctttctgcctgtttgccagccaagaataaaaaggcttagtgtgatttcaaatcattgcaaggttccctaaggtctcttctgctggcctcacacagacctcat

SEQ ID NO: 2675 - DNA, 3177 bp, Homo sapiens
ggcatctcccgccacccccagcagacattttactcagatattaacaattcctgaattaacttcttcaatgcatattcttattttatagagatgcaaatagatccctggatatttttgatgagagatcacatccacttacacgagaaaaagttccagaggaatactttaagcatgatcctgagcacaaatttatttacagatttgttcgtactctttttagtgctgcacagctaacagctgaatgtgcaatagtaactttggtttacttagaaaggcttttaacttatgctgaaatcgacatttgtcccaccaactggaaaaggattgttctgggagccattcttcttgcctccaaggtttgggacgatcaggctgtatggaatgtggactactgccagatcctcaaggacattacagttgaggacatgaatgaaatggaaaggcattttctggagcttcttcagtttaatattaatgttcctgccagtgtttatgccaaatactactttgaccttcgctccttagcagatgacaacaacctgaattttctatttgctcctcttagcaaagaaagagcacagaacctagaggctatttctagattgtgtgaagacaaagacttgtgtagagccgctatgagaaggtctttcagtgctgataacttcattggtattcagcgctctaaagccatcctctcttaaaaggagaaatgaggggttataacgtcatgggaccttcatctacaaagactggagaaataccacctttcctgctcaaaaaccagcaaaattagtgttttcatcaaaaggaaagatctcaaattcaagagactcatggacaacaaggattatactccacaggaaagaatgggaccttgtcaatgcaacaaaacactcttctgtcctttttaatgtaaacagagttacaaaaaccactccaaagtgaaggctcccatcctacacacagatatttgcttactgtgtgggccgatagctgtgaactatgtaaggttttttaaacaatagtttaaatttttagactttaaagacactaaccatataacttttatgtttcttccagtttctctccctccccccgcattttgctgcatatgcctttaaaatcaatgcagtattaccattaaaacatgggactctaactaaagccacttaggagcagacagcagcgttgttaggtactgaagggttcttcctccctactgttaccattgaagctgctagtcattggcaatcattttaaaccaaaaagctgctggataacatttgtcattcatattctttgcaagcattactttagcattttagcatgtttggggtcataaacagaggaagtatcagttattgatatctacttctattggagtccatgttgcatttcttgtgaactataaatggtgcttctcattttctgataatttttctcttgctaaataaatgtattaaaagatattttcataatgccaaccaacatggtggttcagtgacgatgagaaaaagtgaagcagttttaagcttgaatatagtttgggccctccaaggcactgcagcatgagtataaatgctataaacctttaaaaaacatgatttgaaagttttttgttttgttttgtttgtttttaaagagatgggggtcttactgcgttgtccaggctggagtgcagtggcttttcacaggtgcaatcattgtgcactcactgcagcctagaacttcctggtctcaagccatcctctagcctcagccacacaagtagctgggactacaagtgcaactggcacctgtctcctgaatattaagcttttaattttttgtttcggtcactcttgatagcagacattgactgaaacaaaaaattaaaagctttatattcaaaatttgcaaaatgaagctgggtgtggtggtgcacgcctatagtcccagctacttgggaggctgaggctggaggattgcttgaggtcaagtattggaggctgcagtgtaccatgatggtgcctataggaatagctactacactccaacctggacaacgttatcaagaccccatctcttagaaaaatgcaaaattaaatgcaaaagaaatgggctgggcatagtgattcatgcctgtaatctcagtaccctgggaggctgaggtggaaggattgcttgagtgcaggagttcaagaccagtctaggcaacatagtgagaccctgcctgtaaaaaaaaataataaaaatagttggatatggtggcatgtgtctgtagtcccagccactctggaggctaaggtgggaggatcagtagagcccaggaggtcaaggctgcagtgggccatgatcatgtcactgctctccaacctgggcgacatccagaccctgtctcaaagaaaaaagcagaagaaaaatgttcagacaaggttttgtaaaggtttgtagcatttatatttctacaagtatcaaagcttaaaattacactgaacttttggaataccttgtatctccataaaatgccctctttttaaaagtagttacccgcagagctgtgctctatatgctttgattaccgcagtttctttaaaggaagattttgaagagcagtgttaattaacatgtaataaaaggaattggaccctaattatagaaggtgatatgaacagctgttttatcatcctacatgctaccaagctgtaggtgtcccattaagtcctgctatttaagaaatacttacataacccttaggaactcttcaggctttaaaaggcaaggagcaaataattttaggagaccgataatgtcacctaaatttgaaatactaagaagaggttagtgttctcaactatgtgaaatctgtttctcctactttctcaaatctaatcctaggaatcttgcttataaacaaagcatttctgggacaggagtacttcctctattatagcaatgcttcacatcatattgtgctgcagtttccatcatttttaaaggacagagacataaatgataaataatggtatacaaatattacaatctaccacctcaaaaaaacaaatattgtttatggaattcagagtttggagattcaagtattgattgcagttttattttgaaaagaatgctacaatttatgtggtttttatttctcatgtttatattaaaagctaataaactctattttaattaaaa

SEQ ID NO: 2676 - DNA, 2955 bp, Homo sapiens
tgaagatgctgcctcagccccgggggaggggagggaccgctgttcctggaagagggacgcttggctcggaccctgggtttgggggagcccctcaggaccccatttagccacctgggaattgggtagtggcgtgcactgtgcagaggagggtgaaggttggaggagatgacgggcgggcctgcaatgcgctgcgtagggagcctgggcggtgccccacacactcgcccgctagctgcagggcttcaggaaagaggagcacatcgggacttggattcttcccacaggagggcgggttacatccccgtcagagggttgccgcgagggcagataaaatcagacatgaggattcttgccctctggtgggaacccagaaggaggtcagggagggaaggtctcccttcctcttgttgcgggtggttggtctctgcctagatccgcagagggcagaaattagcgatgtctactacagcttcacgcccaggaaacgcgctgtatctgcaccgtccagtagggatggcatcaggcccgtggggtcactgagtcctggaggtgcagacggtgcagccagcttctcatgccattcaactttggataaatttaaatatcaatagctatgtgtgactctcatgctggacagtagatgtagaaagtttccatcatcacagaagactctgctggtcggtgctggtctagagggagcagtcagggtcctggggagtgaagggagatccccacagtggatgtgggaggactcagagccttctctgtccagctcaggactctaactcctcctccttctgattcctccctcccaggacccacgcagaggccgtcggacaacagtcacaatgagcatgcacctgcttcccaaggcctgaaagctgagcatctgtatattctcatcggggtctcagtggtcttcctcttctgtctcctcctcctggtcctcttctgcctccatcgccagaatcagataaagcaggggccccccagaagcaaggacgaggagcagaagccacagcagaggcctgacctggctgttgatgttctagagaggacagcagacaaggccacagtcaatggacttcctgagaaggacagagagacggacacctcggccctggctgcagggagttcccaggaggtgacgtatgctcagctggaccactgggccctcacacagaggacagcccgggctgtgtccccacagtccacaaagcccatggccgagtccatcacgtatgcagccgttgccagacactgaccccatacccacctggcctctgcacctgagggtagaaagtcactctaggaaaagcctgaagcagccatttggaaggcttcctgttggattcctcttcatctagaaagccagccaggcagctgtcctggagacaagagctggagactggaggtttctaaccagcatccagaaggttcgttagccaggtggtcccttctacaatcgagcagctccttggacagactgtttctcagttatttccagagacccagctacagttccctggctgtttctagagacccagctttattcacctgactgtttccagagacccagctaaagtcacctgcctgttctaaaggcccagctacagccaatcagccgatttcctgagcagtgatgccacctccaagcttgtcctaggtgtctgctgtgaacctccagtgaccccagagactttgctgtaattatctgccctgctgaccctaaagaccttcctagaagtcaagagctagccttgagactgtgctatacacacacagctgagagccaagcccagttctctgggttgtgctttactccacgcatcaataaataattttgaaggcctcacatctggcagccccaggcctggtcctgggtgcataggtctctcggacccactctctgccttcacagttgttcaaagctgagtgagggaaacaggacctacgaaaacgtgtcagcgttttctttttaaaatttaattgatcaggattgtacgtattcaaggtgtaaaatgtgataatttgtcgtacacgtacattgtgcaatgacagtcacaatcaattcctcagcgcacccatcaccacgaatacgatacattagatattctgaacttgctcatcttaggacttcacattggtgtcagtgttttctgacaaatcacgtgtatcaggaatgaatgagggaggtgtggctgggtgaaggcagagagccgaccctacaggtccacatctgcacatacatgcacaggaatgcatgctctcacacacatgcatacacacacgcacacacacagacatgcacatacactcacacgccccaggaaatccaaggaatcactgagcctgctgttggttgaggcatttctgagtatccaccctacctgtagggtcagatgtactgattgacacagaaaattaccctatgtaccactaggaggcggcagaatctcatttgggttaatctgtgtttgtctttaaaaaacaaaaacaggccgggcgcggtggctcacgcctgtaatcccagcactttgggaggctgaggtgggcggatcacgaggtcaggagatcgagaccatcctggctaacacggtgaaaccccatctctactaaaaatacaaaaaaattagctgggcgtggtggcgggcacctgtagtcccagctactcgggaggctgaggcaggagaatggcgtgaacccgggaggcggagcttgcagtgagccgaggtggtgccactgcactccagcctgggcgacagagcgagactccgtcaaaaaaaaaaagaaaagaaaagaaagatttttaagaattcagcaaaaactcagccagctctttctatggggcagttgctaatttagttctaggcaaacgtggacacattaaattctcctacaaaccctccacagcgtgctctattattttcctcatttataaaaacagaaactatg

SEQ ID NO: 2677 - DNA, 2199 bp, Homo sapiens
gttttgggggggggacagggttggcaactacaagcaaatactctgagatccctctagccctgatctattgggaatacctaaatcatatgtatgcaagttttaattcttgggtgaggggctgtttcctaactctgctgatttctaactgcccctttcctgtaattgctgggtcaatgcaagttctcagctgcgcattggaaatgccactgctttccatcacagtgatgaatttacatgggaaaaacctgaggccaaagagttctggctcttactcagagccttcctaccagtcacctcccaaagtaaaagaatagtaacatacctgacctgttcttctggcttctctaaagccaaattccagccttggttaggtttctgttcatttggaaaatatctgtatgaaatgtaggtgcatgtcatggagggggcagtggggagtgagtgaagtgagtcagaagggaagaggagagctctctccccctgaccctgccgccgcctgctttcttccagtgagtctagatggatttttgggatctgatgtggctgcataaagacgtgtctctgaaaaagcaaaatgtcagtgttttgaggcctttccgttggggagggagggaacacggtggtcactggttgttctccttaggccagacaggaggaaagggaagtatgtgtgagtctctgataattctcttctttttctttccctcacttttgttcttcaataaatcactcaggacaatctgcttcttcttagtggtgtgttttcctagggttcagcctttgtttgaaattctagaacaacagagttgcagtaaatatggtcaacctacgtgtaattatgctggtatgtcaactttgccccgcagagttgggtctgctctggttaaacagaggcccccctgactcagaaacaagacctcctgcaggaccctgtggagggccgaccccaatccctgtgtctgaagggggtaagacagcccataattacgctcattgtttaggtcggagcacaggagggtttacattaaagacctcagctggcacacacagcatgcctatggaaaaaatgaaccgctctcctccgcccgcttcccggtcccagcgttgcctgtccaagggctttgggtttcacagacgccttctgtgactccacgttctgaccactcctgattagaagcttggcttcccccagttctaagagatgtctcaatccagaggtttggaaattgagcctttcaagaatcacagcgtgtaggtcttgggaaggacctagagatgatgctgtctagatttccccagccttctctttgaacttgaccttcaaccgctggatcttgaaccagaaaacagttgaaaggacatagtggagacagcgtgggatcaagcatgaagactgagctatgtgctgacgaggactttcacctgggagaagagctcattcttcctatcgtttccctgggaagaacatggctgaaacaacttactgtacagaccacagaagtgagaccaaaaacactgagatgaggaagagacttattttgcaactggcttcaaacaatttgaagaaagggtcatggctttcccttcagcagagtttgggatctgaacactgcgttgcccccaaatgtctgcctcttgagagttctccacccagtggtcctgcttgcgtctttggaggacggtagcagtgcgctcagtggaggccacgggtgcctcagagggatttctcttggacctcctgccctaccccagcttcggcgttgcacttggagaaggccctggatatctcagggtaatctaccatccctagccctacagcatactggccctgtgcactagataagaacaatagcagagggttgtggactggtacagacacacactccccagggtcttaatctgccatgccaacccactcactgctgcaattctattaaaagtttggtggggctgggtgcggtggctcatgtctataatctcagcactttgggaggccgaggcaggcagatcacctgaggccaggagtttgagaacagcctggacaacatggtgaaaccctgtctctgctaaaaatacaaaaattagctgggcatggtggcaggcacctgtaatcccagctactcgggaggctgagaaagataatcgcttgaacccggaggcagaggttgcagtgagccgagattgtgccactacactccg

SEQ ID NO: 2678 - DNA, 31432 bp, Homo sapiens
aactaaccttttccaaatttgtcagggaaatgattcaaggcaatctatcggtcttgccactttgtgaaagccactggggaaccaaatgtgctaagagtcctccctgtttccctggaggtgagtgggagcagttccctcacataagagtctcaaacactccggcttcactgtgcccaagaacagcacggtccggggtggtccagtctgatcccaaccggcccacccggggcatccggtggaagtcttcgccggaggatccgaaggcagcatcaacgcggttgtctcttgacactgcacacagcatagcatttaatcttcggatgttctagtcaccacacaaataaagagactgagcatcggagaaactaaacagcttgcctgaggtcttgtagaactgcctggaaaaggaaaagctggaaaaattgtttatccatgggggggaaaaaaaaagaaattggattcttagtcacaccatgccgaaaaattcactccagatggatgaagagctgaaatgtcaaaagcaaactctgagaatttgaaaaggaaatataagtgagtatctttctgagcttgaagtagggaagaatttacaaagatagaaaaaaggacaggcataaaagaaaagatcaataagtttggctacattaatattaaagcctttgtccatcagaagacactttaaagagaagaaagacaatctataaactggaagaagatatctgtaagacattcaactgacaggattagcactagaatatataaaaatagccacaaactagtgaggaaacaactgcagaaaagtgggcacaaggcatgagaagcacggtcaccgcacagaagggaggtgtgtgaggccagtggacatatgcagagatgctcggccacagacaaaggcaaatcatgactatgatgagacatgattctatacctactgcgttggcaaaaattataaaaaacattgataatacaactattgggaaggtgtggagcaacaggatccccagtggttgtacgaccattttggaaaacaagttagtgttctcacttaaagatgatcattctcacttcctatgaccctgcaatttcactcacgaataataagagatcaatacaatagtttccaaaaaaaaaaaactgttcataatagctaaaaagaaagagaaagagggctccaaatccttatccttgggtaaatggacaaatctgcagtatattcacaaaatggaatattgtctaagagaaaatatgagtgaactacagctacgcagaataaaatggatgaatctcagtgatgtaacggtgaatgataaatgcaatccccctcacgccccgcaacacacatacatacacacatggcgggggtgtgtatgagagggagaacaaaaaatagcaagaagatgatcagcacaaacttcagtagaatagctggtactggaagggaatcaggagaactagagaggagaagagcaataggtagatgtaatttattagtaatgttttaattctttggttgagtggtggtttcacagatgtgcattacattttaaacaaacaaaatttctagcacgcctgtaatcccagctactcgggaggctgaggcaggagaatcgcttgaacatgtgaggcagaggttgcagtgagccgagatcgtgccactgcactccagcctggcgacagagagagactcaaaaaaaaaaaaaaaaaaaaaaaaattctagcttttccattgttttaccctgtccaactactaaaggccatttccaatacaatctgcttaagtgagaaggtctctttaagattagctcaaacttactcctgtttcaatgtcttcggtcacatggaagtggagcccctgagtgggacacatgtggtgtaaatgcgtactgcaactcagatgccagacttcagccttgctcggtggctaagggcatttttgcagtctgcttcttagagggttgaaaccagtttattgtagcaactgtttgtgggtggggagagtgtactaggaaactgctgaagcagttacacaccattagtcctgcattttttgccatggccactctcagcaaacatcaagttctcaatgtctaagggaattgcctatattcgtattaacccaatggttacaacaaagagggctggacatggtggctcatgcctataatcccagcactttgggaggccaaggctggcggatcacttgagtccagcagttcaagaccagcctgggtaacatggtgaaaccctgtctctacttaaatacgaagattagccaggcatgcctgtagtcccagatacttggaggggtgaggctggaggattgtttgagcccgggatgtggaggttgcagtgaactgagatcgtgccattgcactccagccaagttgacaaagtgagaccctgtctcaaataaataaataaataaataaaaataaaacaaagaaagagaactatttattggctatttcctctgttagcacagaaaatcctgtcagcattatcctggctttatagataaggacactgagactcataaaaagggactggcccaaggtcccaaagattacatgtgtaggctgggaccccaaccaaagcctacattctttccacgacaccacatgcactggaaggcacccggtttgtgtcatgcagagttaacacaggcatacatctgtctgcaaggaagcagtgtgtccatctctccacccaacagccttgtgcaaacgctggaaggagtccctgtgtgataacctggtgtgttactccacaatcagaagtgatgtgtgccaagagtggcctctgcctacttcacaggcccaaatcctactcctctaatgccagtgtgtgccttaatgtcaaagacgccctctctgacaccctttaagatggcctctccttattcccctcagagcacccaccagcgtgaggccctaaatcaccacattgtcattcaggattgtcaccccaagcctggatgacactaaaggttgctttgtgtttgtttgcttatttaaatatgaatatattaaatacaaaagttttttcatattccataaagtttgatcaagtttaaatttacaacagatggacagcctctccaatttaccagataagagaatggagggttttatcagattttgcaaaagggcaagctttaaaaatctttaaagaaagatattaaaaatcaaggaaaacagaaacacccaaccctaatggtcattatgaacattttcctgtgttcagaaaaatgatctcagatgtatttccccttaacccatctaaggaactaggcagatactaagttggaaacaggaatcagtgatctaacagaaacatggtaaaatgaaggtatttccaacatgcccaaagaagtaaaaatggggaggcaagcccagaaaatgacagccttcctttccaccctctctagtccatccttaccctgctgacatgatccattctattctgttaaacccttcggcatccaagataaagtgcaaacttgctggtacacccaactggtgtaccagcaagtttgcctcaataataacccagctctgtccagccctctcatctcaattctgttttcccacatttagctgttgtcttctgaacaggaccaggtgctctctgagggaagggattatacattattcatttctgtagcacctagggtttatcatagtagttttccaggaattcaacatatgatcataggaagaaacaaaacttcaggccaggcatagtggctcatgcctgtaagccctgcaccttgagaggcccaggtgggaggatcgcttaagcccaggaatttgagaccagcctggacaacatagtgtgacccccatctctacaacataaaacataaaaataaattagctgggtgtggtggtgcacacctatagtcccagctactcagaaggctgaagtgggaggatcacttgagccagcaaggttgaggctgcagtaagccaagactgcaccactatattccagcctgcgcaagagagtaagaccctatctcaaaaaaaaaggaaaataaataagtaaacaaataaatgaatgaatgaataaaaaacagcttttatgtctgctggcagcctgtctccactcaagagaaaaaacaagccagaatgaggatacaaacttatacatttttcagttaaaaatcccatgttgaagcctggtatgtgaaaaaagtgcctggactggaaactggaggccctggctctggctcgaacgggtagttttgcctgggcaggaaacaggccaccgtcactgatagcagaggctaacccacctgcctgctcacacccttgggagccagagcttgggattccttgtccttcatgcttcctttcatatcgtgggtgtttctccaacaaaggctaattatgttttttaaaaagtcctgaggctgaaagagtagaaactagggcagtgaaagagatctgagccccgtaaaggggacagacaaaactagggaagatagtggaggacggcattccttcctctctgctttctcagggcctccatggcagcgcctgacccatgagatgcactcaggaaaggaaaggaaatgaatcaaggaaaggaagcaggctcagagggctatgcttacagagacacagagtgcagaggaacctgggagagccgtgaggtgtttacagacagcttccacagatcccaccgcctggaccctcaccatggtgagggcaggtgctgttatcagtgcttcactgacgaggcagagagaaagttccatcggcacccaactaggatgtagcagaacagggcagagtgtgatcttggttctgttacctagagcaagtcaggccctctactctgctacctccccatccttcccctcaattaaatatggacaggcatgcacactggccactgttcccatgtgtcacttcactttacagttctccaattgaggccacggaagcagcaaagaaaacagtctttacaaactagacatgaaaataatggtgatgtttaattatttaaaacctacccaaacggaagccacaaagtcaaatgggaaaaccacaggctctgaggccacacaggcctgggttagaatcctgcccaaaccttaagttgtgtggggtgagttacctgcctccctggacttctctttccttatccataaaacagacatctccacctaccttacaaagcttttatcacagggcctgagacacagtgggtgcttaattaacaaggttactgctgttaaatcacaaatatataattcagacaaaaagaactttgccaaagccaatataagacattccattgctctgcatattctcaaacaacaataaaaaaaaagaaaccattatttaaaagtctgaactataaatttcaaaattttccgagaccaaaattagttaattgattttctcccaactctcctgaaaccacctgttaaaacattcatctcattcattcatttattatttatttatttttgagacagggtctctcgctctgttccccaggctggagtgcagtggtgcaatcacggctcactgtagcctcgagtttctgggctcaagcaatcctcccacctcagcctcctgagtagctgggactacaggtgcatgctacaacacctggctgatttttgtattttctgtaaagacaaggttttgccatgttgtccaggctgttctcaaactcctgggcacaagcgatccacccatgttggcctctcaaagggctgaaattacaggcatgaaccactgtgcccagccatctcattcaataaacactggcactgggtactgggatgcagcagtgggaagcagagattccctgatcctaagaagcctgcaatctgaaggaagagtaaaggaggcgaaaagactggtagagcaacaccaagtaggcaggtatctaggtgggaaatgataatctcaacatgagcaggggcagcagcaaaggcgacaataaatacaagctattaacaggctgactgagaggtggaagagctactgcttaggctgtaagttcctatggcccaagccaattgcctcagcattgaatgaatgatgtcactaaggaaccctgctttgattagccagcctggtgtttttctttttcttcttcatggtttcaggctgaaaagtcagtcaaaaattattaaagccaccatttactaagtacttactataatgcttgtaaagaactatgctaactactttccaaacaaatacagttgaccctcgaacaatctgtgtttgaactgcatgggtccgcctatatgcagattatttttcaacccaacacatcttgaaaacacagtctctgagggatttgaaacctgcctacacggagggcctctcatacccacacgttctgcaggactgactgggggacctgagtacgtgagaattttggtatactcaggggtcctggaaccagtctctcatggacattaatgaacgcctgtatatttcaatctcacttgttcatttattcatctatccattcattcatgaacaaactatcttctaaaactaggcaactgaggctgagagtgaaatcagagagacaaagcccagtactcaaggagagaaagagagcacagaccatcacccacgggctgagggttagaaaaggagcttgctctggagtttcccatggggaaatgaccacacctggggctcagaaaaatttccctaaggaaaagacactcaggtctttcttgagacttgagggttgggagagcaggtagtgtagaaattctggaggtggggaactgtgatccaggcagaaggaatatgatgaggtgactcatctgagagaggaacacagtctagactaaggatgaatgaccgtaatagtgaatcctaaggaggaagcaggagaagggccggcggtgcagccggaacgatgcgcagaggagcgccacactgaggagttcagtcaggagggccttgtggtcagatctcctcctcctgacaaagattccgggagatcagcaggacgccagggtaataaatatggagagaaagggcggtggcttgttaggatggaagaggtggggacacagagaaactacacagttctccgagtcctagcctgggcagtgcagggttgtgccatctgggaccagggaacaagatagtgggaacacaggaatggggtagatggtggctttgaagtacctgggaaacatcggtggaaatgtgggatgggcagagagaatacatttgggaatcactggcatgaaggtggtgtgagccctgagaaagaatggaattgctgaggagaaggtgcagagtaaacacagaagcctccagactgaacttaggagcaccggcctttaatcctcgtatggatggggagggcagtcatgaaagcctgggaagctgtggcctgaaaaggagaagggcaaacctagggatttaagaaaacattgcttcaaggaggaagaagaggccaggcatggtggctcatgcccgtagtcgccagcactttgggaggacaaggcgagaggatcactcgagttcacgggtttgaggccagcctaggcaacacatacccctcaatgtccactaaaaaaaaaaattagctaggcatggtggtgcgcacctgtagtcccagctactcaggaggatcgtgagcccaggagtttgaggctgtagtgagctatgaccacaccactgcattccacattccagcctggaccacagaacaagactctgtctccaaaaaacagaggtcagagtactgagcactcaggcaaggtgagaagactgcctggtgggtgtggcaaaggggtcagagggtcttcagtaagaacaggctctgtggtgtggggaccacagcgagaggagagtgagcgaggaaccacggtaagggtggtgactgcagacgcctcgaattccgaaaaggaaggaaagatttgggagaagaggcgagctggggttgtgggagttcttttgaacaggtggaaggaattctgcccatgggtgggcatggataaaatgtagcacaaggcccctgagaagggacttggagcacatggtggggacacatgtctgacagaggcacagaaggagggaggtgtgtgcgcggacagctttgtgaatctgggggcaggaagtcgcacctggaagttcactgtttcctctgaagaggggtcgaggtcaggggaggggagggatcttcccaaaagcaccagggctggaacctgggaagacaggaagagcagaagaggccatggagctggtacctgataaggtccctgccagagatgtgaccttccaactagtgctaacaatctgcccaatgctcttttcctcctcaaaaccaccccacaaagtgggtaacaattctccttccatggccaggcaaacaggggccgagagaggttgagtggcctgctgaagatggcgattctgacagcagggctggggtgtgaagcccgagctccctgaccctgacgcatgcttctgatgacaactttaacctgcccctcaaagcagtcaacaaagcctctgcgctcacacccagcccaacacaaaaaagggctttcccaagtgctgacacagcagcttaaaaagtgggtagtgaagtgcagaaggtaagaaggaatttatgatggcatcaagtagaagcagatgggagtttggcaaaaagtttagaactattacttaaagaaaaaaaaagaagaaacccttctttttttaaaagatgaaacacaacttaaaatagacttgggaagcaattccatacttaacagtcttgaggaagttgacagacagctgaaagacctaagcaatttacaacattcttcacacttcatggcagaaaattaagattgatgtctcaactacacaagaataatttaaggtaaaatcaaagatctgctagatcatgtgaaatggcagatcctaaacgtcaagaactctgaataaattccactccagggaagactaaatagtacacggcttagttaatactatatctttaaggtctgcttattacatattacaaagaagtacaaacagataccaatcatggtttatagggaggttactaagcaccaggttctctactatctctaatcctaatacattattctatatcctaaaacattaatctattttcttccatctttaatcctacccctgtaaagcagtcttattttgaatacgacagaacagtgcctgagacatgttaaaataacttgcctgatgtcaccgtgctggactgccgtgcacagccagtatttaacccgttgttgacgccccttcccctgcctgagggattcccaatttaatgccagcatacagcctgcaataggttttaaattgcaacagtatcactaaacaatacctacttttactacatgaaacccactctcatacgtccttttcttcgactttctcccctcttttttttaaatgctggtatctaccagcattgatttcctgacccactaaacaagccctgcctgacctgaactctataacacaacacagctcattgacacccaccattcaaaacagcatttctatgtgacaatgtgctttgtgttctaaaaggttaatcaacaaaagaacgtttaggacacaatctcttcacagcctgcgtgtaactgaagcactggctggaggtagtggctgcatctacagattcaagttgggtcctttcacctggactagttctcaggaacttcagatgccaggtacaaatatatacctaataggcacacacaccacctgcatcaagacaacacttttggacctagctaactttggcaacttgttgggctgtttatgaagtattaaatctgccacaacattagtgatacggtgataaagcacagtgctccatgtttcttctacttcccatagccacatacgcaaacagcctgacagagcagcacatattttaaggcttacaggtttcagtggttgaaaagcttagtctgtttgtgtataagctaatataggagctgctgggctgcactatttacactttcattaagggctgcactatttacactttcattaactgtgtctctgtggatgttttgaagtggttttcatctgataaaagaatttactggccgggtgcggtggctcacacctgtaaccccagtactttgggaggccaaggcaggtggatcacaaggacatgagagcaagagaccatcctggccaacatgatgaaaccctgtttctactaaaaatacagaaatgagctgggtgtggtggcatgtgcctgtaatcccagctactcagaaggctgaggcaggagaatggcttgaaccagggagtcggaggttgcagtgagccaagatggtgccactgcactccagcctggcaatagagagagactccatctcaaaaaaaaaaaaaaaaaaaaagaatttacttatacctcatgactcagcttattcattaacccagtgaaaccccggaggagaggaggggaactggagagagaaagagaatgatgggcagccaggcagagctgagctagctcacctgcgaggtgagtcatggcccctgggagggagggtgtctgtcaccaaaagcagcctctcccaacctattagagagtcacagaaattccgtatcaatagtaaatgggacaattttgtctctggttccctttaaccgtcccttgccatgctcctagcattggaagcactcagcactttcctgatggtgccaggatgctgcgctatgaacatgagtcctcttcctaggcctgcctctcacctcttcccacctgctagccctgcaatccacctacagatgcagagcagctccaggacacatcatacacgatctgtcaccaccaagaaggtttgaaaaaatgccaacaccacctccttgaacaccaggccagctcctccgtgccttcatggagccctgtgcctgtgcttcccatcctctgtggagagagaacagtttattttaaaggaagggaatgaaatcctctctccagactatgggttgccttgggacgatgaaatttacttgttgtaactggcaatatttgacttcgaaaaagagttacacttctccaaaagggaaatggataaagaatgaggatgttatttttattttccacatcaattttacgctttgccttgatgagatgatgtgctcaatgactaatttatttcattggtgagttctgtctagaccctacacgctgaaaccctgaaggtcaccaaatgtccccaaatggtggcgcaaatctgagtaagaattgttttgattttgaagtcccatcctgcctgggcatttaacacaatgattctacacttgtattgttgtttctgcttttaaatgaccacatcacttccttgtggatttgggatcttaggaggactattccagctctttattttctttttccttaagtaagctgcttccctgttacgggggctgttgctgctgacaccagacctaaagacagcattcaggtctgaactggagcaggttaggctgctaggagaggaagcatgctgagtgacattactcttgagtctaacacaggtaatacagggggatgggagaaggagaaagtagggagagggagagagcgggacagagagaggaagtggaaggagacagtgagcctgcaggggaatcagggagagcgaacttttcccatttgctgaggaactgcttttattaatagaaggtggcaactcccaaaattcaaagaagtaacaagttcttcaccactcctggacattaaaaggatctgtgaaattctttgccagcaggagaatacgatttttaaaaaagtgatattgacattgttcagctttccagactcaagtcattaaatctctaaattgttctaaatattcattttgctttctacattctaaaagtgtagagcttttttgtctatttaaacattcattgtaaaaaccaactggttagataaaaaagtcaagccaaaagagagaaatgtaaaaaactaaaacaagccaggtgcagtggcacgtgcctgtaatcccagctactcaggaggaggaggcaggaggatcacttgagcccaggagttcaagtccagcctgggaaacaaagggaaccctgtctccaaaaaatgttttaaataaaaacaatattaatacaatggcaagtgtgatattatcacatgccaaagtatttttgaatattttataacattgtattttaaaattctcaatgacctgagagtttcctacaatgtcaaaatactcaacacaaattaggaaactgaaaaacaacttctgaaagtcaggtatacagagagaagaacacagaatgctttttttcattctttgttttttgagacagtctcactctgtcactcaggctggagtgtagtagcacaaccacggttcactgcagcctcaacttcccaggctcaagcaatcctcccacctcagcctctcaaggaactgggactacaggagcttgccaccatgtccgggtaatttaaaaattttttttgtagaggtgggatcttgctacattgccagggctggtcttgaactcctgggcttaaggaattctcctgcctcagcctcccaaagtgctgggattacaggcatgagctgctgtgcccaggctagaatggtttctgtaaactttatcttttactttttttgttttgttttgtttttttaagacagggtctcactatgttacccaggctggagtgcagtggctattcacaggtgtgaccatagctcactggagcctcaaactcctggactcaagcaaccctcccgagcagccagggctataggcacgtgccaccaagcctgcctacacttgtggattttataaagtactctctacatttctttccctagaaaaaaatattaccaccctttagattctaattctaaagtgctacatctaatacctctaacataagtaaagtctcattttaaagcatgtccaatgaataaatttgcttctactgcctttgcatatgctaagattttgatggaggaaaaaaaaagtacctgaaagcagctttcatggaacccagctataaagctccacaaaccccatttttccagtgagctcacagatagtaccctgtgccctatgtcagcttagggcagcagttagaggcctttaccaacagaaaagaaaaagcctagcttgcttctaaggctacatacatccagatctgttccaccaaaatcaaatctgtggcaaggaggtccatggctacagattcttctgctatgaggcacccagggaaatagtccagaggtctgaattgcaaacaaaataattttaactaatataaaaaagaccatctgttcagtaactaattcccttgaggacatgatatggaagtcaactatccagcttccacctttacatagtatataaatgagaagagaaaagcgagcaggttgggtgcagtggctcacgtctgtatcttaacacttttggattatttgagcctgcccaggagttagagaccagcctgggcaaaacagtaaaaccccatctttacaaaaaaaaacaaaaaacaaacaaaaaaacaataataataataataataataataataattagtctggagtggtggtgtgcgcctatagtcccagctacttgggacgctgaggtgggaggatcacttgattgcgccactgcactccagcctgggacaaagcaagactgtccaaaaaaaaaaaaaaaaaaaaaaaaacagaaagaaaaagagaatgaatgttaaaatgtaggcagaggcatgaaaaatagaaaagaaagtcagcttgcagagccaagtttatatcttaccccaccctgatgtggttggccaacagctgatagagggcttttcggtaaagtaggtagaaacaaaccccaccaaccctcaggttaccaggcaatgtgccaccatgttattaaagccatcatggtgagagttcctgggcaggcagcccgctggaatgctgagtcatctgttcccccgctcacagctggccctcctccccagcacatgctctgcccacaagcacactctttggggaatgcattaggaagcagctacctgaatgtatcctgaaaatcacagacaaggcactaaacacacacccattggagcctgttctgtcacaactcaagccagagtgcaggcataaatcactgccgtttctggaaagagcacaggcacaccttgcactcagctctctagaggccttagctaaatgctgtttagattatttttaaaaaatgtggttttgactggttcaggatttaaaagagttaacaaacatcatatgagcagaaggcacaatggaatgagtgtgtacactctggggtagacagctctactactggaaggccacatgcctctctgggcaactgttttcttatctttgaactgagatgctttccacagttggcttcagggaaagcatctaagactggagtcacaacagagtattcacgcatggggcaaggggtggggacgctaaagctgaactttgcctttagttaaaattacccttgaaacttctttcttcacactggagaacatgcgtctctcagtgaagccaacacagctggtttttcctccagggtcagaacacactactgtttctcctctaggacatcagaggaagacgatggcttgcatgtgagcaccatgttattaaacacacatgtacacacatgtgtgaacacacatggtttataaccagcaggaagcttgctacaagaagagtgtgaaagttgatattcacaaggaaggggcagaatctacatctcccatttcatctccaactcactgggataaggataaatacttttgctgagtgaagtgacaagcaaaaccagtctcacaccctaaaaaataattagccacatcaagtacatttgaattcacacaagtttcaaaatgttatgatgtaactctacttggtacctagcaaatatacgatctaagcctctgtgcctgtcctctggtcacatgtacccaagctagttctctgaagacaaggaaggtgttttagctattctatacctccagtgatatttcttcaggagagaacagctaatacagctacttctctctgcttccgaacagccctgggcttgcaattactacaagccactgaagaaccacggcttaacttcttagggcatggattttaccagagatcagggaggaaaaattaaataattaatctggcaatttaaaacaaattaatattaaagtaaaatggacatattgcagaatagcatttttttaaattgtgagaatggtttaaataaaacataagacggtagagatatttcaccttctgcccccctcaccccgctgcgcccctgagtgctcctatccacgctgctttggtgttgtttgagaagaacctccccccacagaggcactgatactagctgaatggattctcctttctggggaatgagaacaccagaaaggaaaagagacttccaccttctcttcttggcagcaaggaggtgaatgtaatgtccacatgagggtagtttatacatgtcaatttgtattctaggtgcacaaacaacactcagagagctgtaaggagttctctgtggttagaagcaattctgaaaagagctgactcatatgagaaaagcgtaatgcagtatctatttcttttagcaaaggtgatagaaacgcacgtatcatgaatatgtcatgcaaggaaagatgagggcagcctaagctgagaaggtgttcaaataaatttcctgtttgaaagggattatgatactgctcttttccctacctacctgtggacacaacagaaaggtgggaatcctgtcctataaattcaggttctggccctcatttgccctacaagtatttcttagccaaggtgaagtggtcacccgtgcatctaccaaaatggtctggaccactgactgggcaggttttgagaagcatggtcacctgcctcagggtggtagctatcatttcctgagattatatcacaggtagtacacgctgccaatgctgtaggctctgttaccctcactttatacagaaaactgaagaccctgttgaatggcttgtccatagtcttgcagctggtataaggagaactggaatacaaattcaagatgtttcaatcatacaatgctgcaaggagctgatgtcaaggaagatacaaagtaatgaccacctactctgctagcagatggtggtaaattgttcttagaagcagtgaaccaagggcatgatatcaacagtccttgtgtgtgccttcttcagcagagaggtctactgactgtcagtgagtgttctgtctaaacgagaaggggcttagagaggatcatatcctttgacctagtaattcctcttttaggaaatcatcctatgaaaacaatctgaaatgaggactaatttttaatgcacaaggatacgtaaatttttaaattaaaaatgtcttcaaaacacaaacaaatgtttaatagtaggagaatagttaaataattatgctattcatattcattaaaaattatgtgaggttgagggaggccggcacggtggctcacacctgtaatcccagcacttttggcgaccgaggtgggtgaatcacgaggtcaggagttggagatcagcctggccaacatggtgaaaccctgtctctaataaaaatacaaaaaattatccgggcatggtggcatgagcctgtaatcccagctactcgggaggctgaggcaggaaaatagcttgaacccaggaggcggaggttgcagtgagcagagattgcgccattgcactccagcctgggtgacagagcaagactccgtctcaaaaaataaataaataaaataaataaaaattacgtgagggagaaagtagggagaggggagaaaaaatacgctttcaaagcaataataaccaaacaaaatataatcaataaattctctggctagctatttgggaaaaagtaacatgaatgcctctctcataggttataccattgactcaatcaacaaatatttgctgatcacctattttaagcattgagaaaaacttagaataaaaaaatctttgccctcctaagacaattcgttaagcagtacagtttcatatgggtattttcctatatgtatgttaagcctccatttaaaagttaaaataaaaagcctgacttcatggatcttacattctagtggtgagatatagacactaaacaaaaaagtaaaatatacagtgtacgtgcagtgctatggagaaaacaaaaagcaggcagtactgagatgtgggttgtgattttaaattaagtggtcagggaaagtcttactgataaagttaccacataacaatgcaagatgccaaatttcagataaattacatatcactgtttagtatatcatacaatatttggcacacagctattttaagtgaaatctggcaatcttacttactgaaaggcaagtgaacaaacctcattcctaataaattaaatgttaatgcttctgaataggacactaaagccagaaactataaaagaataaactgacagatatactatggaaaatgtaaagctttggttcggcaacataggctagattaagaatagctgggcacagtggcgcacgcctgtagtcccagctcctccagaggctgaggtgggaggacctcgagcccaggagttaaaggctgaagctggagggtgctataatcacacctgtgaatactgggtaacaaagcaagatctcgtctcttaaaacacacacacacacacacacacatacacacacaaaactgtacaacaaattgggacaagtatttgcaaaatacaaaactcaggattaatctaagcatcattttctcctataaaatgaggggagggggaagatacctgtggttcatacaattataaggatttcagaaccatgtcttgtacctaataaccaatggttcattaaatgtaataaataataatcatgatgtaggtgtacttataaatcagcaagaaaagcacacaattcacaaaataatatcaaccaattaaacttctgaaaataattctagtgtcagctttggcaacatgtgaactaaaatttgaatgacatccttgcacaaagaggtcacaaaattttaaaagcaatccattttttaaaaaaatcatcaatggacattaatgctgctggatgaaagattactgaggaacagggtttcacagtctcaaagtattactcacagagtacttatttattacaaagcaggaaggctacaatggaaaaatctgtgaccactatttacctaaatgatgtcaaaccagacatcagcaataagggaacaaactgataccatgtgcctctcagtgtgatgcactgaaaagagcacatcaactacgtggtactcccgccagaaacatttaatctgaatcttatcatgagacaatcagaaacatacacattgaaggacactgtaaaacaactgatctgaactcctcagaaaaatgtcaatcttgtgaaaataagaaacaggctggggaactattccagattaaaggagactaaagactaaagagccatgatgactaaaagtaacacaagactttgactggagcttggatccaaaaataaaaatagaaaaactgtaagggacattattaggacatttggggaaatttgattacagcatggacattagatcatatcaaaatcatatcagtgttaaatttcctgagtgtgataaatatattagggcaatatttttaaaaagcctgtgttcttaagagaaatacactaaaatacttctaagcaaactgttatgtctctgactctcaagtagtttagcaataaaaaacaaatacatgtatacatgttcacatatgtacatattatgcttgtgtatatatgtgtgtgtctgcagagagggagacagagcaaatatgatagaatgttgccaacttgtctataggtttgaaatttttcagaatcaaaagtgaagctgaatgcagtggcacgagcctttagttccagctacttgagaggctgaggcaggaggactgcctgagcccaggagttcaagtccagcttggccaatatagtgagatctcactgcctttaaaaaaagaaaaagagtgggagaaaatattaataaaaaataaaatgcatgaggtctaactccaaaaacaaacaaaaaaggaaagaaaatgcattctctctcagtagtaatcaaagaaatgccagtaagaatggttttgaaaaagacttaatgttggagaagcgtaactaatataaccttttttagagggtgatctgacaatctataagaaattctgggccaggcgtggtggctcatgcctataatcccagcactttgggaggccgaggcaggcggatcacctaaggtcaggagttcgagaccagcctgaccaacatggagaaaccccatctctactaaaaatacaaaattagctgggcgtggtggtgcatgcctgtaatcccagctactcgggaggctgaggcaggagaatcacttgaacctgggaggtggaggttgcggtgagctgagatggtgccactgcactccagcatgggcaacaagagggaaattcggtctcaaaaaaaaaaaagaagaaattctgattctgaaactttgttgaaaccagctctctgactctatcatgtaatcaacagaggccaagtgaaggccaggcgtggtggctcacacctgtaatcccagcattttgggaggccaaggtgggtgcatagcttgggcccaggagtatgagaccgacctggccaacatggcaaaaccgtctctattaaaaatacaaaaaaggcatggtggtgtgtgtctgtagtcccagctactcgggaggctgaggcgcaagaatcacttgaacctgggaggcagagattgcagtgagccaagattgcaccactgcactccagcctgggtgacagggggaaaaaaaaaagaggccaagtgaaattctagagacttttaatttcccatttgcagctctttctttcatacgaaattcctacgcccaaagaggtttgagagtaataaaaattgtagtaaaaatacaaaataaatgaaagatcctataataagaatactattgagtaaataaattatggcatatcaacttgatggcttatctaatgcagtcagttaaaatttaaaatgatttcacagagtttaaacaacctgagaacatttctcaactgttaatgagaaaagcaaatcttcaagtccatctatagtatgattacacctacataaaataatgaaaatgatactgtaagaaaatatgccagaatgttatcataattatttctgggtgattatgtttcattattgtgtgttttccaaattttctgtcataaatatgtacctgttttatttttataaatactttttatcctaaagtggcaggtcaatagacaaataacataggcaggcaggcaggcaggcagatagatagatagatagatacatggatagatacatagataagacagacaaataggcaggctgggcatggtgcctcacatctgtaatcccagcactttgagatgccaaggtagggggattgcttgaggccaggaattgaagaccagcctgggcagtagagtgagaccccctcatctctacaccataaaaaataatagtagcaaaataaattttttaaaaaataaataaaaataaaagataaaacgtgtagcattcctggactcagaacataatataagatttttgttattatagtgacctgatttagaggatctaaaaagtgagtgtggggaaatgcaggctcacattcccatagtgagacactctgtaataaccagagagaatttataaaaacgaaactttaaaataactataggcttaaggctaacagatatatcaaaaatatagaaatccctataatttctgaatgtatgcaaatcaacattgtaggctgacaatttccaacatttgatagaattttaaaattattcaatgttgtatgtggaaacttgaaaaaaaaaaaagataatttaaaaattattctcagggggcggggcatggtggctaacgcctataatcccagcactttgagaggctgatgtgggaggatcacttgaggccaggagttcaagactagcctgggcaacacagcaagacccagtctcttaatttaaaatatatatatatatataattcaaagtaagtggttctgagaataataaaattatcctgagaatccagaaggtaaaaaaattttttaaaaggtaaaatttccaaagaagcaattaaattataaataaataaaattattctgaaataattaaaataactcaggtgacgtcacccactgagactgactcttaagaaagacgcccctttgcaatgagaaaggtatctctctcctacaaggttacagtaggtaagatgtttttggcttatggtaaacagcttgtttgagaagttgcctaagaaaagtataaaccccgtgtcagctgtttgttagacttactcatcagcccctgatgtggcatccagacaccacctacccacccatagataatctcttggcaacatcaccactaagctggccctgctggctcacagaaagaacaaacagcgcacttaggagctactgagctggaggtgaagagaagggaaagaaatggggctttatttaacaagtgtgacttactgcatgattatttagtgattttttctttggctaacagtttattttaaatttttattgaaatggtaaagcagtttaataactaatcctttttcatgtgaaaggacctttggaagatgcaaattttaagccctaaaccccatccatcacataagatagataacaaattatgaagatcaattctcatcaacattcaaagtctacccaccaatattaaactctaacagttggtcaaatccaccaatttctaagagcacttgaaagatacttttatttacatattaactgcactaaacaagtactggggcaaagtgtaaaacttgcttcatataatcagtacatcctcaacccctggaaagctttccatgtttttctattcttcaaggaatacatctttggcactgaatttcttttagtagaaaaggaagataatgggtaagtgtccttgttattgctttggatccctcagaaatgggtttcgcaactcaccagagttggaaaacaaaaatgtgagggcctggttgattctaacatactcctaacaattatctttcggtggagaggactaaatcctcacccagagcaaacaaacaaaaacaccccaacagaacaatggcaaaaacaactggtaggatgttcccgttgagaaggattcccggatcacctaaagattcctcctgtcctctactgggtgttgctgccagggcatttcaggcatctttgcagcccgagactctcctcaaaggaaagaacagcaaaggctgggggaatatgttcatttgtgaagaaaaggaaaatgtcagggtcgttttcaaagcatggggtgattagttttgccaaaaaataagtcaacaaaaactgcagaaaaactgagtaaagctacatattctcctaactgtaaactgccatcaaggtggctcttttaatcattacatataaaatatccaatgtacccagtactgttatttttctatcattttggcgaattctagtgggaaaaaaatgaagaatggggaagctataaacttaggaataattaagtgcctacactgaaccacaaattatataggactttgtaaaaatttgtttaatccacaagtatggaagaaaaattaatctttatgatttaaaaaagaaaaaaactcagagactcaaagagaaagaaaataattacttagttaaaacaacaaataaggaaacccaaacttttagctggacttagtttcttaatctacccttctgcttttttgaagtccatgccagagaagtgtgttttgagcctagatctccatgctccagtcctcggctgccaacagcatgaggcccaggacagaagtcctgccacccccatctatgtgacatggtgttttgactttgccatgcaggcaatgcttatcacctagccaaacttactcttctgttacgctaaaccaggagggggaaagacaaggcaaaggaagaaaagacatctataaaaacagcagaaaatgtttctgaggcaatttttcttttcagaaaaaaactgagccacagaggaaaaaatattcaccaatgtcaaaagttctgaatgccacccaactataggattgctcaatcaaggtagtttctggatcatttctccttttaaagagccccatgaatacacaaaatcagatcaaaagttcttattcttccactatcacatctatgaaattatttcctttaaattatacattagtcttcccttgttaaaaaaatgtaagaaataaaaattaaaaactcactgctagcttaaagccttaagcactagcttgtttacctccatgagttgacacagggtgatgagtccaaggtctcattatcttttaaaggtcaaggatgagatagcttggcttgttcgatgaacacaaggctataccctcaacaccctgctcagaaatgaatgccactgtttgttcacaaaggacagggaaagagcgtctagacagattaacacaaatccattcccactgctgagaaaccccaaaccacatcctatttgatggctcattaaaaaaaaaaaattacttgggaagtgttcaggcagcagataaattcctacactagtcagaaagaacagctaatcaacaatacatcacacataatataagcttgactcaatgagctcaaatcatgacaaaaatatgagactgagacatacggttcttctctgcctcctaaattattgggtgtagcagtttcaagcagagatccatgtatacccgaaaggttaaatgcatccactatgttatggtatgttatgttatgttatgttatattttagacacagggtctcaccatctcacccagtctggagtagagtggcacgatcttcacttactgcagcctcgaactcctggcctcaagcaatcctcctgcctcagcctcccaagtagctgggactatgggtgtgtgccaccatgctcagctaatttttaaaatttctttgtagagatgaaggtctttctgtgttacctacgctggtcttgaactgtcctcagtctcagcctcccaaagcactgggattataggtgtgagtcaccaggcctggacattaaatacatctataacctacttcacaagtaattctgaaaagtctctagggtctaaaaataaagtgatttttttccttccttctggaagacataagttaaaaaggcattgtgtacaaaagtcagtatgacaaagaatttaatcttccactgtgtagctaagaattaccatttagttgagaactccttgacttgtcatgactgtgctaagtgttgtattaataatcgtcctggccgggcgtggtagttcacgcctgtaatcccaacattttgggaggctgaggcaggcagattgcttgaggtcaggagtttgagaccagcctagtgaacatgctgaaaccctgtctctactaaaaatacaaaaaattagctgggtgtggtggtgcacgcctgtagtcccgaggctgaggcacgagaattgtttgagcctgggacgtggaggttgcagtgagccaagatcacaccactgcacttcagcctgggcaacagagtgagactctctcaaaaaaagaaaaaaatcatctcacccaacctgatccatcctgtgaggtctgctctaaagacacctgggggaatggtgtgtctatgaggaggaggctcactgtcttgctccagatgtgcatgcaaagtattacttcagcttcgttttactcaggaggacacctgggctcagaaacctttgataagaaatcaagggtgggaccccagaaatccaagtgggaccttatgggactccaaaaatggagttctttccactctgccttattgcctctgatatgtttatccatacgtttctacagaatttgaccgttcaggtaaaatcagcaataaaagcaagcactcttcttgcacatttttaagcggtttttgttgtggtttttattttttaatcttacagctcaaataaatgtttctctaccagaagcacttaagaaatattatcattatttttgagatggagtctcgctctgtcacccaaactggagtgcagtggcgtgatcttggctcactgttgcaacctttacctccaggattcaagcgattctcgtacctcagcctcctgagtagctgggattacaggtgcgtgccaccacacctgactagtttttgtatttttagtagagacggggtttcaccatgttggccaggctggtctccaactcctgacctcaagtgatctgcccgcctcggcctcccaaagtgctgggattacaggcatgagccactgcgcctggccaaaaatattttcaaaacttcagcaaataaagtataattatcaaaaacaaaatcattaacgtaatataaactgctcatatataatacaaacatgaactatttactatatatattcattttacctgagctatgctttgttctctcaaaccattttgaagccatggcccatggattctaccagtaatgattagcgtttcgtgctgggagtcctataaaatcctgtcttcattacacataatgtaccatactttatgagttctggcccaacaggttaccttatggctaagaactggagctactttttagatagttcactaagagcaaaatctgtaactgggccagaaggctctgcacatggcctacctgtcttccagcttcctgctccctcccctgcccgcacaatactgcttggcactggccttctgccactcctggaacctgtcggcccttctccctgttgtggctgagcctttagaaaaggcgcttcatcatcgtggagcattcctgccactgtcacaaagctctcactgaccattctttcacttcttggagcaaaactctctttcttagagaagcctccctgactgccgcagacgaggtccgtttaccctgttctgccctctcaaagcactttctaccctttactggactaatttctgtctctcccactagactgcaaactccatgagggcagggcatctgttttgttcaccacagtatcctcagtaccaggtcagtgcccggcacacatgcattaattcaacaaacatttgagcactagtgcacataagggattgttgtaggcacaggggacatatcatgaacctcagattctagtcaaggaaacaagacaatggtgggggtatggacaaaaggaaacaatcagtgcttcagaaaaccagatagcaaggaaggggggatataagagtcactttatttatttaatttaatgtaatgtcattaattaatttatttttttgagatggagttttgctctgtcacccaggctggagtgcagaggcacaatctcggctcactgcaacctctgcctcccaggttcacaccattctcctgcctcagcctcctgagtagctgggactacaggtgcccaccaccatgcctggctagttttttttgtatttttagtagagacagggtttcaccgtgttagccaggatgatctcgatctcctgacctcatgatccacccgcctcagcctcccaaagtgctgggattacaggcatgagccaccacgcctggccaagagtcactttaaatgcagttgaaggcacaacatcattaagaaattctgaacaatcatttgatggaggtgaggtgagggagactgaatcactaaatatctgaggaaagatatttcctcagaaatatgccatacttgtaatataaaataccatacttaaaatatgccatattttatgagttctggcccaaaaggttaccttatggctatgaactggagtaactttttagatagttcactaagagcaaaatctgtaattcggccagaaggccctgtagcacgtggccagcttgtcttccagcttcccaagggagaagggaggaagcagtgagtgaaaaggccacctgaggacctgtggagtatggtctggaataagcaagcatatagcagacactccatggcataaataaggctgcacggggaagctacgttaaatcaagctgttaattatcacagatgccaaggtgaagctaagtttccatcatgtaacttctctgtggggagtaacacagtatgtggcccaaagaacaaacatctttacgaatcaacacttgcctgttccttattgttccctcaaccaaacttgccgttgtcactgtgtcactgtgctggttactcatttcttcaccaaattccagaacatatacttgtttttgtctcttactgatcagcctttgagatgggatcttgctatattgcccaggctggacttgaactcctgggctccacaatcctcctgcctcaatctcctgagtagctgggactataagcttgtgccaccactcctggctgctaactttttttaaacagatgtcccgaatataaacatgaattccacctcaggtagcaaattctacagtatattttgttgcagttttactggtttcactggcctaacaactgaccttaaacatatgtagatggaaatattttattgtcaatttaatgtttcctcagagattttagcagtaaaaagaaaggaaaacagccactagaggtaagtgaagaggactgcatttaaatcccataaagcagtggcagaaaaaattctccctacggccaatgaatgcatgacagaaggacacgcctaaaaaagagatgaaaagctgtacctaatattttgaaatcaactaaaagatttaagataataatatatgaaagaacattaaggctaggcatggtggcttgtacccataatcctagctactcgagaggctgaggcagggggattatttgagcccagggattcaaggccagcctgggcaatacagcaagaccctgtgtcttaattttttttttttttaaattagccaggcatactggcgcacatctgtagtcctagctactcaggaggctgaagcaggaggattgcttgaggccaggagattgaggctgcagtgagctatgatagcaccaatgcactccagcctaggttaacagatagatactcgactaaaaataaataagtaaattgatagatagacagacaaacagaatgaacattaaatcagaattaggaaatctcagaaatgaggtcacagtactcaagaaaacattaacactcaaaaaaaattagatataaaaaggaaaattgttttatgagggccaaattagaaaaaatacaagaataaaaaaacacaacttgccttaagagaaacagataattaaaagataaaaaattttaaaaccaaaaaagaattaaattagataattagaaattaaataaattaaaaatgacttgaaagaaagtgacacagatgatgggcaaagatccaaatagctataatagaagttttcatagacaaaaacaaaagcaagggaacagaacaacgctgaaaattacaactcaagaaaactttgctcagataaccaaaaaaggctcaatattgcatgctgaaaggctataccgcatacatctgcgaaaacggatccaaaacaactagtcaaaatatacatttcagtaaaactaggagacttaaaaaaaaattcagcgcatctggtcaaaaagagtaagtcaagaaaaaaaagtcagattgccatcacactttgagagaagcatttcaagccaaaataaaatggaacatatttaagattctcaaagaaagaacatttgaatcaagggttctttcatatataattttacacctagctgagcctactttcaagtacaaaggcttctgacaaactaacattcaagaactcagggagcacttttcccatgactcttccaaaaaaatgtagtagatgaccaaactcatggaacaaacatcatcgtaggaactgagagtgagaattaaatgtacacttacctgtaaaacagagactaaatgatggttataagcgttagcatagagtatacaatggctatttgctctgacaatgtaaatatggtataattattttaaaaagaaaaggacagaatgaagagggcacacaagaaggtagaataagagtgctgacttccttacagctaataaagggtatttttctaaatcagacacagaagagggaaggcagggaaaataagagattatagctaatttcaatattggtcatagtagggtaccaatagacaatgactaaaaagagacaagactgaagtactgtataacgttatttgtggcagactgtaaaatggcaaaaaaaatccttcctttttatgcatgccccttgcaatgtgacttttctgctcctgccatcaagaggtgcggtgtatttactgctccccttgaatttaagattggcatgagacctgctttggctgaaggtatattaacaagcataatgcaaactgaggcttgcagggtagcttgtgctgtcttgctgctgggaaccctttggtcaccatgtggacaagctggactagccatctacaggatgaggggccacatggggagaggctcccactgtcccagtaatcccagctgagacaccagaagtgtgactgacgtcatccaatcccagccagtctggcctagaccagaactgcctaggcaacctatggaattatgggaaacaggtaagtattgttttaaaccattatgtgttcaaaaaatgaggtttagaacgaggaggacatctgaaaaatagaatatgcttgacgactgccttataagtgaagagcccatatgcttatatgctaaaaaacagaatatgcctgaagattgccttataagtcaacagaaaataaaaggttattttttctttttttgagacagagttttgctcttgttgcccaggctagagtgcagtggcaaaatcttggctcattgcaacctctacctcccaggttcaagtgactctcgtaccttggcttcctgagtagctgggattacaggtgtgcgccaccacacccagctaatttttttgtatttttcatagtgatggggttggccaggctggtctcaaactcctggcctcaagtgatccacttcggcctcccaaagtgctgagattacaggcatgagccaccatgcctggccaaaaggatatattttcaaaccagatgttgagggggtgttatctaatttcaatattcctattagaaaaataatcgataatgaaaaacatggggagtggctatggtattacataatggcatatgtagcccttagaacaaaaatttaatttgctcttttttaaaaaaccctcaaaaataataaaaataatacaaattaaaagagatagagaataaataaaacagaccacagagaaagactacttcatatacccaggaggtcgaggctgcagtgagctgagatcacaccactacactccagcctaggcaacagagtaagaccctgtctcaaaaaaaaaaaaaaaaaaaaaaaaagactactcatattaaagaattgcatacatacatatgtaatatgaaacaatgacagagccaaggccaaacatattggctataccaatacatttaaatgggcttaatttatgtgttaaaatttaaaaaaaaaaattcagattggctagcaaagcaaaatcccacactatgccatattactactgtcgtactactatgcagtaatctcctgaatggcttgtaaaataaaaaaagcaaagtagaaaaaagtaaatatagcagattacaatttacctaagaaacagaagaatataaatatgtatacttatgtttttatgttaagaaaaacaatggaaggatgaagcaaaacaaaaattacttttaaatagttactcattaaggtggggagagaacaggatggaggagacaggaattaaaatctagacttttttcaatatagtacaccttgtcttttaaatttgactttggaactacgacaatattttaaataattacagaacagttatatttttaaaagtgatctctaagaaatgaaaataaaagaaaacaaatgaacccaatgtctccaactgggggcataagctcacagacagggaatgttccagaagctatcagactgtgcacccctagagatacactaaggtggaaagaactgcaaaagacaaatcttaagccatcctcgattattaaatcggtggcgaatgcactggttttgttattctgaggctgtggggtgtgtaccatgggataaagcaactgaatgattatatgatattctatttctaccatctccagtgtcattgagaaccaggattcttgctatgagagaaagaacgtatatatttaggacaaaaaagattaagtagaaa

SEQ ID NO: 2679 - DNA, 2518 bp, Homo sapiens
gtttcaaaaaaaagtagaagacaaacttctcacctcctagaaaacccatagtaggtattattatggctcccagttcacagtcaggtattattataacctacagtaggtattattataacctagcccaacccaggttgccaaagttctatctctctctctctctctctctctctcactttccacgaggcaggcagccccaggctcacaggccagcagctgagatgagaagacatggggtttttcaatgacttcagcagactgtaccgggaggatttggctaactgggcttggatcactggccccttcctgccggcagcccttcctcagatgagaaaattcacagatgagaaagcgaaacttagagggtgcatggatagtgaatgctggaagaggattaacctcaggaccttccatcccagcacctctggagcactggcctgcgttgccagtgctcttcaggccagctggggggaagggactgaatgccaatctgctctgggatgaacatctgcctccaggagacagttgtttaatgaaatttcccacccatgtgattagcatcctctgagagtgagatgagtaaaacaggctaccaccatcaacatcatctctgactgcactgcctagacagtaataacacccaagatttttagagctttctgtttctcaaagtcatgcccactgattcactcaggaacccggcaggaagcaaggcagtccttgattgcccatgtcgttgagatggtaaaaggggtattctgagcaactgttgagttcttttacatccctgggatggcatggtcacaaaggccagacaccgggcctgacttcaaggtcactgtggctgcactactgagtgactgtggacaagtctcacattctcttgaagactcaggagcctcctctgtaaagtggagatgataattatttcccaccgcatgggtgtgttgtggggattaaatgagatcatacaagtggaatgctgagcaccagtccaggaaggcgaggggcacgccctacatgtcacctactggatcattgctgttttcagggttcctattacccaaagatccacctagaattcttcccctgagtgctgttcatcttcgtcaaggctcagcaatgttttggatgattctcctttgacatagctctggtgcttgttaatactaaatgttttccagcttacctataaggaaactgagtcttaggaagcaattgcagggcctctactttgtgcatgagaatgagtgacggctggggaaacctgggatttggcctgatgttcaagcactggcacctgcctgccttttctctgtaaacatctgaccctagaatgctccaccagggcgagaccatcatcaccaagcagcagctgcatggtatttatcaaaggaggcgtggtttcctttgctgtggctctccgcattcgtggcagttattcatttttgaagcagaggtcacttttctttcactggtgaggtactttgacaaagacgaagaagggagacaatggtgtggcaaaatggctttgttgtggtggaagatgaattgtcgtctcaagggggcagaggactgcctgtgagcttccttaacatggagcccgaaaccggtgtttgcacagtccttgaggaaagggtttgctcagcaaattaacagtgtgaacaagactgcaggagggaccatttacctacctgagaacaaactgttttctagctcttcagcagcaccacttacgcacaattttcatgtgctaatggcaagtgattattacctagttagtgaatatacgtggaagacataaaatagcctttactatcccctggttgagacaactcgctaactcagacttgccaggtgctctgaattagagaggtgctacaggaatgtcctctcggatttttggcgttgagcatgcatgcatgtgagcagggtgccatttcttcagaagaaaaataaatgacaacattctgttttggggcttgaaactgcatgactgaaaacataaaggtgacaactgtgatatgcttttttaatgagggcagagatgtcaagagaaaccagccttctaggaacaaaagaatactctgtcagacttattttgcaactggcttcaaacaatttgaagaaagggtcatggctttcccttcagcagagtttgggatctgaacactgcgttgcccccaaatgtctgcctcttgagagttctccacccagtggtcctgcttgcgtctttggaggacggtagcagtgcgctcagtggaggccacgggtgcctcagagggatttctcttggacctcctgccctaccccagcttcggcgttgcacttggagaaggccctggatatctcagggtgctggggagaggagcagtgagcaaacacaaaatccctgcctgtttagaactgatcttctagtggtggtggttggggctgggagcagctggacagtgaattactaagtaagtatgccatgtggcgattagtgatgtggggaactaataaagcagagttgggg

SEQ ID NO: 2680 - DNA, 2868 bp, Homo sapiens
gggttctgttgcagtcagtaggtagaggcaagggatgctataaacttcctacagtgtacaggacagccctcacaacaaagaattatttggcacaacatgtcaatagggctgaggttgagaaaccttggtttaatgactccttattttacaaagctgggtcctgtcttgcacaccttcctttaagctccttattctactctgtaggatttctctctgaattgtgtggacctttcatagcctttttttgttgttattatgtctatttcaatgtgatttccacacaagttttggaattatatagcatggacttatttcccagatctccctatctatgtgatctcccttttccttatctatgaaacaggacaaatagcaacccctacttcacacgttgttgggaggattaaatgagtttgtacatgtaaatccctcacaacagtgcctgatacagggcctaataaatttacttattatcataataaaaatcatttaatttctttcactttttcatatgatccttaaaggcagtgattatatcttgtagttatatcattatattccttatacctccttatagatgtagggccagatgaattagagtttcttatcagaatggtaatggtgagggataagtctttggtatatttccaatcaatgggctctaaaactttgagagtacagggtaagtccacctccctttgagaaaatgaactcttacctaggtcaatgaataaactctttcagcttaccaaatactaattcttgatctaggacaaatacatgacagcggctgcacctgagtttcagggaatagctttgctcctttttgtgttaagataaggaagatagaaaaagaaatggtcagagtagaaagtgaagcacaggctgaagctgataagaaacatggttgtgtgtggcgctgatggaggaagcggcaaagggaactaatgagcagtctgaagacagagggagagatgttcctttagaggctgcaaccctgcgtgcccatttaaaaagcaaaaacaaaacccagcagtcccctggtataatttcagtgaccagtgacctcttggtaaatatatctctttgatatattttccagcttgcaatctagagatcagagtagcaaaacaagacaagcagaggctaacatatttgtgtgagcaaatactcattactttactgtcacctaatttcttgtggaagcaaaccaagattttcatccatggaactcacttaaattgagagatccttacagagttctggacggaagcagagatctgcagtcccatctcatctgtccccaacaccagacttccaagaggtatcaggaagggcaaagcaaatgagctatgcccagtgaagaatgaacacacgactctggttacctggctttgctcgctgcctctgtttaatcgcgtgtgacttcctgagtaattggagaagacgctgggtgtgaagtgaggaatgtgcagctactgcagctctcttgatgacctccatcggctttggagaagtttggattcagagataccacggtaagagagaacagtaatgatgttgaaggacaaggggagagtgagccacaggaaaatgggcaggtggggctccccttgaatctctaggtctggcaacaatggcagtggaaaatgtgaatgccgggacagaactgctgatgctgtggcttccttctcagctctgtcaccaactcctttgaccttggcaaacttcttctcctggactcattgcttctccatctataaagagaagatggtggagggttactggggtgcagaggcttaattattgtttgcagaggatttggatattcttggatgaatggtgcaatcaaaatgctgtggaaaatattatcattttgcatgtcagttagcaaggtgacttaaacctgtcactgcatattgggtgagtcttaatcaaggaagagttgcagatatagaaaagaagaaatatgaggttagagaatggccattccatggagataacaggtttgcagcccaattgatcatacttcaagtttcttattattgatagtgttagctgctgtggcagaataaagatggccacaaattctttgattctcttcctatcaagaactgaggtcttttcctcttcccttgaatctgagcttgcctgtgattacttcaacctgtggagtataggcaagcctagccttgaaaaggactggaagctttactttggtgtctgggagccctgcaccaccatgtaaaaagtccaactacctttctagggagtccagatatatgcatcctatgactatatggagaatagccaccaagtgacaggcactggtaaagccttcttaggccttcttgagccactaaatgagtcccactaccagctgaatatccctgagtaacccagttgatgtcacatagagaataagaatctcagccaagccctgattgaattcctgagccacaaaatcatgagctgtaataaaataggggtagtttatttcacaagaatgaataactagaagagttaccttttattgcttatccagtgttatactagccactatacctcatttaatgtttacatgaatccccaaagttagatataattctttcagatttacaaatgagaaaaattagttctgagttggagcaagctacacagaatgagcttggatttgaattcacgtctgtctgaggctggagctcattcggaaggggtttccaggacagcctcacccccactggtccctctttcctaagggcttgccctggagcataatgtatgaactttaatgctttgttcttttgggctaaatattgtccaaattccattcttatgcaagcacaggagggcatgctatcatttagt

SEQ ID NO: 2681 - DNA, 24527 bp, Homo sapiens
aaagaatatatatttatatatataaatatatatataagataaaatatatatatatttttccattttgaacgtattgggttttttccatgctgtttcctactctcctcttttgcacccctcccatttccttcgtttttcttcgaaaatttcttccccctccagttcgctgtccggccctcacatgtgcgagaggggcagtgtgtcgttaatggccgtggcgggcaccgggctgctcctgtagtgctgggacatgtgaagttggctggggcggcgtgttccggcacctcggcgcgggtaaggtacgtgctgatcaggtcccggaggtccccggcctggcagggcgccctggagtgggaggaagaggtaaccacagcggggctggagtagggtgccctactgcgagtaggacgtgctgtaggtgggcgagcagttctcgcaggtctgcgaactggtcatggagttgtactgcagggcgcccacgtcatagcggtgtatgggctgcatctgcgcggcaccgttggcgtggaggcccgggtgctgtgcgtagcccagctggtcctgcatcatgctgtagctgccattgctccagccgttcaggtgcttgtaactgtccatgcgctggttcacgcccacgcccagaccggcgcccaccccgaccctgttgagccaacttttaagttgccacatgacacatcttgtccatcagacctatatcacatgatcacactgagctgaaagagaaactttaaatgtcttcattctgtatgtccagttgtataccaaaaactggaagaagggaaggacatcttgggggacaactggctctcttatgacaatccaccgctttgaataccaagttttcatgcctcatttttttttccccagtgtggaagatacccatccacaagagagtgggctcaaagtgactgcatttacttctaaatgtgccatactctctataaggtcttaaattagctccttgttatacttcataaatgaaaagagtatcttcccctacgtacccagagtgtagtaacaatttcaattcagaaagggaaagaggccgggcgtggtggctcacgcctgtaatcccagcactttgggaggccgaggcgggcggatcacgaggtcaggagatcgagaccatcctggctaacacggtgaaaccccgtctctactaaaaatacaaaaaattagccgggcgaggtggcgggcgcctgtagtcccagctactcgggaggctgaggcaggagaatggcgtgaaccccagggggcggagcctgcagtgagccgggattgcgccactgcactccagcctgggcgacagcgagactccgtctcaacaaaaaaaaaaaaaaaagaaagggaaagaatgggcaacacaactctcactagttcctaccagttatcaaatccaccgccactatcccccagcagaaaagcgggataaaatacgggactcatctatttgaaggcagtagaaatctgtccaagcaggactctaaaaaggagtgaacatttctgaggtgagctgacctgtggctgcttttagtttgggggcacttgtccattctggttgcagaccggaggctggtaattttgattttgtatttttttaaagcttgcctccagaggacagcaaccaagaaagcttttggtagagatatggaacagccttaaacatgggcaatttccactcagaaaatttgcaaagttgtggtgctgtttaggagagaaaacaaaagtaggcagaaagcttcataaaacaaagattaaaaatcaggacttgccagaaggaggggatctggagaatatcctaggtgaccattagaaaactctgaggctaggggcacgtcaaatgtagaatgagccttatgccaagatttgtaactctgccttgatttatcatgattcttggttggattaagttctagcagaagacaggttgcctcactgaagaaagacatcacccaaagccagtaacattaaaacatctggaaaccaatggaaaattacaagaaatgccaaaaccacatggaccacgtgaccaaaaactaagagaaaaaaaagtgacatgagaaaccaagccacagacaattcacatattggagttcactggcaagaactctaagataactatgactaatgtgtttgagacaattatggataagataataggcaaagactttgatcagaaaagtaatctataaaaatcaaatggatattctagaactgaatacagtgtctggagttgagaacacagtaggtggatgtaatagtggatttgtgtaacaaaagacaagattagtgaactacaagacaggtcagtagaaaaaaatacatactgaagcatgtattggaggcatgtaaacacaatgaaaagcctttagaaagataattggagtcttggaatagaatggggccaaagtaacatttgaccaagctcagaaaactaaagcaggacaaagaaaaatagaatcacacttaggcacatcaaagtaaaccaactaaaaagtaaagacagaaaacatcttaaagacagccatctcccacagaaacaatggaaaccaaaaagactagaataatacttttaaagtgcttacagaaagtagctgctgatctagaaattcataccctgcaaaaaatatccttcaaaaatgaaggtgaaatggggctgggtgcagtggctcacgcctgtaatcccagcaccatgcccggctaattcttttgatttttagtagaaatgaggtctcactgtgttgcccaggttggtcttgaattcctgagcaaaaaagattctcctgcctcagcgtcccaaattgctgagatgacagctgtgagccactgtgcccattttgtttttggtttgtttgttttttaatttggctcttttagttgattttcatgggagcattgatctagagcaagttagtacatcagtagtttccaacctcgagatgattgtgtcccctccccaggggacctttggcaatatctggagacatttttgactgtcatagattggggtcagtgaggatactactggcatctagtgagtcaagactagggatgctggttaacatctgtaacaggatagccctctgtaacaaagaattatctttccccaaatgtcattagtatcaagattgagacatcctgcattataaagttttgattttagtatttttttaaaaagctctctgatttcagatatttttctgattttacatttaaaagaccttaaatggcacacaaacggtataaattcaagttgatgaacattgagttcaatgtgagttaactgaagagaatagccattggattcttatgtcacccctatttatctctctagagatatatggaggataacttggtggacaaaatacagttagaagctgagaatattggtctcaatttcagctgagaatttgagatgaaacatgtatgcttggaagtcatttatacacagctgttagttgaagctattgtaatgtataagtcttctcatttgtaaagcacaagagagcagggccaaggacagaactcttaagggcaggggaaggagggaagaccattggtgtttaaggactccattcctccatatgatcaactcaatagatgcaaaaaataaattgacaaaatgtaacacaataatcaaacatccatacatgatagaaacttccagcaaactagaactagaaacgaacgttcacatcctaataaagtgcatctgtgaaaacttacagcaagcatcatacttaaagtgaaagactgaaatgctttctctctaagatcagaaacaaggtgagggtgtatgctcttaccacttctagccagtgtaataaggctaaataaataaatgagtaatatccagattagaaaggaagagatgtcttaatttgcagatgacacaattatctatgtagaaaatcctaattaatctaccaaaaagctaccagtaccaatacatgtttctcaaggtggcagaatataagatcaatttgccaaaatcagttgtatttttatatagaagcagtgagcaatcagaaattgcaatttaaaaataatgtaaaaaataataaatatttaaggataacctgccaaaagacatgtgagacctgttcgctgaaaactagtaaacactgctgggataaataaaatctaaataaatagacatattgtatttatatattagaagattcaacattgttaagatataatttattctcaaattcaactatatatattcaatacgatttcaatagaaatcctagcaggcttttaaaagaaattaccaaatttatatgaaaatgtaaagaacctagaatagccaaaacaatactgaaaaaagagctaaatggaggatttacactatctgatttcaagatctattaaaaagctacagtaatcacagtataaagaaaggtaaacagagacaaatggaacaaaatttgtccagaaatagacctacagaattgattttcaacaaaggtgccagggcaattcaatgggaaaatgataatattaacaataaatggtgatggagcaaatggatatccatataaacaaatagtgaaaacaaagaacaataacaaaaaacaaatgaacttcaatccttatttcacaccagcattcaaaaagtacttcaagataaatcatagtcctaaatataagaggtaacgtataaaacttcttgaagaaaacgtaggagaaaatctcagtgaccttggcttggcacgtgtttcttaaactggacacaaaaagcaagaattattaaagaaaaataaaatggatatcatcaaaataaaaaatgtttgcctttccaaagataccgttatgaaaatgaaaatataaactacaaaatgggaaaaatagttggaaaacatatatccaagaagggacttctacctagaatacataaaactccaataataacaacaaataattataataataaatgtaataatataaaaagtatacagatgatttgaaaagtcacttaaataagatatatgaatggcaaattagtatatgaaaatatgctcaacataaatagtaatgaaaatatgaattaaaaccatacccactagaatggctaaaactgaatagctaaaattgaaaaaaccgataccaagaattgacaaagatttgggacaactggaacgtatactgatggtaggggatgtaaaatggtacaaccactttggaaaacaggttaccagtttcataaaaagttaaacatacacttatgactgagccattccacttcaaggtatttatgcaaggtatatttcataataccttgaaatgaaaagaatgtatatgtccacacgaagacttgtgcactaaagttcatagcaactttattgccccctaatagactacaaaacctaaatgtccatcaacaggaatatggataaacaaatcatggtctatctatacaacataatacaagttagcagtagaaataaactgttgatacacacacaacttggatggatctaaaactaattctgctgacagaaaccagacaaaaagagtacacattgtatggttccatgtatataaaattctagaaaatgcaaactagtctatagtgatagaaaacatatctggttgtctcaggatggtgaaagggcaaggagggcataaaggcagggattataaaggggccataaggaaagtcttgggggtgaggaatgcatttattatctttttttttttttttttttgagatggagtcttgctctgttgcccaggctggagtacagtggtctgatctcggctcactgcaacctccacctcctgggttctagcaattctcctgcctcagcctcctgagtagctgggactacaggcgtgcaccaccatgcctggctaattttttgtattttagtagagacagggtttcactgtgttgcccaggctgatctcgaactcctgagctcagccaatccacctgccttggcctcccaaactgctaggattacaggcatgagccactgtgtctggcctccccgcatttattatcttgattgtgataacaggttcacaggtgtttacctatgccagaacttgccaaattttagcagtttaaatttttgcaattaaaccatataaaaaatacccctaaaaaagaaaaaaatgggaaaacattaaaaatcgttactgctataagatcaccacgcatcctctgggtaggaaataatttctaactcttctttatccccaaatcactttttactttcattatagtacttatcagatgtctcagttatccattatcccaaaacttagtggctgaaaacagtaatttgctatttctcacatttttggggtcagctgggcaatttctctgctggtctagcctgagctcactcagggggctgcagccagctggtgagttcgcagaagctggagggtttaacatggctttggcatagatggcttgaaggcggcgactctcactacatggtctttcatcattttgtagtctaactgaatattttttttcagtgtccataaatcaagttttattggaatacagccacatccatttatttacttttttagtgagatatgattgtcagacaaataaagctatatatattcaacgtatacatcttgatgcattggaggataagtatacacctgtgaaaccatcaccatattcagtgccctaaacttaaccatcacctcttaggggactcctgtattagggtcctctgtaggggcaaaacttacaggatatatgtatatatgaaaggaagtttattaaggagaattgactcacatgatcacaaggtgaagtcccacgataggccattttgcaaattgaggacgaaggaagccagcagtggcagtctgagtcccaaaacctcaaaagtagggaagctgacagtgcagcctccagtctgtggctgaaggcccgagaggccctggcaaaccactgttgtaagtccaagaatccaaaggctgaggaacttggagtctgatgttcaggggcaggaagcatccagcatgggagagagatgaagactggaagactcagcaagtcagcttgctccaccttcttctgcctgctttttctagctgcactggcagccaattggatggtgcccactcacattgtgggtgggtcttcctgagggtgggtcttcccctcccagtccactaactcaaatgttagtctgttctggcaacacccagcaacaaccagatacacccagaaacaatactttgcatccttcaacccaatcaagatgacaatgttaaccatcacaccttgtacactattggtgggaatgtaaattggtacagtcactatggaaaacagtatggtagttcctcaaaagattaaaaatagaactaccaaatcatccaacaaacctgctactgggtatatacccaaaaaaaattgaaatcaggatttcaaagagatgtctgcattctcgtgttcattgtcccattattcacaatagcaaagacatagaaagaacctaaatgtccagatgaatggataaagaaaatgtacatacaatgaaatactatttagctttaaacgagatgagaatcctgccatttgctacgtcatggatgaatgtggaagacatgctaaatgaaataagccaggccaagtgcggtggctcatgcctgtaatcccagcacttcgggaggccgaggcaggatcacttgaggtcaggagttcgagaccagcctggccaacatggtgaagccccgcctttactaaaaatacaaaaaagtagctgggcatggtggcgggtgcctgaaatcccagttacttgggaggctgaggcaggagaattgcttgaacccgggaggcagaggttgcagtgagccgagattgcaccactgcactccagcctgggcaacagagtgagactctgtctccaaagtgggggaaataaaagtcaaacacggaagaactactcaattattccatttaggaatctaaaataatcaaactcgtagaagcagaagcagagacttgaatggtgattaccaaggtttgggggagggtgaatcagagagatgttgatccaagggtacatagtttcacttatgcaaggtgaataaatcctagagatctactgtacaacatcgtgcatatagttaacaacactgtattgtgtacttaactgaatcttcatgtggcagtcgggtacctaatgaataaatgcagaagccatgaggtctcatgggttgcccgggtcctagatattgcactgtcactcctgccacctttgaccctttatcaaaacaagttttaaaaaacagcccaaattcaaggggatggagaaattgatgccacctttctgatgtgagaaatgactatgccatattgtaaagggacatggacacggagatcattaatataatgatttgcccttccaggttatgccttataggcatttttggtacctgtatcccttctattaaatcataagttccttgaaggcagaaattagatcttatttacctttgtatttccctttgcaacgatcacagatgttgcacgctatgcaataagtgttgaatttttccggatgacaagacaagtaaaaggtaagggcaaaaaaaaaaaaaaaaacaaaacaaaacagggttgaagacgaagacgcatcgttgtagaggtaggggagaaaagatatattccaaataatttaaaatcatgatctccaaagcaggcaaaagcaaagggcaaatattgatgagccatcagagtatcttttttttttttttgagatgtagtctcactctgttgcccaggctggagtgcagtggcgtgctcttggctcactgcaacctccgcctcccgggttcaagcgattctcctgcctcagcctcccaggtatctgggactacaggcacacaccaccgtgcccagctaattttgtatttttagtagagatggggtttcaacatgttggccaggctggtctcaaactcctgacctcaagtgatttgcccgcctctgcctcccaaagtgctgggattacaggcgtgagccactgcgcccagcccagaatatcttaataataacatttttatagccaaataggtaaaggcaacagataagaagagttgagtagctgcttaagtagctagagctttatttaaatacagctcttttgattccaaattttaggctttttttccccttcttcaaattttgcaactctggggtggtattatgttaggcaattgaagggaggggtggataatttaggggttttaaattcacagagtaaacattctggtggttggtaccatgcttttagtatttatatttcccagtgtatgaaataaaagattttagagggacaatgctgaagatgcctaaaataaactttccttatttatttctaggcctttctaagcagttagattccaagagacaaagtatgttgtagagctgttctgtttagtcttttcctgaaattgcagccagtgttttgcctatctgctattaacacattaccctttgcctgccatctcatatttggcatattttataaacaggctgaaagctctaagctgaatcctggctatatcaggttttgtaattatatcttcctgcaatattcttcccactcagacagctaataaatagtttaactgactgagattcagcctttctctttgtctctgcaaaatttagaaattcaaaatgcaattcaaaataagtattttcttcatgtactttccccatgatgtatttggtgtccaacaatgaaccaaattatgaggaaggtgagtcaacagaatcatgagatccaattctttctcttgagactcttatggtatcggagagatttgcagtctatttattttttattttatttatttatttattttttggaataagatctcgctcttgtcaccaaggctggagtgtagtgacacgatcactgccacctccgcttcctgggttcaagcgattctcctgaatcagcctccccggtagctgggattacaggcgactgccaccacgcctgctaattttttgtatttttagtagaaacagggtttcaccatgttggccaggctggttttgaactcctcacctcaagtggtccgtctgcctcagcctcccaaagtgctgggattgcaggcatgagccaccgcccggccagatttgcagtcttttgggtattctgcaagctccaggattctgggattctgagtgacccacaaagttcacagtgttgctgccaagttctagtaaagcattatgttatacttttttgtttttacataattcaacgtattgggcaataagtcactttgctagtattcatattagttaatctttactctgcagtaagacttaatgtaaatgcaaccttttaaaataaaaacgttgaattattccagttgaggaaaagtgcaagtagcaatcttagagggcaagacatcagttcggtttaaattagtgaattaaattctccatgatttcgtggctccctgtggataccatgaacactctgttttacctcagttgtgccatgcctcaacattgagctcctagaatgcaaaggctatttctaattcatttgttgtgtctttggtatttgtcataatacaatactatagattattcctctttctatgtggttttaaaaattaggatcattatcaattttgaacttctgaagtcttgatgagagagttgtaaactcattaaagataaatgagtagatttaaactattcacgattcttcagggttctttttgtgccttgagtctctgaggggaatggttgctgctgataagcctagccaccagtcacgtaagaagatattaatatacagcaatttcacagctgaaggcttttgcttttccacagctatgttaatagtatttgtcatttggaatcaaacaagtccaggttattcaattcccgggggtgggaacttacacaagagaattaacttctctgagctcaagtgcccctgtttataaaatggggacaataaaatttataaaatggtgacctctgttgtagggttataaggattgaaattctatgtgtttagtgcctggtaaaatccttgacatgtagaaggtgctcagtaaattattgtagtaaaaatacaagttttttttttgggccaggcacggtggctcacacctgtaatcccagcactttgggagtccgaggcaggtggatcacttgaggtcaggagttcaagaccagcctggccaacatggtgaaacatggtcactactaaaaatacaaaaattagctgggtgtggtggtgcgtgcctgtaataccagctactctggaggctgaggcaggagaatcacttgaacccaggatgcagaagttgcagtgagctgaaatcacgccactgtagtctagcttggggtcactgagtgagactccatctcagaaaaaaaaaaaaaagacaccagtttttaacagtctttctcctcccttcaatttggttgtaaaatattcgaaaaaaaaattggaacctgtacatgttttgacctgaaaaatagtgggaaagtgaaaacattccactttccctttcggcatttattgtgtcacttaattattttaagtattgaattttcagtctgtcagacacatttctgatgaaagttaagtgtgatcagggctcactgcaacctcaaattcctgggctcaagctatcatcctgcctcagcctctccagtagttgggactatagggatgtaccactgtgcctagctttttttttttttttttttttgtagtgatgaagtctcactatgtcgcccaggctggcctcaaactcttgtcctcaagcaatccttccacctcaacctcccaaggtgttgggattacaagtgtaagccaccacgcccagctaaaaaacaaattttaaagttatttgtgccactgctactcctaaaatgaatatactgaaatgcaatgatttggatcctcccaatattttcttgtgttatgagaagctgataaagtcttatgaaactcctgtgggattattgaaataatatttaaatctaagtcttaggtcttgtgagatcctaggcaagtcatttagctcatatgaaaaatgagtactacacattattatgatctcagatttgctttaagattgaatgaaactttgcatgggaagtggctttgtcattggaacagctgttatcttataataacactgaacaggccgggcgcatggctcacacctgtaattccagaactttgagaggttgaggcaggagaatcacttaagtccaggagttcgagaccagcctggccaacatggcaaaaaccggtctctactgaaaatacaaaaaactagtcaggcacacacgtgtggtccctgctacttgggaggctgaatcaggagaatcgtttgaacccaggaggtggaggttgcagtgagctgagatcgcgccactgcactccagcccgggtgacagagtgagactctacctcaaaataaataaataaatacatacatatattcatacattacaataacactaaacatccatagggtaaaaaatgggggctttcatttgatggaaaacttcagacacagctcttttctcatgtgaaacaggactgactaatatccgctggcttcctcagaattggttaagaggagatacttgatatcccggcacctttttctgataggctgttgactgtagccttagcctttctcagcccctggcctgactcctccccttccctgggttgtctatatctaccacctctatatctaccacattttatttatgatggttgtgttgtggggtgaggtgggaaacttggcactggctaggtctcctttgcaatcagcctccctacagagaaattggccattaataattgtattaggaaacattttattcttgcagagggagacccatgctttacaaaagattcctgacatttggtagcttggcctagttctggggtgcaaaattaggaagcccatcgttgcggcatacctcagccatatttccacccctacctttatcagctgtaaggctgttatttttatcttcaactacctggcttatttattttctcaaaaagttcagaactcaaatgggaaaaagtagtattctttattaccccactgaaaagtaagggctaatttatccaagtctggttcctcacaggctggcccctgaaacactccacagaaaccagctactgctgtgagtttaagacaatcaacccaacttatggtagaattctgaagtggcggtttggttggattgatgctcacccaacctaaaatactgagttagtagaccatagacctgggctgcatatggaggttctacgttgttatgcagctgcagcccccaaagcttgaccccagccttttgattttgccaactgctaagtgctgaggtgatgacccaaaaatggaggccaaggttctgccacatcatattgctgggaccatgggtttggaccccagcccttgatcacaccatgggagcagcttatactctctcaatcatgcaaatttttttttttaaagccctacagccaaaagactgaggtttctcttccaatgcttgacgtttggccctgctagattcttctgtgctgtttgaatgcaatgggcaacagggctcacatacctgcgatgggtcttttctctgaatttctcccctccctgtcaatgttccagaagggcctgctgtgtgtgtgccctgcttgacccttcacctctggtactgtcacccgtaaccctcagcatctgttcagaaacagtgatcataattcatccagaggtctctgatgattcatccagaggtttcctaggcagggagcttgaattctgagaacttcaagatcacaatgaatgacagagatggttctttaacaccgaggtctttggtctctaaattttatgttatttgcctgggagttggtacttccataaacaactattgggtcacagagaaaggcctgattcccttgttgctgtgggaatagttaaatgccttgtcttccagaagtctttttattaaccccagacagcagttccagtgatggatttcactgtaaataagaatagctcatttttctctgccctctagagttctttttttttagtagatttttcaaaattttactgaagctgaagaaaaaaaaatatatatcaaaattgatagcacccagatgctgcagaagtagtgctgcaggtgaaagataccaggctgagacgaatctggaaaaacgggactcttgtagtcggagctccaaggaaagactggataatagaaaaggaaagatggaaaagccagaaagaaggagatgttataagaaagaaaagtatacaccacacacatatgcgcgtgcacacacacacacacacacagagagagagagagagagagagagagaaaacttataaaattttgagtctgtccattggtaaattactctgttacaagccggcaatgaaatttgaatggtagtttccattgctcaatcccatgggaagttctgagtgtgtagagcagtcaggccactttcagtactcttgggacctccgcagaccaggagggactgtgatcttgagatcttgatgatgctcaacatgtatcttggttcgcaaagcatcttcatgcaaaggatctcgttttagtttcacaacccacccgctgaagtagctgagtggaaactctccccttctacagataagggtagaaaacagtgacacctaggtccaggagtaaagatattcaccccttccgaaaataatttatgaatgatttaaaatagttttgttgggacgcagacacaggtacgggatacaaaatgtaaatgtggagccttaaacattatagtattttatttgattttgtgtttttttattattattattattattattattattattattattattattttgagatggagtcttgcttggtcacccaggctggagtgcagtggcatgatctctgctcactgcagcctctgcctcccaggttcaggcaattctcctgcctcagcctccagagtagctgggatttcaggcacccaccaccatgccaggctaatttttgtatttttagtagagactgggtttcatcatgttgcccaggttggtctcgaactcctgacctcaggtgatccgcccgactcggcctcacaaagtgctgggattacaggcgtgagccaccgcacctggcccattttggtagtttaataaccacacacgcaggaccatctagggcaagttctgagtttgggggctcccttgtgtagttccttctttttgaatctgtgctgaggatgattttctttagatcgtggcagaagtggtactatgctcattgcaggcctcagtcttaagaagtcctaatgacctcttcttttgtactcttgggaatcttaagctgccatgtaagaagtttggttgccactgaagagatcacatggcaaatccacatgaggagaagccctgagattacatggaatgagagagagagagagatagaggagaggagagaggagagagaggagggtaggggaggagggagagatcaaattggctgaaaacaatagctgaccccaggcccagctttcctgtagctaaatgcagccacaaaagtgaccactgtaaagaccagcagaagaactgctcagttgagccccaaaccagattccagaactgtgagaaaatggaatgattgtcattttaagccactaaatttgggggcggtttgttatgcagcaatagctaaccaaatagaagttagctctcagatgtggtttcttctgtaacaagaacacaaagctagtggccatggcttttggcctgggtggtgagtagaagctggaggaggctccaggagacttagtgaaggctggaagggcagtgagcagttggtattagagtctggagaaaaaacaatctgtgtcatgtagtggttgaaagtttggcaacatgttgactataaaagatagcaaatgtgtctaaagaacttggggatctgactaagagactatttccagacagaacgttgaaagtgctaactgtcttcttttagctgtgcctgataaggcacaaatagagagagaaggataaaaaataaaagtgtcaacacaggaaaactttccaacccaggacttactgagttggaaaataaaactctctccccttgcagcttttccagtctgcaaaaggttcccaaatggccttgggggaagaaagatcaaatctaagatgctaccagtaaaatggaacatgtgagtcaagatcaagtcacaggccgggcgtggtggctcacaccaaaatgctggtaatcccagcattttgggaggccgaggtgggtggatcacgaggtcaggagttcaagaccaacctgaccaagatggtgaaaccccgtctccactaaaaataccaaaaaattagccgggcgtgctggtgggtgcctgtagtcacagctactcaggaggctgaggcagagaattgcttgaacctgggaggcagaggttgcagtgagccgatatcacaccactgcactccagcctaggtgacagagtgagactccatctcaaaaaaaaataaaaaataaaaaaataaaaaaaataaaagatcaagtcacaagtgtggctataagaccctttgttaagaccccagaaagattagcagtagaacctcctagaacctcagcactagataaaagtgtttccaagaatctaaaggacatcttctcatagtactctgacccaaagtataaagaggtctgtcacaaagagatttgtgagtatagctcttatctaatggcatgaaacctaataagacttataggaatcctacatagtcttgaagagaactatattagcagaaacacagagttgtactaaaagaaacagctctgcggccataaaaaagaatgagttcatgtcctttgcagggacatggatgaagctggaagccatcattctcagcaaactaacacaggaacagaaaaccaaacaccgcatgttctcactcataaatgggagctgaacgatgagaacacatggacacagggaggggaacatgacatactggggcctatcagggggtggggggcaaggggagggagagcattaggacaaatagctaatgcatgcatggcttaaaacctagatgacaggttgataggtgcagcaaaccaccatggcacatgtatacctgtgtaaaaaatctgcacgttctgcacaagtatcccagaacttaaagtaaaataaattaaaaaaaaaaggaaagaaaagaaacagctcaacttgaaaagaggcctctggactctttctaaaggcaggaaacaggatgagaaagctattcacctacagacactggccatcccttatgggaaaagaagaaatagtcagaaagcagagtaaggaaccatgaagaaccactccctaggaacataactgtccctggagcaggggtaattggtgatatatgcctgtctggacttcagaattgctgtggactggcaagtcctgcattccttccattctccttcatttagatgagagtctgctgtgattattgtatgctggtctcactggtatatggggcgaaacaatttgtcttcagatctagaagaaatatacccaaggagtcttatctacacctggacttggtttagatgacaagatcttgaaccttgagccagactgctgctgtaatatggtaagactcttaggggtcttgggagagagttgagagtattttgcacgtgggagggctgtgagccactggaaaccagagagcaaactgttgcagtttgttttattggtggccccaataagctatgcctcttagtattcataaccttgtgtaatccccttcccatgaatctggtctgggtttatgacttgctttaactcatcaaatgcagcagaagtgacactgtgccagttctgagccttaagaagtactgtcagcttctgctttggtgcttccggatgctgtgatctgccatataaaaagtctaattaccttgctagaggggctatataaaaaggccttagaaaaaccctgccatctcagcatctcagcggagcccagcccccatccaactcacactgaattcagccaattagtgatcatcatcaagatcagcagaaaccttatccaactaagcccagtctgaatatcagagagtgagcaaatacaaaggttgttgttttaagccattaaatgttgggatggtttgttacacagtaatagataagtgaaatagacccaattaaaatagttgatccataagcatataacaaaactcattataacaatatctcaaaagcataagaagaaaattctttatggaaaataaacctttggtttcactgaagttaattgactaaattaactcaaccacaatttgagcataaatcacaattgaaaagactgactcggcagagtaaatggaaaaggctcaaagagccgactatatttagcatctacttgggtttggtgtgggatgcaagtgagttttaaaatcaggaaaaggaaaaaaccatcaagtcagagtagagcctagagatttgtttatgctttctcatgccagaaacttgagatcgctttccttctttgaggaagaaaagtatgatttgtaattttgcacagctgagaagaaatgtttccgctatccctccaaacctcactccctgccttccagccacatacagaaccaatgcagctcctcaaatgagcctctctgctttgttcatgttattcttcctgcttgtgttctgtttccccatccatccattaactgctaaacttcacccacttcacccacttggaaaatgaggtgaagcttccacttggggaaaatctttctgacaactgtccctctgtgccctcaagtaggctaatcacccctgccttgggacaccactgtactttgttttcacctgtattctttggctgtacaattattaggatggtttgtttgcttgtcctttactcctccttgaccataaatttctactagagacaggaagaaatcctactgagataagtatacgtggcatttattacatgcttataatgtggcctaacatcagtggttttcaaagttttggttgtatcaagggtgcctattaaaaatgcgtatttttagctgggtgtggggactcacgcctgtcatcccagcactttgggaggccaaggggggcggatcacctgaggtcaggagttcgagatcatcctggccaaccaggtgaaaccctatctccaccaaaaatacaaaaattagccaggcgtggtggtgggcacctgtaatcccagctacttgggagactgaggcaggagaatggcttgaacctgggaggtggaggttgcagtgagctgagattgcgccattgcagtccagcctgggcgacagagtgagtctccgtctcaaaaaaaaaaaaaaaaaaaaaaagcatattttcaacaaccagccccagatagcctcattcatttggggctgggagatctgcatttttaacaggcacctagatacaataattggtcaggcaactctatcttacaaaatatgggcctcaggacctcctgtcttctcttgcctctctctggctgcctaacctgggctatttccctacagtaaaggaaaaaccaaggaagataactgggtgaaactcaaatcaggtaaacacacttttaaagttctgacctggaagttgaaggtgcaggctaaaataataattattcatcaatggtatttatttccatttttcctgacttccttttccaccactagtcaagaaccggccatatttaaaattatgctggttgacattttctcaaggcaccctttgaataacccttcaaagccagaaaaatttatgtatttggaaattaaattgtgatgagcttgtctgtcagctgcatgatgtttccccactcattctgttctgggtgataaatccataatcactgaagtcaagagctgttcattacatatattcatataacctggtccgaggcccagactatctgaattggcagtagcaataccagctactatttatttacctcttgctttgtgctgtggctgggatcagtgttttacatcattttgttctttaatccgtatcaacacctttgagataggttttagaggtaagaaaggtggggctcagagaaatttaaaacaactcatccaaagggcaagatgaggtaggatgaaaagatatgtctgtttccctcagcaccggaattccgtactacaccgtgggccagctccttagagcctgcctgggcccgtggctaggtggtatcagggcagaacttaagacccacgattcctggcccccagcataatttttttttatgacctcacacatggggcaaaaggaaagccgaaaacattaataattaattctggtaaaaagagagggtggtgatatggtttggctgtgtcccctcccaaatctcatcttgaattgtagtttccataatccccacatgtcctgggagggaccaggaggagaaaactgaatcatggggcagtttcccccattttgccgtcctgttctcgtgatagtgagcgagttctcacaagagctgatggtttttataaggggcattccctgcccagtgcccccgccccaccaccttcgctctgcgttattttcctgccatcatgtgaagaaggacatatttacttccccttctgccatgactgtaagtttcctgaggcttgcccagacatgcggaactgtgaatcaattaaacatctttcctttataaattacccagtctcgagcagttctttattgcattgtgagaatggactaatacaggtgggttgggattttcctttacttgttcggatcattgggaaatttttgattaccaaaaggctaaattatgatgtcatatgtggccttggaacagattatctgggccttgccctgtttccactaactgctgtttctctaactttgtggaaaatgctaagacagttaccaattcttcttggtccattttgaagatttgctaaacctctaaaagccttgtgagaccccttcagccactgcggagctttttaatggagaacaggaaaggatcgtaactaggccacaggggggtattttagtccgagagcaggctggttttatgaaagtccaggctcccagcagcttttgtgaatattaacgtataaaccagggcagaaagtggcgtcagcagtgccctgagcaggaaagactgtggctttatgtagcagaggcatgtccaggtcagcagcagggacctgaattccaggactctcagctctgcctggaacttgtgagatcttgggtcaagctctcaatccgtgtgggcctggttttttgttttaaattcttctaatactacctctcctgttggtgaacgagggaaatggacatgaatgtctgtgaaagaacttatcataggtaagctgttctgagtggcgctccatcagccatctttactggctgtttgtggttttccaacaaaacatcatagcttatgtggttaagcagtgtcgtgttcacagcaggaatgcaaccagcatttggtggaattgtactgctgaatatttataactgaaaacctcaaagaagagtccacctcacagatgtcacccttattgcttgcattccaactatttaagagctaacccgttgtgctagtttgagatgactgttgcttaaagtgtggggtgcatttcactgtgataagcaggatgctttgaaatgtcatgtagacaaacatttttattaataattaggtatttttcactgtgcatttaaacaaggttcatttggaaaagtaaataaaaatggactcaactaaagtgtatgaagcaagtattaatacaggtgttagaaggatatgacaaaatcatgcaggtgatacatcaatgagtatagattaggatatactcctagaatataagtccataacttgttaagcaaaactcatggggccagatgagtttcataattcagaatatctcatgcagtatttgacacccccagaggtaactgagacaacattctcaagtcaaacacgttattatttctgcagtaaaactgatgaatattcatcataagtgggataaagtctataaatggactcatcaattcagtacaagttttgcagccaaatgaattacaaaaaaatattgtttctcagatgcttttgcattttggaattgtagataagagagattttgttgtcgttgttttggtttttgagacaaggtctggctctatcacccaggctggagtacagtggtgccatcttggctcacagcaacctccgcctcctgggctcaagcgatcctcccacctcagcctcccaagcagctgggactacaggtgtgccccaccacacccggctaatttttgtattttttgtagaacaggttttcaccatgttgcctaggctgatctcaaacttgagatctcaagtgatccacccaccttgacttcccaaggtgctaggattacaggtgtgagccactgcacctggccagataacagatttttaacctgtagtaaaataggccaagaggaaaaacaagcaaattcaagaaccttaggcctgagccatactgtatagtatggctatacccccaaacattctccctctcatcatctgatttgtgaggtaggtcctccatattacagatgaggaatttgaggcttacagagggtaggtgacttagccaagatcacacagctggtaaccaacagggccagaattaggatccaagattagaatccaagtcctgtgcctccagatatttgatctttttatactgtaatccatacatcatataaggcctgaagaggcagaggctgaattcttgaacatgttccctgagtgcagatatgctttcccccaggaaggtgtcttacctgactctgtcatttccaccgaggggggctctggaggggaaggatgggagtggaagatataaccttggccttttaatgttgagctacggatgtatccaaggtgcttggatcaatctcttcagacagtgcatgaaacccaactgaaatgcttgtgacagtccagtggtatttcagggaaccattgcctgtttcttccagaaattctaataagaatggacatttattgagcacctgctatatgccagacattccttcctctaacagtttaggggtgttcttaccatttccctcccccagatagagaaatgggagttcagagacacagccaagattacattgctggtaagtgacaagtaagagttaggccaggtttgattctgttcaaggaccacactcttacccactaccctcaaagagcagcggcagagcccttgatttctgatccacccatgggagggacgccttttcccctgtcaccagggtacagccagtttctgcattttgcatgcttgtgttccagaaattcaagtgcaagttgatccaacctcctaagtttgatggcatggaccttagcattagggaagtatgcaggagctggctgtattcaggaagccaccatagatgcatatggctggaatattaaatgagggcggggtttggggaagaactgggggcaattgttaaatcagaaagagccttgttgttcttgcttaggagacatcaattttgttctctaggcaatggagaatcaccagataattttgcatggggcaatgacatggttatatttccatgtgatgtcttatttggcttggaaatcaggtgctgcttcccagaggaggtatcagttaacctaggactgaaaggatggattggatgtcacccagggacgaagcgactgtgacaagatacaagcacagggatcccatgagcttggcaggagtgtgtgatctcactgcataggtacagacacagcactaatggaggctgagcacagatggcagaactggagacaagctcccgggaacccaggtccctgggaggtggccctggcctgtggggtgaaaacaccaagtctgaggccaagagcagagctggcatttcccaggctacatgatgaagatgaagctgcctatcttttctgcttcccatttttttttctttttcttatttatttattttatttatttattttttgagacagagtctcactctattacccaggctggagtgcagtgatgtgatcttagctcactgcaacctgtgcccccgcgttcaagtcattttcatgcctctgcttcccaggtggctgggactacaggcacatgacaccacggctaatttttttttttttaatggagtcttgctctgtcgcccaggctggagtgcaatggtgcggtcttggctcactgtaacctccacctcccggattcaagtgattctccagcctcagcctcccaagtggcgggattaaaggtgtgtgccaccatgcctggctaatttttatatttttagtagagacgtggtttcaccatgttgaccaggtgttctgaaactcctggtttcaagggattcacctgcctcagtcccccaaagtgctgg

SEQ ID NO: 2682 - DNA, 3922 bp, Homo sapiens
ggttagggtttcaccgtggttgggcggggggaagagggcaagaggagggcctggaaactctaacccccgctccccagactaactggccgtcttgggccgagagaaggtcacctctgcacctccccccagcctgtccgattgtgaggcccctagcccaggcctggccctgactgcctgggaagccggctggctgggtggggcgcctgggttagtcatcactgggctgcctctctccccacctctcggccaactcttggcccctccccatggcctccggcgaggctgtcacccccacctccctccggccctggttccagcctccaactcctttggcctgtcatcctggctgtcagattgggctaggagctgtcagagtgccagagggttgatggagcagctggtcagagggtcagtgccctgggcccaccccgccctgcagccaagggcacctgcttggcacagactctcagcagctgctgagtcctctgggttgaacagagctatctcagacagaggaaggtcggacggagttggactggtcacccaggggaaggaagatacacaaagttcatgcctcccaagagggtttcggaatttgaaccgcaccccgtatcccccaatctttcttaccctctgagtatagaaattccaaggcaagaccgccttggcccctcagcctggcgtgggccatgcccttggactgagtgtcagcacggacccgccctccccagctcacatcccccgagcctgccacgcccccagccccctccctgggccatgctgcagggcccggcttttcctgctgattcatgcgttggaactgtgggggcggggcttggaacttggaacaaagttcagacatggaggggccggcagacagcctggaattcataccagatgtacccggaatgcgcaagcggaatgcctggcatctgagagtcctggggaagctgcccagccaccctgcccatacctccctcccctccagcctgtggtcccctgcccgcccctcacagccccggccaccctgccgatacctccctcctctccagcctgtggtcccctgtccgcccctcacagccccgggggcctctgctgaccttctttcaaacgctaggcctcctcccttcctcactcttccccaatccaggcccccagaactctccttccagctgaactccctgggaacaagtcagttgggctgatcactgaactcacatttctggacctgaggtaccacacttctagtacctgcgtgctggtggggtgtgtccagggtcccgggccccaccctgtctgaatgctgaggaggctgggcccccaggggccgctagggcaggggagggtgagagcaggactgggtttctctagactccagttctggaaagaagagcaagggaagtctgtttacagccacctcttgctgctcagcgaggttaacagcttccgcgggcccagatcagagctgcagccctgcattagaatctcagaggtctactggggcaggaccctgatggccagcgagtgggtcagcgttgcagcaacatgccctgctcagatctttcccattttccctccctttcccttaggagcctgttcctctcacgccctcacctggctgagccgcagtagttcttcagtggcaagctttatgtcctgacccagctaaagctgccagttgaagaactgttgccctctgcccctggcttcgaggaggaggaggagctgctttccccatcatctggaaggtgacagaaatgggctgggaaggtccgaacagcagggtggatgatacgttttgggcaagttggagagcctttgcccagattggcccagcaaggagcggttttagattagagacactggctggattgaggagtagaaggctcaaacaacccaaggtggtatgtgatccccagctcaggcctgtgcagacaggaaattctcccctgcagcaagtaggggaggtgggttgtgggatgtgacctccttccagatatcaggcagtgagtgtaaacctgccacctccagccctgatccattctcacctagcggctacaggaagctgtgtctgttcgatttggtgggaggagatgtgcagggagctgtatcttgtcctccgcttgtgaaaaactcaaggatgtggagaagagtagaccgtggaaccctgctcttctgcagccaagctgaggggcaggatgcgtgtgggacagtggtagagaagcaggggatagactcataggctgcaacaaaggtgactctgtccctggacactgcctccgtactttctccttgcttcactggccacagcatctccctccagccctcgctatgtgcctctgccatcttcacccatcatggagcagaggtgaggagaggcagcctgggaatatggagaccagtgaaggaccaggcctggagagcacagggtcctacctgggcatccagcagaggagcccctaaaggccaggagcaccccaagaggagggagggcagccagcctccattgacggcgagcctccagccctctcctactttgatcaccatttctctccaggctttctgcctccgagatgtggcaccatagtgcggtgccctgtggcttcaccgccctacttccacctccgcccagcctgtaatgtttatataagcagcctcaaggaccaagaaccatctgcgaaaggacacacacaggaaattcataaaagaaatctgaatggataaaaccatgaaaaaaagtatgcttcattagtaattaaagaaaggcaaatagagctggaagcatttttcccttagcaaaccataacagaaaaaaataagacccaatattggcaaagagactactgaaaaaacattcccatacattgcgtgtgggagtatacatcggtgcaggcttcctggatgacagttgggtgatatgtgtcatgtggcctaaaagcctccatgtcatttgacctacgaattctatctttgggaatttatcctaagaaaatacttaaggatttagttagtgataagatgttcatcccagcattgcaatggagaaaaatgggaagcaatggtttggttgggaatttattccttttctgctgtaacgaaagtttgcaataggggattgcttaagtaaattattgtatctccatccagatggtggagtaccgcgcagacattaaaagtcatgtaaaagaacatctgactgaaagaaaaatgctccttgaatattaaaaggttgtaaaaatagtgcatgttatgtgatttcaattttgttttttaaaatatgggtgtatgcttgtatacgtagagcagataaaaaagacggaaggcatactaaaaaatgttgagtggttatctttgtatggtggaacaaagtcactgtaattttcatctttggtttttctgtaatttccaaattttccacattttgtatttcatataatataatttaagagatcagtgttattatttaaacctttggagaggtgggggtagaagaatgaagggaagacctcagctttttggtgagaaggtttggttggggcacctcttggtttatgaacttaattctttgaagtagctggaatcctccctctcagcctgcaggaaacagctctgacttgctgactgtctgccagctgaagaggtggagtggagtaaggtggaaggaaagcagtgcaacctggggctcttcaggtggtgaggggctgggggaggctcttcctcttaaggctggagggttctggaatcctaaccgccctgctactaagagcaggacaggtctgtttttctcttctgactctgtcccagccttgaagggaccctgtgttacctttccttgccctcggattgaagatattctacccacccaacgggtaccaagcccttggggaaggaagtgcttttcaagactgggggccagcgattc

SEQ ID NO: 2683 - DNA, 18224 bp, Homo sapiens
cggagtcttgctctgtcacccaggctggagtgcagtggccaatcacggctcactgcaatctctgcctcccagattcacgccattctcctgcctcagcttcccgagtagctgggactacaggcacctgccaccatgcccggctaattttttttgtgtttttttttagtagagatggggtttcaccgtgttagccaggatggtctcgatctcctgacctcgtgatccacccgccttagcttcccaaagtgctgggattacaggcgtgagccactgcgcccggccatatctcttactctgatccataaaacttttgatcaagtcacacacagaaaagatattaatgtatatcatacttttctcttttatctaggtcatttcacatagattatcttggtaatcttcacaattgcctgacaaaggtaccaatattatcttcatatgggtaaggttctttgagagttatgtacttagctcaaagtcactcaagtataaatagcacatgaggaatttgtacttaggaaaatctggccctaaaaactatatttgcaaccatgacttctaattcacggagtttcataagaataaaatcatcatatgattgcctaaaatgatttatgaactataaattctttaattattgaaaataaatcaagttctcaaaaagtagaaagaaacttaaaatattatggagatgggctttttaattaaaattctagggtttaaagattatttgctaagattctatacttattgtatgaaaatagaaatatatttagagggaaatttgtagcactacatgcccacagaggaaagcaggaaagatctaaagtcgacaccctaacatcacaattaaaaagaactacagaagcaagggtaaacaaactcaaaagctagcagaagacaagaaatgactaagatcagagcagaactgaaggagatagagacaagaaaaacccttcaaaaaaatcagtgaagccaggaactgttttttttgaaaaagatcaacataatagatagaccgctagccagactaataaagaagaaaagagagaagaaataaatgacacaataaaaaatgacaatggggacatcaccactgatctcacagaaatgcaaactaccatcagagaatactagaaacacctctacacaaataaactagaaaatgtagaagaaatggacaaattgctggacacatataccttcccaaaattaaccaggaagaagttgtgtccctgaataggccaataacaagttctgaaattcaggcagtaattaatagcctgccaaccaaaaaaagcccaggaccagatggattcacagctgaattctaccagaggtacaaagaggagctggtaatattccttctgaaactattccaaacaatagaaaaagaaggacttctctctaactaattttatgaggacagcatcatcctgatagcaaaacctggcagagacacaacaacaaaaaacgaaaatttcaggccaatatccctgatgaacttcaatgcaaaaatcctcaataaactatgggcaaactgaatccagcagcacataaaaaagcttatccaccaagatcaagttggcttcatccctgggatgcaaggctggttcaacataagcaaatcaataaatgtagtccatcacataaacagaaccaatgacaaaaaccacatgattatctcaatagatgcagaaaaggccttcgataaaattcaacagtccttcatgctaaaaactctcaatgaactaggtattgatggattgtatctcaaaataatagctatgtatgacagacccatagccaatatcatactgaatgggcaaaaactggaagcattcctttgaaatccggcacaagacaaggaatgcccactctcaccactcctattcaacatagtattggaagttctggccagggcaatcaggcaagagacagaaataaaaggtattcaaataggaagagaggaagtaaattgtctctgtttgcagatgacatgattatatatttagaaaaccccgtcacctcagtctaaaatctctttaagccaataagcaacttctgcaaagtctaaggatagaaaatcaatgagcaaaaatcacaagcattcctatacaccaataatagacaaacagagagccaaatcatgagtgaactcccattcagaattgctacaaagagaattaaatacctaggaatccaacttacaagggatgtgaaggagctcttcaaggagaactacataccactgctcaaggaaataagagaggacacaaacaaatggaaacacattccatgctcatggataggaagaatcagtattgtgaaaatggccatactgcccaaagtaatttatagatttgatgctatccccatcaagctatcaccgactttcttcacagaattagaaaaagctactttaaatttcataaggaaccaaacaacagcctgtatagccaaaacaatcctaagcaaaaagaacaaagctgcagtcatcacgctatttgacttcaaactatactacaaggctacagtaaccaaaacagcatgttattggtaccaaaatagatatatagaccaatggaacagaacagaggcctcagaaataacaccacacatctacaaccatctgatcttagacaaacctgacaaaaaacaagcaatggggaaaggattccctatttaataaatggtgttgggaaaactagctagccatatgcagagaactgcaactggacctctccctttcaccttatacaaaaattagctcaagatggatcaaagacttaaacctaagacctaaaaccataaaaaccctagaagaaaaccttggcaataccattcaggacataggcatgggcaaagatttcatgactgaagcaccacaagcaatggcaataaaagccaaaatggacaaataggatctaattaaactaaagagcttctgcatagcaaaataattaaaaaaaactattatcagagtgaacaggcagtctacagaatgggagaaaagttttgcaatctatcgatctgacaaagggctaatatccagaatctacaaataatataaacaaatttacaagaaaaaatcaaccgcatcaaaacgtaggcaaaggacatgaacagacacttctcagaagaatacactgatgtggccaacaaacatacgaaaaaaagcccatcatcactggccattagagaaatgcaaatcaaaaccacaatgagacaccatctcacaccagctagaatggcgatcattaaaaagtcaggaaacaacagatgctggagaggacgtggagaaataggaatgcttttatgctgttggtgggagtgtaaattagttcaaccgttgtggaaggcagtttggcgattcttcaaagatggagaaccagaaataccatttgcctcagcaatcccattactgggtatatacccaaaggattataaatcattctattataaagacacgtgcacatgtatgtttattgcccagtgttcgtaatagcaaagacttggaaccaacccaaatgcccatcaatgatagactggataaagaaaatgtggcacatatagaccatggaatagtatgcagccataaaaaaggatgagttcatgtcctttgcagggacatggatgaagctggaaaccatcattttcagcaaactaacacaggaacagaaaaccaaataccgcatgttctcactcataagtgggagttgaacaatgagaacacatggacacagtaaggagaacatcacacatcagagcctgtcaggggtgagtcctagagggagggatagcattaagagaaaaaccaaatgtagatgacaggttgatgggtgcagcaaaccaccatgacacatatatacctatgtaacaaacctgcatgttctgcatatgtatcccagaacttaaagtataatgaaaaaaatagacattctaaatatactaattatccatctatctataggactagaagttatcaatggcaaaaatcatctgttgaacaaaagaaggtctcatttttttctcaagctgaagtaatatacccttaacaaagaaaaataattctcctagaactcctacatttaaattaaattatttttgtattatttacgtatgcataagattaaatgacttaagttccatatgctaatagttcctatacaaatattaaaccaaaagagatttacaacttacatataataaaaactgcaatcaaatacaatcgaaataaaaaatcattattttagtatatccaacggtttattgtaattatgtcaccttcttgcaatttccatgtggtattaactacttctgaatattttttttgaaatgcatgggatgtcatcggtgtgtgccatataacaattcaattctcccagaaattttttgtgttatttacgttgtattcaaacaagtggttcttgacactttcatacacttggcttgaatggatcattacatattaagccttcccctgttcttttttattagctcagaacaattaaaatatacttgacccttgaaaaatgtggagattaaggatgccaatcccccatgccatgtaaaatttgtgtataactcttgattccttaaaaacttaagcagcctgttagtatttgactggaagccttctcaataatataaatactatattaacaatattttgtaagttatacatatcatataccatattcttacaataaattaagctggagaatagaaaatgttattattgagactataataagaaagagaaaatatatcataaaggtcttcatccctgtcatattcacattgttttgagctgaggagaagaaaaggaaggtcggtcttgctatctcagaggtggccaagcagaagagatagaggaggtgaaaggggaggcaggagaagcggcacactcagtgtaacttttattaaaacaaaatccccatgtaagtggacctctgcaggtcaaatccatgttgttcaagggtcgactgtagtactatttggcacccatctggttgtaaacacaaataccaatgtggacactaaaatctcaaggccacattcacttaaaagttggtcatccaggtaaaccagcacatggttctaccagtacttttagatgatgataaaaaaggaaaaggccaaattaaagatcaattatcatggagagattgtagacctccacagacttctgatagtccaagggccctactttgagaaacactagactagcatatcatctttaaagcattatcattgtttccattttctctttcaactggctaagcttggttcctcatttcttctaaataggagactgttgtagccattgacatttttgtaatacctttctttttaaggcaatcccaagtttctttcccacagactagcaactagccaaatcagggcattatttttatgatgtgatatttttagaggtaggaaattatagcttctcaaaaggagactgcatgtatttgggggtttgagaaaaaaaaatcacacctgtgtatcccaggatgaagcaagtagatataattaaaacaaagattgatcaagctcagtagttttcaacactgactatctattggaatcaccttaataaagcactgttgcttgggcaacacccagggcttatgattacttggtctcaggtggggcaaaggatatcagcattttttaagagaatttattttttagggaagttgtttttagaggagatttgggtttatagccaaattgagcagaaaatagatttcccatataccccatattgagcagaagatatagagatttcccatatactccttgtccccacacatgcatgattaacatccctcacctgagtggtacatttgttgtagttaatgaacctatattgacacatcgttatcacccaaagtcaatagtttacattagggtttactcttggtattatacatttgatgagtttatacaaatttgtagtagcatgtgtccatcattatagtttcataagcagtactttcactgccttaaaaaatcctctgtgctcttcccatttatcagtaatttttaaaagctcttcagttaaagctaattgtcaatcaggcttaagaatcactgataactgaaagaaaaccatccatgtcactcatatttttacatactctctgatgacatccagcatctgagagttgtatctaagctccatagcatggtctgtaaagacttctaagacctaacaattgcttacctcattctcatcatgtctcaacatttctttgctgggttacctctctaagataatatatctgttaatgtggtttattcaagctcttaaaagttctttgaacagaagttcaaaaccagtgtgggcaacatagtgagaccctgtctctacaacaaataataataataataagctgggcatggtagtgtgcacctgtggtcccagttactcaagaggctgaggtaggaggataacttgaacgtgggagatcgaggctgcaggaagcggtaatcatgccactgccctctagtctcggtgccagagtgagatactgtctcaaaaaaaaagttctttctataactgagggggtattatgggtggggcaaaagggttcttcttgctgtcttgtattaagggtaattattgctaaaaatgcatggggttcttttctattaaaccagattggccttggaactattctcaatacagtgttccagacagctaatagtagcagagaggagttgggttatgaaatgcatctacttatattacataacttaatatagtctttgtaacaatgatgaggctgtgttctcagatgagattaaaattgcacgtgtaatttattcttcaaaatatttaatccttctcagagccatattggtgaagcaatgcccttgctccccacagaggagagcagagctaggatataaatatggttaatgatgaaatacgtaaaagaaagttaaaaatcttcaaattaacctgaagctaattctgaagcagacaattctcaagcaacactttgatgtaagttcagttattccacaaatacatattaagcatgtagtataggccagatcctaaaaaatggtattcacattccctaattcaccaaatccatacaagaaacatgtaaatcaagtattattgttttgtgtgtatagatgaggaaacagagattcagaaatattaactgactttcccaatattgtccaaactaccaaattggaaggctaggatttaaaaaaataaggccttaaaactccaactcagtattcctactgcttcattcattcggcaaatatgtttttggagaattacgttagtggattaaataccagaaagacctctaagcttttctggacctagttataaaatttaactcttacagtgctgtcttgaagatcgaatgagcaatgtagcaaacatattttggaaaaaaatactgtacaaatatgagttattggcaggcttataatgagcacacactctttacctgacatacattgctgacttgtttctaacagtatagtccttgaagtgcactagaaaggaaggtaaacggacaaaatccacttggtaattttaaaggaatgcacgggtatgttagagataagagacataatgctcagttaacaggaataagagctgaagggaagatctgaaatatatttaagatcttttgtaaagactctttacaaaaaacttgccaatgtgaataaattcttgaattttctttggaataggatgcagatctgccatgtttcttaaggcattttgtttatctctacatgtatgcaaggtttatttcccccttacctaagcttaggcaaacactaattttcagccccaggcaagagttttctttttatagacatgagagtatccaattgtgtgaaccctggaatgctaaattgaaaccctattcctgccagtaatcaatttgatgatgcgaacatttcataatataaaggctccacctctttcattaaccaatcactcaggctgctttgaagcttttaaaaaccacaaaaacagacaacaacaactgaaaccacaacccacagtgaaccttattaacggaaatattttatatattgttattttcatattttcacttatcatttggtaggaataagagcctattgctcatttttattccatggatgtctacagaaaacccaaatcatacgtcaagtgatgattatttccttcatttttgtgaaggatatctaaaatttatataaggccagatatatctctctttgaacatgatggttttaaacaagtcaactttaaaacatgtaataagcagaaaatttgccatcttgattttttagatgaggaaatctaagcagagaataaaaaatgagtaaaaatatttcttaggatttctatggtaaatatttataggagtatctgcctagcaaccttgtaatgtaggatgccctttcacacacataggtggcccctaacagacatgtttctattacataatgttgcaccactataattgattcatccaagagtggtcagatataatctgagccaatcattctcccctcctgatatttggaattgggaccaaggtatagtgaatccaagattctgatctaaatggtagactaagctgatgcaagaactctgcactctcactccaaacacttagaaataaaatatatatatatatataattgtaataataagttaaaagggacaaaaatgaaatccttaaatgttgaaaacagagagaatcctcactgtaagtagaaggcgaagcagggctacttttaggaatagcatgtctggtatatacccaagaactggggctttatgcctcataggcatgatacttgaggccaaaagttccatacatggtgggcagttggaattggaccctatgcacaagacaaaaaaaaatccgcttatggtcttgggaggcaacatgaaaattataataatttcaggctaataattccaggtcttggaaggtataaaaggacatactttacgtacctgctcagattttcttggtgccaaattactgtgtaccatcaacaaccatgataccaccacttagaaatgcagaaccttagaacatatttctttctaaagatacattcagagataaaaattatatatgtgtattagtccattctcacactgctatgaagaaatacccaagatggtaatttataaaggagagaagtttaattgactcacagttctgcatgtcttggaggcctcaggaaacttagaatcatggtggaaggtacttcttcacagagcagcaggagagagaatgaatgcaaatgggaaatgtcggatgcttataagatcatcagatcttgtaagactatcatgaggacaggatgggggaaattgccaccataatccgattacctccacctggtcctgcccttgacacctggggattatggggattacaattcaaggtgagatttgggtgaggaaacagagccaaaccctattaatacatatgtcaatctattaggttggtgcaaaaacaattacttttgcaccaacctaatatgataggaagaaattagactaagcagcaaatatgaggtaccatatgcgaagaaaaagaaataataaaattatctaaaaacaattttaaaataattatctttaatattttaaagtgtgcttgcactcttcactgtaccaacccacaggtgtctttaaactcatgactggtagagcagcaactggatttggacttctgcctgattgcctgttttctgataagtttaatgtactttgtgaaacctctctatcatgctgaccatgtctcacagaactcggtgaatgatgcctgctgcatcacgtagcgtaatattgggcacacagaaggtgctctctacaatgtccctgccatgctaaagaggctggtgattattgtgaaagagcctatgtcaagacctgcttgctcatggtcttcacagggacaaacacaagagaacaacatagatgacattgaagtgaaaggaaagtatatggggttggctatatgggacacagttgggcaggaaggtcaagatcacctgaggactctttcctacccagacaccaatgttatattgaggtgttccttcatcaatagctttggagtttagaaaacctcccaggacaaagaaccttagagagtaagcgtttctgccccaatgtgtacagcattctagttgggaacaagatgcatcttctgaaggatgggcacataagacaggatctcaccaagacgaagcaagagttggtaaaacttgatgggtgcctagagatataacaatccaggttggcacttttgtgtgcctggaggattcagcaaaactgaaaatggagagaattttttgaaatgtctgcaagagtggctttgcaagccagatgtaaaaagaaaaatacaggtaacttgttttgtgaaacctcactgcaaacagagccctcgtgtaatttttgatgtgcagtttattaatcttagtgtactattactggccttttcaatttatactttacctaagattacaaatcagaagtcatattgctactgtatttagaagcaaaccatgattattaatgacgtttacatccaacccctctgccccaccagggttgttttactactctcactaccccttctcagcactactgcatgaccagacaccaattcaaggcatttcttaacttcttgctcctttttagaaagaagaaaggctggtaactttaatgaataaggctggaactactttataaataacatgtcctatctgtcacatatcagctgcaagacgctctgatgtagtattattttaaagctttcttcctaattagatttcactggtaatctcattttttggaaatgtgctcatcctgaaaggtacaaccaagtccatgttgctgtaaatcagatagtggtgtgatttcatgttacctcatatttactgtgtaattagtgccatttaatgtattttgccaaaaaaactaccccacattagattagtatttttctaaaattggattttgtaatgatatttgtcactgctataggacattataaaaagataagtaggccaccttggcctagcaaaaaaatacagtctctgaaacaaataaacaagtaaacatagcctctacaggtgacttaaatagtagacagatcttaattactgaattaccactggtgacttaagtagtacacagatctgaattgaaagatagatttgaatcatttgaaatatactacgagagattaagataaataaaatataagggagaagttaagagacatagatgacaggaaaaagagtggcctgagtttaaataagggagagaggaaaaaagaggaaaaatcagtggaattttggaggagatagtggctgagaactttctggaagaaatatatgatttaatctttggattaaaaagtacaaattccaagataaataaataaaaacaaactcacacttaggtacatcataatataaataagatcttaaaggctaccagaaagaaaaaaaaaattgtccacaaaggaacagcaagcagacctcctgacagaaatagaagatgcgaagagatgatcagtcagctgagctggtcaatagaaaggagattaaatgttagagtaaaaataaacttattttcttcctgtcatgtgcaagccactaagcagagagaatgaatgaagcaggtatctctgtggaaaagaaaagggacagatgggcagggagaatagtctgtattgctaacgatttcccaggacctggcttcagccccttgagagacccacctgtcctaggcttccataataatttataatattccaataaaatccattcctctttttttttaaaaaaaaattgcttaagttactttaagttgggctctattatttctaaccataatatgaataagacaatctctcaaatgttccaagaattaaaaattcaaattcattcagtatttattgaatgcttatttatatgtaagtgtatatatttcaaagtgttgctagttgtgattgtgatggagttgaagtggcaacaagaagacatgcaaggccacggcatgtgtttaagtagtttataatcctgtggagagagacaaatatgtacataactgactttaatgcttaacaagattataagagctatgatgagcactgttaattgatttactaatcctcagagcaacagctgaggggtagagagctgaagtgacttctccaagatcatgtatcttagtaagtggtggagctgggattctaacatacaactccagagcccacagaggtatcctccctaatactaataaaaatatcaacaaattattgccaggtactcagtagttttacaaatgtcatcatgtttcatctttaccgtaagatactggccttacttactctatttataaaagaagaaaataaagtttatcatccttaaataaattgactaggattatccagctagtaaatggtgaaagcactattcaaactggaataagtgaaggttgcactcctcttctcaaatacatggtaccacaggtctttcagcatttcttagcatgggtctcctaggagatttcttgcattcagaagtctccagatgagaagaatctatctgtgtgcttacacacaccccaagactccagaggacacatattaagttccttaagaattttttcatcaatgatgtctccagtgatatcatgagagaggccctatgttctgaatttcaacaagcttgtttccaggaaacacaaggctggttgtttcttcaataacccccattatctgtaaattattctatggatgcctccctttttggctttggggagatgaaaatgctctcctctctcccctagagtgagaattggcaataacttctctaaacacaacactctgtgataatctccccccaaaacacaacactgtgataatctcccccaaagctccctgtgctctgtttgtttttactttttcatttattttaaatgacaaaaattgtatacatttgtggtatacagtgtgatgttttcatatactggtacataagagtggtggtgacggtggtagtccatgtctagaggaacagtgtaagtcatcagcacagagaagtaaccaccttaacttcagtggctagttggctgctctccaaattttagatgcagtgtatttagatgtggtgtatgtagcaccattttcccttacatttaatatatagccataattctggtgttacaggaatgatcccacttgaagtaccaattctgttttgatgaaatgacaaactttgcttcagaaaatttaaaatagtggctacatgaggaaacagtagagatgagtagagctggagagagagactgaggctcacgtttgtattagggctaagagtagctaaacctggactacatattgtttggtcccaaaccaatcccaaatgttgacagaaagagccacagtttttaccatcagattttactacaatagatgggactccaaagtgtcacttttttaaattatttttttaatttctttttctaattttactttaagttctgggatacaagtgcagaacatgcaggtttgttacctaggtttacatgtgccacggtggtttgctgcacctgtctgagggagcgctcctttcatgggggcactagctgctggtgcggggtctgttcctgcagacccctgatttggagatggatgaataaacgtacactgatagatattctgctctgccagtccagctgacagtccaagctgcttataggcttcctgctgagtcctgtaaacagttgggacttggccctgattagctagtgaggctcgcatttattctgtaagactaattaacaaaagttgtgagtaaacaccattagaggtaaagattaaaggccaggttcctaggcctaaagcaaacaccatttacaggtaataaacttctgctgaccctcctccccgacagtaggaggcagtggcgaggcagtaaagtacccacggtaggacaaaggacagtcttaagcccatataagtaaacaggttagtaagataaacttcccacattcctttacacttgcaccctaatctttcttgctcctgcaaagacactctggctgcattcagccaagaaatctgaagctatgcaaactctcaggccttccaagatagtttttggctattactatacctatctttaatatttttcccaccagcctgattgaaccccagcacctatcaacctgtcatctcggttttaaggcctgcatgcattaggtagtgttctaacactctccctctccttgccccccaccctccgacaggccccagtgtgtgatgttcccctccctgtctccatgtgttctcattgttcagctcccacttatgagtgagaatgtgtggtatttggttttctgttcctctgttagttagcttccagcttcatccatgtccctgcaaaggacgtgaactcattcttttttatggttgcatagtattccatggtatatatgtgccacatttgctttatccagtctatcattgatgggcatttgggttggttccaagtctttgctattgtatgtagtgctgcaataaatatatgtgtgcaggtgtctgtacagtggaatgatttataatcctttaggtatatacctagtaatgggattgctgagtcaaatggtatttctggttctagatccttgaggatttgcaacactgtcttccacaatgacagacaacctacagaatgggagaaaatttttgcaagctacccatctgacaaaggtctaacatccagaatctacaaggaacttaaatctacaaaaagaaaaaaacaaccccatcaaaaagtgggcaaatgatatgaacagacacttctcaaaagaagacatttatgtggccaacaaacatatgaaaaaaagctcatcatcactggtcattagataaatgcaaatcaaaaccgcagtgagataccatctcacaccagttagaatggctattattaaaaagtcaggaaacaacagatgctgatgaagtgccacttttcaaataaactgtgttccatggagccctatggtttaaataaggtgcctcaggagatgctaaagagaaggatggaaggaattaagtatcttctttaagcataacaacttcttattttactgatatatttacttaaaaatattttttaaacagttacaggatatcagtctaggatctgggaacatatttgtcaataagggttggttcatggagcttatggtctaatggaggagacaaacataaataaccacacaatccaatgcatattacttacctagataagccctttggaggaaggcatacaattctttaaaaaatattgaagtaatttaactagacctgtggttcagagaagacttccccaagaaaaagacgcatgagtaagttcagaaaacatgagaacttaactacatgaagtgatggttaggagggatgaatgaaggagagaaagaaacactccagagagagagagagcagcatgtggaaaggccattggtagaaagaaaaatggatttaaaacttagatgccttcatgattggaatacaaaagaataagggaaagaaaggtatgatattaggctggagagataaatttagaccaaaaagaatttgcatatcaagttagttattttgtctttattctaagaataatgtaaagctattgaaagattccaaacataagaagagatgatacatataacagctttaattaaaaattattttgaaataattgtagattcacatgcaattgtaagaagtaatatgggacgatctgccataccctccacccagtttttcgcaatagtaacatcatgtaaaactgtagtacaatatcagcaccaggatactgacagtgatacagtaaagatacagaacattttcatcacctaaatgatctcagtcatgttgtccttttatagcaatacccactttcctctgttccctcttcttgtttttctcctcctcctcctccttttctttatttttctttcttcctttctttctttcttttttttttttttttttgagaaggtgtctcactctgttgcccaggctgaaatgtagtggtgtgatcatggctcactgcaacctcctccttctggggtaaatcgatcctcccacttcagccttctgagtagctgggacaagaggcgagtgccaccctgctcagctcatttttatattgtttgtagagacggggttttgcaattttgcccaggccatctcaaactcctgggctcaagcgatcctcccgcctcagtcccccaaattgctgggattacaggcactggccactatgcccaacatccccactttcttcttttcttcatcttatacttaatctctggcaaccaccgatcgaatccccatttctgtaattttgtttttcaaatttgcaatataaattaaatcatgcatgtaaccttttggtatatattttttcattctgtgtatttatctggtaatttgttgattgtactgatagtccattcttttttattgctgagtagcatcccatggtgtggatatactgtagtttaacattcacccattgaaaaacatctgggttgtttctagttctggctattcagaataaatctactatcagtagtcatatacaggtttctgtgtgaatataggttttcatttacctgggataaataaccaggagtgcaatttctgggttgtatggtcattgcatgtttagttgtcaaagaaacagcagcgaaactaaaactttagttcttcatggaactttccagttttctttttagattctcattagcaatgttaagtgatctagtttctctgcattctttccagcatttagtgctgtcgctacttcttattttatgaattttaataggtatgtggtggtatctcatcatggttttaatttgcatttctctaagggctgatgtcttagtccattcctgctgctataacaaaatgctttaggctggataatgtctatataatacacatttatttctcgtagttttgaagctgggaattccaagagcatggtatcagcagatttggtgtccgatgaaggctcattttctgttttatggtgatttgctgcattcttgcatggcagaaaagcaaaaaggggccaaacagactcccttaagcccttttataggggcactaatctcattcatgagggctttgcctttgtgatgtaatcacctctaaaggccctacctcttaatgcattgcactggggattaagtttcaaaatgaatttaagagggctacaaacattcaaagcatagcagatgatgaacgtctttatgtgctgatatttcatcattacattctctttttgataaaatacctgttgaagtcactggcctatttttaaattgggctttttcattgctgttgagttgtggagttcttcacatatcgtggatacaagtcctttgttggatatataattcgtactcttgtcctgtagctttcatcttcttaatcgggtctttcaaggagcaaaattttctagtttttaagaagtctaatttgttaatttttctttttatggattgtaattttggttttaagtctaagaattttttgcctaatgctaggtttagatgtccaattgctccagcaccatttgtagaaaagtcttatctttcttctttgaattgcttccttcactggatcgttttttacctttgtcaaaaatcaattatacttattcatgtaagtctatttctataaggggtttccattctgttcaattaatctatgtatctgtccctgtaccaacatcacacagtcttgattactctagctatgtagtaaatcttgaatgaactcagggtagaatgagtcttcctacattcttttttcaatttgttttagatattctagctcctttgcctttccatataatttaaaaaataaccttgtctgtatccacaaagccaaaaagtcttgctgagattttgatagtaattgtattaaatctttatcagtttggggagatgtgctatgttgagttttccaatccatggaatggtatacctttccatttatttagaacttatggccagtcatggtggctcatgcctgtaatcccggcactttgggaggccaaggtgggtggatcgcctgaggtcaagagtttgagaccaccccggccaacatggtgaaacc

SEQ ID NO: 2684 - DNA, 2876 bp, Homo sapiens
agcggcgcgcgccgaccgcggcgccaattggcgagcggctggagcgcggggtttcatgggaaggagttggcccggcttgtctctctgtcagtggcggctgctgcctgctctggaggcaggctgggcggtggcggccgagactggcgggggtggacgcccgggccgggctgcgcccgcttcttgcagctgtgaattcctttggacaattgatgatatttatcattgtgcccagtttctacaaataaaagatgggtggattattttctcgatggaggcatctggagcataagaacagtaattattttcttcttttccaagagaacagaaagaaataatgaagcattggatgatttaaaatcccagaggaaaaaaatacttgaagaagtcatggaaaaagaaacttacaagacggctaaattaattcttgaaaggtttgatccggactcaaagaaagcaaaggagtgtgagccgccatctgctggagcagctgtaactgcaagacctggacaagagattcgtcagcgaactgcagctcaaagaaacctttctccaacaccagcaagccctaaccagggccctcctccacaagttccagtatctcctggaccaccaaaggacagttctgcccctggtggacccccagaaaggactgttactccagccctatcatcaaatgtgttaccaagacatcttggatcccctgctacttcagtgcctggaatgggtaaacagagcacttaatgttatttacagtttatattgttttctctggttaccaataaaacgggccattttcaggtggtatggaaatggcatttcatttggaaatagcagagcagttatctgattaagcaggagttccatattcaattagccataactctttacagctggcaccttgtgatactgaaacctatttcttgagctcatttaactgttatggcttctttgtttaaatagcaataaaactttgtattattctgtagccaacagtacagcatatctttttatattcaactttagaatgcctccagatttatataaaacagggatagaagaaaacacttttggaatgtattgatgttttttgctcaactccatacatatatttttaaacatgacaacatatttcaggaataatactcctgtattgtatacttttgttaatgtgggctagtagattttttttttttaaggcatagaaccttagtattttctgatagatattttataaagctctattaaatgaacatattctctttatttcatagattatctcttttcactgtggtggatctctaggggaagatcccattctgaagtgtaatagactatagtaccctccagtttcttttggagtgtgactggggcatggaagtccactgctttagcacagatcacattgttttatgtagatttccatgtcatattgttgcatatgttagtaaattatttattttgttttagattattctaatgtagattactttgttatttcatgactaattactaatatataattaataatgattttgaggctaggcagtagctgatatcaggtaatcagagtatttgtgtagtaaaatcaataaaaaatggaaatgtcacttagtacagtagatgtttttcctgttttccttcaaaaatgcagcataagattttagaagactaaaaaaactcttcatttattaacaaattaagaatactgactataaatgaaatgtatacaaatcttaaaacttttaaaatagttacataaaacaatacttttaaatttgacatataatgacaatacttaaggcagccatatattttatgaaattgagaaaagttaaattgattgaaaattactaatgtttctgttgttatctggttgatttgagatacccatgatttgtaaattaaaattcctggttgtttaatgaaagaacttttttgggtgcgaatgtatggattatatacatttgtatatctaacttattttaagcaaaaagtttagcaacatataaagtaataaaaattgtattgcacatgtaagaatagggctatagaaggaataatagcctagattttatgatcatgtaaatataacatgttttactgaagtttttaattagtttctgtgtgaaagactgtgtttaaattgtacattgtcaaaaatgtgaatgagttaaataatttattataaagaagattaatacttagttttttctttatgccatatttgtggaagagaatcaatttaatgtgtattaccacagagctcccatatgtttgaaaattaataaccagcaggtacttgataatttgccaagctgtgtaaaaatgaccagtattcctacaatgattgcttttgatgtttgtgttaattaccattgtctataacagcatgcatataaaggtgcatgtgcaagaggtttaagatatttttatgaaatctattatttcatgtatccagattcttttgtggatatgttcactttaaatatgtagaagtaaaatactcttgcaagttaagttggcttaaatgctttccaaatctaatttggcttgcttattcaagttgaaaatttgataatgagggatgaccatgtctggattcaagtttattttttgatgataataattgaatgttgttagcacaagtaaaccagtaacttagctgatggaatcttttttttttttttttttttcttttgagacacagtcttgttctgttgcccaggctggagtgcagtgtcatggatcttggctcactgcaacctctgccttacgggttcaagcaattctcctgcctcagcctgccgagtagctgggattacaggtgggcaccaccaggcctggctaatttttgtatttttagtaggagtttcgcc

SEQ ID NO: 2685 - DNA, 1676 bp, Homo sapiens
agcctgtcctcggggaccctgcttctgctgctgggtgtggcggctctgaccactggctatgcagtgccccccaagctggagggcatcggtgagggtgagttcctggtgttggatcagcgggcagccgactacaaccaggccctgggcacctgtcgcctggcaggcacagcgctctgtgtggcagctggagttctgctcgccatctgcctcttctgggccatgataggctggctgagccaggacaccaaggcagagcccttggaccccgaagccgacagccacgtggaggtcttcggggatgagccagagcagcagttgtcacccattttccgcaatgccagtggccagtcatggttctcgccacccgccagcccctttgggcaatcttctgtgcagactatccagcccaagagggactcctgagctgcccacatggcctaagatgtgggtcctggatccttccccccttctcaccataaccccctctcagtgtttccccaacttctcccttttagcagggtccctttagagcccaactccaggtcaaatctggagctcaaatcccagtgctccctccccaggagtggggccccaactcttccaagataccagcattcctcaagtcctcccaaaacttcctacccacaccctcttcccaaggccctcaggggcagaaaacatctccttcaacccgtccccactccttcctctgcatgaccttgggcaaacccttgccctttcaagccatcagctcctgcctctctgccatgagggctttggatcagattcctcttctcgccaggatgaggacacgcactgccctccatagacacagatgaaggggtgggggtcattcagctcgaatgggtcccagatgctcacttggcctttccctgcaggatgagtgaagacgtttgcctctcacagtgtgtcttctacctgcattttggcatcagagccccccagcccacccaccacaggcaattactagccctagttgataggtgaggtgggtgaagaaggctggaggtgacatgtccgaggtcacacaacaaagcagcatgcaggaactagaaacacatcttcagcctcctcctgggccagctcttgtgctacaggtggggcggagccagcccctcaccttcctggttccctgagggtcctcagggtggaggacaggtttggcccagaaagactagccagaggcctgatggtcccaggtggctctggatatactttggatatggatttaaatggtctctaagagccgggggtagggggcaggaaaagtgggttgtctttgcccctcaaagtccacctacctagaaaccaagcccacggtcttggccgtgaccctgataataaatgggctctctcagaggcgccagcccctccctccccagccggaggcgtcatctctcttctgtaccactagagggagctctgatgcagctggagagcagcgctcaaggctctcgcccctcccctccctaacccttaccttcagtctccaccagcctgaagggcctcctaggggatcctcaggcggcccccaccagggcacaccctactgtccttgtgcctcacgccccctcctcatcctgcaccccttccatcccaccttccctttcaataaacagctgggatggatactgactttgtttcctttctccctg

SEQ ID NO: 2686 - DNA, 1242 bp, Homo sapiens
cagtctgcgcggggcttacaatgttcttgtttctcccgccgtagctgtttgccgttttgctgtttgcctccttgtcacgacctcagcgacggcagatggagccagtggagggagagagacagacggcaatgcttgggtagccagggctccctgccggccccactcctcctgcagacacgagcacgcacacacacacgcgcgcaaaacacacacgctgcccttcgccacacgtagccaagtaaaatacacaaaaagcaactgagataccattcgcacatgaccacatggaaacacacaaatgaacaaacgcattcaggcatagccacatgccagtcacacagatggatagacaagagcctggggtacaaagccacatggcacaaagccacctggatgtatatgcccctacacacgcacacagaaaaaaacatgcaaacttaagtacacacctatccagacaagtgtgagtgcacacacacacacactcacacactctacctgacacgttagtgcatccccattgggccccagtttctctcagcaaattcagatcacccagcctgacttcaaaacctgcccccttccattccccttcatgctggttcctgaatccagctcgttgctccaggctagcaaagctgtccacagcctcatttgtggtttgctcacctgcctcagcaccatcagccagagggggcgaggaacgcggctctgcggaggagcggaatcttctcagcagcgatctgcgaagggctcagcggccacaggagggcggcagagaacagcgctccctacagatccagacgtcggccctggatgctgtctggaatccaggcaaggccaggctgggctgccctaggccggggacgtctttagctcgagcaaaaacccatgaatttcagaattcaggaatccttgcatcccttctcaagctctctagtccctgaaatgccatcgccctcctcagcctcccttccatttctcgttctcctagcactggggctgctggcacagaaggaccctgtggcttttccttcatggtatagcagatgacacccacgctcctccgtgacattccctagggtcccagctgataactggagctagaactagaacccacgacttcttggttctctgcgcaggggtcttcccattgtgtcagctgcagctcctgaaataaaaccataccctacaggccacaaccagacagcatctcaaatccctggcttaaacaatcaatgc

SEQ ID NO: 2687 - DNA, 1521 bp, Homo sapiens
gcaatatattgtttgctctccctgtcctcagtttttttatttgaaaaatgaggtctaatcccactttcatctggttcattcattttagaaaagttttgtttattaattgagagattggttgatatactcaacaagtgtttatacatgcaacaaacacctgtgctaggtagatatggagaagcatgataatattcacctggaactcaaaaagcttgcagcccaggtggtaaaggagcttttaaaaaggaagggcaggccaggcatgagtcactgtgcccggcccatgttgaaatttgaacagcagaggacagaatgaaagtgtgcgtgcctgaagcacatggcatatgccctagaaggtagaaaagggtcaagggtccaaccagatctagcccaatggttgttgcttggttgaaatgaccttttaggatgggtttcattaccaatcggaatttcattaccattctcagaaggtgcctcacggctgagagctcaggacagggaataacagactggcgagatgagtaggcagtgctgtatttttagagtcttgaacattcactttcagcagctacaaatcatggccttcctggatctgcctccaaattccagccatatcctgagtgaaggttggcaaatggtcattcacctctttgacaatagaggcatctcttttaggccctgtaaggattatataatccaggtttacctataaagttaaaaaaaaaattaacagcatagaaaaagtgccgtggatgctttccaaaagctggtcttgtacccatgatataagcaggtgtctcacagcatgtagcctttcccaacagacagtcaacccacactttgtacattcaaactcaaaaaattaatatggaattattttagtgaagttgacatatgatgtgccttaatcaaataatcaaatgagttgtagtgggtgttcttagcaatcaataaattcatttaattgatcaatgaatttacacatatgtttaatgaatatttattaaacattttctttgtgacacaaatgtggaaatatattaataccccttctgttttattctaaaaaccatcttacattaattagcttcattctattttttgatgataaattatcactgcctattgtgtaaaaaaaatgagatctttcaatcaagggctgtacgtctagtggggcatgcacaggacaactctaaaaaataggcgatcccagggagtgacctggccaaggcccagatggagtgacgggggagtactggtgagggattcctccttctaagggagagaatcaggtcagggtgtgtagagtggaatcttgaagaatgtggggattctggtgagtagcaaaatggaagaagattcctggtgggaggtcagcaggagcaaaacccccgagattggaaaacaggtataggatgaggggaacagtgagttgttcaatattcttgccatagcacgtagagagaagattcataggaaataagattgaaaacatccaatgcagaaaagccacggagccct

SEQ ID NO: 2688 - DNA, 6282 bp, Homo sapiens
gcgtgagccaccgcgcccggcctaaacaggggtttttaagcatcagaatgcaaatgcctgcttatttctgtttcttaaaaacttaacatgtccacaaacacaattagcatttaagcaatattttcatgttagcttcaataacacattgtgggacttcaaagtgcttaaatggcattctacctatcattaaggtgtttacaataaatagaagaaatattacagataattttgaaaataaagcaaaactattcccaatccgatttttgctattttctcagcaactcagaaaaattcctaggtagggagaaatggctttaatttgcatatctaatttcaaattgtggccattgtattttcattatctatctcttttgacatgtctgtcagtaacctacttgttacgcatacagacacgtactcgtacacatgcacgcagtgtggcatctcattattctcgaagctctcaagggcctgttttatattgttagactgtaagattgtgagctgctgaaaggcaggaacaatgcctcttctttcatttcacttactcatttccttatttctgctagggttgtgttgtctatgctgcacagccgaaagagcagggggtttggtttatgcatgggtcagacaagtttcttactttttttgtgtctccatttcctcatctgtaaaatggggataaaagcataaacctaggtgatagggttgttgggaacactaaatgagagaattgtggcatatagtcactgttcaacaaagacagacatatacgtttaatattttatataagcatacttttatatccccccacattaatttacacttggtacttacataggtaactcctgaacagcctcattcctcctcatgctgcccctaacactcaagcactgactaaattttttttcacatgaatgaagcaatgacttaataacggtgaaagtgttatactgaagctttcaattgatggctttcccttacaccacaggtctagatagtacttgggggaagggagtgtgtactgtttttgagagaggctgaggatttgacaaaggacctcagagagcaccaaaataaagataacccaaatggagaaaccaggactaaaaagctattgaatttcacatgattatgtcaatgttctcttttcctctgaatcatttgaagctttggaaggaaattttagacataaataactttaatttgtactcttcttatgctcaattatagcatggcatcatttttgatgaatacttcatccagactgattcatttatttctagtagaaagaaggaatgggtgcgactcttgctcattcattattttttcccttatgaggaaaacaaaatagtctcataattaggggattttattgttgatattatgatttattacatttctcatatgtatgttcttaacttttttgaggtataatttaggtacaatacattgtcccagtttgtgcattttgatgaagttggcagttgtgtacagttgtgtaaccaatatcacaatcaggggcagtgactgctgtctctgtgtacttcggaacatttctttctgagcctataaagtgtttggctggcatgcaggggcctgaggaagcttaaggagaaacctcgtcccatgacacataatcctaccacaccctgaaatggatagatggttgggtcatgccagtgtgcacacacagactggtaagtggaagattagccagaattgtgaaagatgctaccatacagccacccagttctgccaaaggagaaggtcacttgccaacggcaaatgtaaatggccatgaatatcctgttctctttctgtcaaagttggttctgagcactgaggggagagacagaattaaaagtagacacagcagcgagtaaagctatctctgtctaatggagtgtctgtatttttgggtacatgatttttctatacctgagatgaataattcattctcaaggaaccccaaagcaaaagtttaaagatgattaaaaaataactttggcttctgatcttctgataactgggaactctgtgatagagacatagaaaactattaggaattaaaaccaaaacaagaccgggctttagggattcccctcacactattatactgtcatggaaggctcaggataaccaggctagccgtacataaagtaattaataaagtaggtcaattacaaagctagaagagttttatttagcgtgatattgatcacatcttgaatcatctccctgaatctccgtatttttcttttttattaaaaacagaatagcgttcttgaagaattgttttatctacacttctgtaattgttctctaaacagagaattgtttagaaggaccagttccctagcaatatatgacctttctaactatacttcatgtcatctcatgcaggccctatcttctgtaaaattaggcctccattgtgtttctcactcaagattcttctttattatttcccagattctctggatggagcattttctttataaacaacatatttgtgctcatctgttgtggatgctcttggtgccccatccagacctcctttaccaggctgatgcacgaacactctagcttctaagaatgttcactgttagcttatagattctccttttctacagagtcacccttggctaagtaggagccactatatcctttagtatacattaccagcttatagccattgattaagggaagacaaaagtcagcccttgtctcaaggtagggccaattctgaagtgaaattcatgctccagagctccctgtggggccaggctacagttagtttctagctgggccacatgcatgcttagcttgttttgccttatcctgctgccctcacttctcttcccctgagaacactaacacaagagtccctgtccaggccctgcttcaagggaacctgccaatcatcatgactgtgaacatttagggcaggtgggtaggagtctgagagtggtaatgggattggagggggtttagcacataatttaccctaataagtgtttgctaaatgagtggattttccaggcttgatgcttggattaaaagtagcacagctgtcttcaaaagatctatttctcaagcagggctgggctccctgattcactcctggattggaaacaaaataagtgggaaaatttcataaggcttattgtcgaatagaaagacattgatgattgttaatgatgttaattaatcaacagggattattaagtgccagcttttcccagcatgtgactaaacacccaggtctgtggtaactgtgatgaagaaaataacctcttttatcttataaaaaaaaaatcttatcttcatgtggagataaaacttactcaaatgaaacaatgaaaatataagactgtgttcacatgacaaaatgtacttcataggtaataagttccaaaggaaattcagagaagtaagaaatcaatgtgggcgtttgtgagttaggcaagtcttggaggaataggtgtgtgtgggagggacaggagagaagacattccaagtgggagaagaggtaagaagaaaggtgtggagacagtaatgaggatactactatttgccaggagatataacatgagaaaataagttccccctgagttcacttcctttttatatttccatcccattatcctatttccatttattcttcattcatttattaattcagtaatcaaatattctttgagacctacactgttccaagaactgcattatgtcttagggatatgggaatgaaaagaatacccatcattgttctcaaggaactgacagtctccagagagataaaattagcaaacagacaattacaatacagggttgtcatggtactttaagagtaagcatagggtgctaggagagaacaaaggagaggcatggaagccagacttgggggaaggtccaaaaaggcttcctgaagaagtgacatcttattggagacataaagagtgggtagaatttagccaggtgaaggagagtgcaagaaaataattgtggggatgcatggtgctttgaggaaagtgaggggtgcagtatcactgatgtgtgtggaggacagaaagaccaagggtggacaataaacgggccagatcagggaccaccctgtaattaaaggagtatggactgcatctttagggccatgataaccattagttgactaaagtattaaaattacttgatcggattatttctgaaacattactttagttggagtagtttgaataggttggtctcgaccaaactggatgctgatagacatgctaagaagctttgttatgcacatggcaaatgatggtgggaatggagagaagtgaaggtaaagtgacataaattggagtttcattggttttgggagaagagaataaaaaagtcgagaataatactgaagaatttacattaagcaactagggtggggagtaatggtatcttcatcaagttagggagcatgagaggaagagtgagattggggaacagatgattactcagtttttgacgtgatagttttgagaatcctggggataatcaagcagagatgttgaataggtgggtctggaagttagaagacacttttggggtggcaatatagatttggggtttctactaataaaccactcactttacttccatcctattttgtttagtggtaccaacaccctcttatttgctcaggttagaaactcatatttccctaaggggtccatggatgggcttcataggattcttgaacctccttgaaattgcatgcacaattttgggtataagtgaataagtgcctttttctagtaccatgagatgtagaattttatggaatttgcaaaaggttacttgacttccctcttgtccccccaaaacaaagagaatccaaagtgacttggggtctttgtctcttttcctctcttctttatatttactcatgcgtcgtgttcttcagtcttatctttgaagtcatatttatatcccttatctttcctcattgctagcctcctagttcagatccttactgcttgtaactttaagaacttacattggaatccctcaactttctaatacatgtaactgcatattttttttctccaaactgctaccaactatattagttgagttcccacctttatgggcagcaagaaaatttaactttgtcagcccctcctggtaatcatcagcttagtttactgattttttgcaatccagttattaaaatctcagactctattcaaaacatcttatctttaattaaattagatatgactaggctgctagaagctgattgaggaggagtagagtgtaattggttctttacctcttttcttctgatctcaggcaactgttctgctgatgggggtatcagagaggtcagggtgactgaaaagaattcactcatgtgattgccagcatgttgaagatggcaagctggcaatcttttctttaaagtcagccaatacctggtctaatttctgggtggtggtaaccagcctccagttacacagcattacatcttaggtggtctttgatgcccagccagcagtcttatggaggtagaacagcttccttctctccctcctggtgggtggctctcagtatcctcctcacatcaacccatcattcatcaatatggcccacccatagtggtgcccaccccttatttggtgacctgggctaggtccacagaaaacttgggatcattggtacacctgcctcaatttgtatgagactgtgagggggtagcaaccttaatgtactaggacttactcatttactctctcttaggattcaacacccaaaatattctatgcattttcttgggactgttaactttcaggtgcagcaaaggttcataacaatcttcacttcctaatgatgctttcagatttcatgagtgattctccagggaacatctggcttggttgggcacagataaatagccaaactgcttccctctcagccccgttccacatggagagaagtaaatactgattcacaaactcacctcttcccaaaagatgactcctcttcccctctctgtttccttcaggggggctgctctactgattcttctgaaaggtcaccttgttagcaggtccccagtcagggatgtatggccttgttgtttttcagctttgaggtgcctctacttggtaactccctaggaaggagtctcagtatgtatcacaacttcatgttaccatcttttaactggtaaccatgatacaatttcttgtctctctcacatatttttcctaaatgttttaacttcgatgactcccc

SEQ ID NO: 2689 - DNA, 1904 bp, Homo sapiens
gtcacctcatagacagggctgcactgggcctcctgcctaggcctgttcgatgaagcaccaacaagccccacagctttgttgcttttgctatgcccactgggaccagtgagagaagtgcggtcttatccctgggaggagagaaagagccagcatctgcaggcgcccacaggatgtcaagaaactgtgcaagagaggaaagaacatacatttgagagcccaaaagaccagggtttaagtcctggttccaccaattccttgctgttttggtcttcgaacagccattgaacttcaagcctcagtttcctcgtgtgttaagtcacatggaatgatggtgatcgatatagacgtgatctcagagttcactccctcatcatacagtggaggaaacgaggcccagggaggggcggaacatttttccaagtcatacagcaagaactcagaggcctcttggttcctgctcttgccttgaggtggttctgcggggcgctccagagcccccaagaaattcttctgaaattcagttctccacaggacacctgggctcctcctctgtcctcccagcccctcacagaggagtagtttcccttctggcctgcctaagtctgtcttgtcttctggacttcagtggccaccatggacctcccaagctttctcttgggctcttccagtgccgacctcagcttggctgcctcacactctgtctggtgggcacttacaggagccatgtccacagaccacctcgcctgggctgtggaggccccgttctgagaccacgtgcagtccaaaaaaggaagctaaaaggggtcagaggaaaacatccccgtgtagggtgagggtgaatctcagtctccctgtcaactctctttatcctgacatccagaattccagacctttgtgggcactgatccctgagactgggctctttaagctctttcactgatccctggggtccgaaactttcagcttgcactttggtttggtaaaccactgactgtcctaccaaacgcccccgcaccccacaaactcaacctgtgctcttcatgtgctatctcctgttcgatccccacactgaccttctgggttagggacttgcatgtccccattttatagatgaggagcctgaggcccagagaggtaagtcacctgcccagtatcacacagcctgagattggcagagccagatctcatggaatgagagccctgtctcacctccctagagacagagcttaattgataactttgagttgatactgaaaggtcacaggaattgcagcagataaggtgttctgaggaactggctctctagcacctgtggtaattaattcagtatccctttttgtgtcccagagaagcacagtggctaaagcgcacagcacaagcttggagatcagatggacatggcttcaaatctcgtctctgctgtttacaaaaagtatgaccccaggagagggatttataccctctgagctgtagtttcctcatccacaatgtgggagcaggattttagaggataccgagagattaaatgagatctttcttatagagtccttagcaaggggcttggcaccatggatggtaatatcatcatgatgatgccaggtattttcattgctattccttattattcatcagtatttttattcattgctattgctggttgtattcatcattaataaataatagcattgtttattaatgttattactaagttctctgctatgttctggggctcacagatgaattacacactgtctttgctctctgagagtcccagcctggaggtggggagaagccccttggctagtgggctgatgataatggctatgatggcacagcattcttttctcagtaagagcaactgactgtccgagggaggttatacagaaaaggtgacatttgagtgg

SEQ ID NO: 2690 - DNA, 2179 bp, Homo sapiens
agagtgggcgtccaggcggctgggcagggccagaatccggcggtggaccctctgggtctggctccctcggggcttacgatgaaaaaaagcgcgtgtgtgtgtatgtatgagaattctgaaacatttagcagaagcagtatattactccccatagtgcagttagctaccttttacctgtttcattggctccaccatacatttctataagggaaaccgtttcattcataaataccctaagtgtatatatttaatatctaagagacaacttttaaaggcataacgatgtaatctcatctaatgaaattaacaattccttaatctaattcccagtccatatttaggtttttcagatgatctcatgtccttttacaattggtttgtggcatccgggtccaaaccaaggtccacatgttgcatctggaccacgtgtttaagcctcttacttgatagctttaaaattagctaacaccagaggtttagatggtgtaaggcaagtctggccaccaggtgacttgatttacattcgttttagtttcgctcagaaagtatgctgtgcatctaccaagtgctatgatgtacagcctgccttcaacccatttacagacagaaaagtaaggttttctgatcccttggaacctgaactgatagcaaagacttcagcataagcatctcactcaggataatgtttcttccttggcgttccctttgacctagttgtggagggcctgaattccatgacaaggactctgaaatttagcttgaaaaccctaagagtaatctcattaatagtccttaaacccttttcctcccatctgaaatcctgctccctctgtgaagtcttcctttactgggcactggtgaacactgctatctcattcgagttcccacacggctgtaaaatccaattctctacttttcacattttgagatgttcgtaagagacggtgtaaagttatggcgaggttagactgtgtaggttggtagtctgactctgccatttaggaacaatgtgaccttcagcaagttattttctgaggtttcctcaggtgtaagatggggcttgttattttttatatcattggttttgttcttggcccatatgcttacgttgtctttgctcatttaaatttctggcttttctactgggattccctgacttcttccattacctatggggaatgcccctccgtcccttttcatgacctcacttgcttgtcagttatcattttctctcgtctcatttctctgttagttcctgctccacgtaagaatatgaactctttgttgcaaccttttttatcttatttctgcccatgaacagtttaaaagggctggagtttcctatttgtttcagttttactcagtttttttttttgcaagaggaaaaaattctctcttgatgccattttagcttctgatattgtaatgaagagtagctgggtaaattccctcttttgttcttgttattttattttagttttttacctgactagaccagtaaccacagtaactatttttgaatttatttctttgcaatattttctccatttctgggtattaattgtagtcagcataatttgctaattttatagctcgagttatttcagaagaactttgtgtgcttaaactgacacagggtctcctcccaaggatcacagactgagataaacctgtgtcagtgtgagcactgtaatgttccagccactaactgttttgaggtagcatatttattttggcttcatgtttagccaatgctgtgaagggaaaaggacctttatctcatttcatgtctcaggcactgtaaaatgctgagtcacagtacacctgagcgctgcagtgatctaaagtttgaggcggcagtgatttcagatttctgccaggcttatattggtgttcaattcctttgctttgatttagtatgcttgtgtaactgtgaagggttgggatggagaggaggtggatatggactgggacggggggtataggaactgtagtatttttgaagaccattgatactgttcacaagtaattgggaactgtgtaatccattacttagacaactccagatatatcattgaggcagtcagaaaatagttttgctttctgctttaactaggtttgaatgtatagagtaagtgatgcaggttaaaatattttggggggatacagaagaaggtac

SEQ ID NO: 2691 - DNA, 1731 bp, Homo sapiens
gggctcgggtttttgtgcgttgagtattcgtgcttgtctggagctcccatggttgccccacggagcgcacgctctgcagcgcctgagggtctgcggcgctcactgcgaaggaggaggggagacccgtgaggctgtcttggaactttcgctctgcgcacctggagcctgagcgctcggcttgggaacaagaaaggagacctcaggcagctccggggcagggcctcgtggggcaccaggcgtgccccaggcgccttgtcccagcgtcggggtgaatatgggaccccattagtcttggctgtaaacaccgtagcaggggccgagaggccacgcgggcctttccggacgcgaaggagttaataaaaggtgttttatgggcgctaggaaacagtgggggaggtgtgagcttctctctctactctcgcccccctacttttttcttttttccctctcgccacccgccgccagatcaaacaggcccgcgatttaactagggcaacacttggcggtaatgagcctgtccgacgcaccccttcctcggcctcagtacccggcccgaggccccagggcccttggggaggagcagagagaaaaatcaaagtttctttcttgttgttttgtttttcttttctttaccttctttctttccgtttctttctgggagtccgtttagaaattccggcgcgcatggagaaacagactcagggagggaggtgatctaagccccacagcacggagggaagcttatctagattcgaacccaggactccaacttcgctcacacacaaacctctggctatacacaggtcccagctcccaggactatttttagcaccgtgaagtatcctaggcacgggaagaatgcgcaccctggtctagctttcttatagccggggaaagaagagggggtgctgagggagacccgccagcggccgccaaagccaagtctggcataaccaggcctcttcagaaaacccaatcctgctggccccaaaccctctttgggaagagagccttggagccctaaactcggtctcagaaacgtgcagtccctgaacccgggagccgagacggagccggcgcccattgagagggtcactggatagtcccccactctccccacgcctgactccagcggcctcccacgcccacgccacatccccagctcccaccgcacagctggaaaagccgagcacagagaacggctcggagctgccccaggtttcacaaaccattctgtgctgagggtctgcagactaggggtccagcccttctcgctgccaccctggctctccaggctcccacccctccttagccctcccttctttgaaaacatctttagagtctaacgtttagtttcttcttctctgcccaggtttcaacgaggtttgtcagacacctcaaatcagctgtggcagaagcagggtcattatttattatttttgaattaaatacatcttttttaaaaaatgggaaaaatggaatggttaccaacttaaaagtaaattccaggagtttactgcaaggaaatattgatgttacaaaacgttaactataggactattctattaaagagtgaaacacgagaaagaacctgatgtcctataattacagaactggctcaataaagccatcagtacaagtgggttactattcagccattagaaaaaatgtgggaattgacatggaaattgttcacgatatattaagtgagaaaacctcctcccatattac

SEQ ID NO: 2692 - DNA, 2458 bp, Homo sapiens
tgaaaaggttggtaatctatacttctggaatttttcttgtaggattttaaaacttatgtagatcaggcatgtagagctgctgaggagtttgtcaatatttactatgagacaatggataaaagaagacgggcactaaccaggctgtatctggacaaggccaccttaatatggaatggaaatgctgtttcagggctggatgccctaaataatttttttgacacattgccttctagtgagttccaggtcaatatgttagattgccaaccagttcatgagcaagcaactcagtcccaaactacagttcttgttgtgaccagtggaactgtgaagtttgatggaaacaaacaacatttcttcaaccagaacttcctgctgactgctcagtccactcccaacaatactgtgtggaagattgcaagtgattgcttccgttttcaagattggtctagtagttaaaggggcaaaagtccattctcatttggtccattagttccagcaattgaaatttatgtgaattattttgattgtagaagcactataatatgtgctgaaactaaatttctttaatattttctattcctgtcagcaccttttctagcagctgccagtttggagcattgccctctaagagctttaaaactatttttttacatgccttatatacattccactaatgacattcttataataatattaaacacatgatcttggtactaacatactcactgtgaacccagcctattgcaaaaataaaatctttttataatattatctatgggatgtcagcacaatataacactctgggaagaagtggagttttttggttattaggttaattttctagtaaaacacgttgcctgttttcagttaacactggtaatgccattttaatatatggctttttcaaatcagttcagtgaaaatagtacagatttaggtttacataactactctgacatactggaattgcatatagagatgttcagtggtcgtttttcattttaagtaatttttgttttggcatttttttgtgtgaagtaaattaatcaactagagaggtgcaaaacgttctcagttgatatctgagtattgggtgcatttggtggcttaaaagcaaagcttcctaaaaagatttttcttggcagctccaggtctatacatttaggtaatgaatggtagtagaactaatagctttaacaggagaatagggaatgagaaatagaaatccaaggctgaagccaaaagtaaggagggtggccaaatggtaaactattggtacttgttttctacctcctaaaaatgtagcttatttttaggatttaaatcactaagtaaataagtatccttgccaagtgatcatgagtgtcatttttgttctaagactaatatttttagatctttttacttcacctcatacttatcaccaatgtatatctccatttattcaataacttactggggtaaaataacagcaataaacctaaccttttaacagggtctaacatgagagttggagtcaaagccattgttatcttttggtgacacccttaaattttaagtcttccagtcttccatgtgaactttaggcccaaagtttcttatgtatcacacatcccccaaataagtgattttttcccagtgctttgtactgtcaactgcattatctttaattatttaaaggtagaattatttaattttgtgatttgttcttccatatgacattgagcaaatagatctgtttcaaaatatgttcccgctatgtggataactcttctttttaaaaagaaaatagagaatagcaaatcttcatgataatcctcaaaagaacaaaatgcttaactttatctcttaatttctaaaggtaaataacctaggttcagcttttgcttaaacattaaatatcttttccattttttaatgtttgtaagctagatatgccagctttgtttctacattgcaaccaaaaactgtttcttttcacttaattataaaaccagtaattcatttactcttgcccaaaactatacactgtatttctgttatagtaacaaaatagagttatgtagaattgtatggaactcaaatttaaaccatgctttcttgtagtactgattgaaacttacacgttttattctactcatagtgagcttattcttattttggattgattttccaaaaccacagcttcagcagcaacaatcagaatgtccaaatgctgtcctttcccttacagagaagaacaatggtaactaaaagctgcatataactagcaataactacattgaacggtgtgcattgttcatgattgttgtgttttaagacttgtatataaactgctttttccaaactctgtataacttttaaatggctggaactactcgtataaggactagactgtatttttgacatgctcctatttttgtaacttgaaaaaataaaattttgccttgtgacagat

SEQ ID NO: 2693 - DNA, 1098 bp, Homo sapiens
ctggagtatagtggcatgatctcagctcactgcatcctctgcctctcgggttcaaggaattctcctgcctcatcctccacgtagctgggattacagataaactcagatccctctactttccaagtgtgagaagattttgttctacagtcgcttctgtgagatcaccacagccctggcaaaccaagagggaggaaccttgtgcctttgaagtgtgattcacagtgcttgataaagtgccagtattctctaaattttaggttcacagcaaattggatggaagttacagaaattcttctatttttaattttaaactaacatacgacaaaaggatttcctgatttatccaccatttcaaaaaaaggtccgaagaaaatgaaggagcctcttcctgtactcatggtacataagcaaagtaaatcattgcttgaccctcagcccacatgggaaaaccacccctaacattacaacagcagtaacaacaacaaacatctacgtgagctttctacagcctctgatgacttatgccttcaggagcttccggattaacaccttgtattcccagaacttgttgacaatgggttcatggaggagaaacctgatgtcttcgataaggtaacagaaaccacagaaatcaaaaccgtggataagaggagactacagaaagatttctccttctggagtacatgaatcaaattgcattgaatcaaaagttttgtgaagatttgagatgagaatgagagccaaataagccatatcataagaagctgtgatcagaaataaaatgaggacaatgcttactgtggctttcaaggcaggagaaagcacacccgagggggtcgtgtcccacactaggcagatctaatggtgccacaaaagacaggtgttttgtcagatttcagccacacactttcacacctgcaacgcattaactaccgcagcaatgttaatgaagaccaggtgcctgttctccagcataaatgaggaactggcaggagatttgctgtttgctacctgacgtctacccctgagtctctgaaccccgtccttctggttgaaggggaagatcaaagagtattttgaagaaaaagatgtacaggg

SEQ ID NO: 2694 - DNA, 1839 bp, Homo sapiens
ggttgcagtgagctgagatcataccactgctctccagcctggctatcagagtgagactctgtctcacaaaaaaaaaaaaaaaaaaaaaaaagtgaaaagatgaatataggcaaaggagttggcatgttctttgagaaagtcaggactttcccagtaggaccacagggatgtttgactggagccattcagccagcaccctgaccctccttcactcatggtctgtgtgtttctccttgcagaggggggatgatccagacggcagagcagtaccagttcctgcaccacactttggccctgtatgcaggccagctgcctgaggaacccagcccctgacccctgccaccctccggtggcccaggtgcctacctccctcaagcctgggaagtcacaggaagcagcagcagtaaggacaaggggccggattccaggtcttcaacactggccactcctctgcttcctctgttggccccagatggacagtaaggggaacctccaatgtctctctgaacttaaagacaggagctggcatttatgacagacaaagaaagaagcccaggtgtcctggtgttctctgagacactctttgtgagcttcagtttcctgttctataacatgaacataagtgcttagctgccatgagggaaaagtaatgagagaagtttctagaagccactccagccactccttcctggggctgacaaaagggtgattccaagatcatccttcacccgaggtcctgcccaagcacaggccagatgcaagaatggggaaaagtctggtcctgatctccaagtctcaacatcctatcagtgactctgctccctgaccacacatcggaagggctggatgaccccaatcaaaagaaagaacaaggactctggttacccttgcctccacccatgtgtcataagagtaggctacagaggtgaccaggcctggcagttgaaatctctggaagagggaacatgtggggactactcagaggcaaagaggagctgctcctgcctccatggttgctggccactcccaccaactactcttagggaggctaagcagtctctgttttgcttccatggctcaaataataccctgggtatgcaggacccactataccttgcatttgctgagtacacctagagagcttggctgtttccaaaaacaatcagggtcataaccatccatgcagacatggaggctcggctgaaccaggactcctcactgtctacctgagagaatgagcacccctcatccatctcagcatcaacacaatttccaggggacctcaggtctacctcaggactgaacgccacacctcaggattcctcctccttgaatctgagactggctgcccattctgagatggggatgaaggtaagatgccgcatcaccaggcacgccgcccctgacagctgccttgataccagctctctgtggaaacccccgaggagttggatctggagaacagctgggcctcctcactcaggacttctctcctgaagaacacgcagtgctaaaactgaggatgatttccctaatgcttctgcttggccttatggaggagctgctccttccttacagccttggggatggacttgcccacacctccacctcccctgagccctgtgagaggcacgactgtctatgccaatgaggctcggtggggggctctcaagtgcctgatcctgccctgggctcagagccagcccagagggaagcaactgcacagccccacaggccctccctggcactgtccccccaaccccatctcagagctcagagggtacaagctccagaacagtaaccaagtgggaaaataaagacttcttggatgactgactc

SEQ ID NO: 2695 - DNA, 6377 bp, Homo sapiens
gtgtgtgtgtgtgtgtgtgctgtataaatctgacttacctaaattctgacatttgtagctgccttttcaaatgctggaagcacagatacatcttgaatgatgtaaaagcacattcgtatttttagcaataaatctttgactgtagaatatcattaaataaattgaaaagcagaccaatattaacatcgtgatttatatgctacttgctgctagagacttgacatagaatactaattatgaaaatggtatagtgctagatttcttcctgaattattacacacattatactttgcagggagcaggtttgacttaaatgtaaattaccaggcctttttttttttttgctctttcaaagggctatttgttgtattacccagtgcttttctgtccctcatagttgaaataattaagatcatttgcagggcctggtttgctcattttgcttagttacattgctgctatggtccattatgtctacaggggagcaccattatttaatctgaacatctggaatccatcatgtgtagtgaaggacaagatgtatcctcatttttaagccaactccatgataaaattgatggatgggaccaatgtgtacaggtgaagaagattgatacttaagatctgtatgttgtgataggaagatcataagaggacttttattctgcttcatttttttttactttatttcattatattgtattttattttatttatggcacagcaatcagaatctgattgaagataaactcatcctatttggatcagagcattagaagaaagaaagaactgacacttctcaaccttctctagttgaagacttctctttgctataactacttgaagagttcagcagaaaaattttactgaagaatccctgatcctcctttaagtagctgtagagaatattcactaagtgtaatgggacacgtctctctcatgcccacttcttttctcttatccctgcaagaaaatgaagttttgttggagtcagaggtttattttagtttattttaatcagaaacgtgtatgaaatccaaagcacatgatcttcatttttaataacgtaaaccatccccatgtttatgtgctttctctggtcctcaacctttttttttctttttaattttaagaacatctgtccccactgcaacttcactttcatcaggaaatctaattacagagatagaaaagagtatagtaggtgaagcaaaagacagcagctccacctcttaatactgaatacttagatgactgccagatgaatagctggatccttttgtggctaactaactcacctggtgtagagaaagacagttgatagatcaaaaaagtatacagataacagagagcaagtgatatggatatgaaagacattagggagcatacaaatgcagtttggccaggatttatttctagttatggactgatgaggagacatggggaaaaattgtcaaattaaaaaaaatctttttggcaaatttaaactttgcctctatcctttttctcttaatctgctacccagatatgcacttcaaataggaatgtgggcctactggggcatgaaatagttgagagctattcaacaatgaggagaatgagagaaatctatttagaaggacattttagaatttaagccagttgaaccttaatagtcacagataatttaacatgacccctaaaccattaggggggtttttactacaaggacttggctctgtattaacaatgtcatccttcttagaaattgataactatagaagttatcctatgtggagtaagataagaatgactgctcttcatgtttacaagagattagagtggataagaaccaggtgaaacaggaatcccaagggatctccttccttctcagagtcatagccattccagggaatctgcacattttctggctttcccatttctatcagatggttacttaggaacaaatgaaaatcagcaaaagtgccatgataattatcacaaattcgtatgaaataatgaggcagttgaatgcattttttctgtcttatctctgtttgtcaatgagctaaacagtgtgttcaggtccctctgaatacttggaggagcaagattctttagccttgtctcactgattcccaaagtttatctaagtctttccagaggaggacctctattgtcaacacttgatagccaaacccttcctttgtttttttccttctatacactacttgttaatcaacttgcacaaaaccaatttctggttcaactttgtcctgagctgctaactggctatgactttattttacaggtgcagtaactttgttagctgttattttgaggagctccagccatgggctcatttgatagatttaattgccaacatcttgaacaaaccccttgattttaaaattttaatttagcatgtttaacatgaaagaggattgccgaataagtgtcccatttgatttactctataagtaatacagctgtttgtctttatttgaaaaataaaggtagacacttagaaatgaaagatgaaagcttggaatgtgacctgtaagtccagaaatcacagaccagaaagcaagaaaggaacatgaacagcacatgtcaagtatccaggaatttctaagtataatgcagaacttggggcatgagaaataatctctctctctctgtgcgtgtgtgtgtgtgtgttttctttatctgagcatgtttttttatatactgccttttctggtaacttcattaggtctgtataattatagtttgcttcaaccttagtctgcatcagtattcattattatctatttggtgcattgtagcagcataaatataactaaattactagggtcaaaccataatgggagctgttgtgatggtaattagagcagaaatatagtccttttttggtaaaacttgcagaattgtagcatgaggtgtgttcttatagggtacaattaaagccaggttgtgggttcaaggtggtaaaatgatggataatgaaggtacaccattaatcacagttccaaaagatgctctgtatcaattcttttctctctgaaaggtagctcagaggttgatgctaagacaaaaaccaacagagggcttagaggtaagatgccaacttccgtgccttcactaattgtcactagaaagctgaaactgtatcgaactctttaaaaggaaaaaaagaaactagtagaaagcatctcagtgtggttattgaaatcattaaatttgaacttagtggagcaatgctttaattctatgtgtctttgccatgttggactgagtctctcacataacatctttagaatttagaatgtgctataacttggagcggaatcacccttattgtctttacacacagcccataatcctgaaaagcagaaacagaattccactcttaaccccctcagtttgcagaatgtctaagtgtagtgactctagactcaatgtgagatgaaaagggaaaaaagaaactgcgtataaatagtactagagtaagttaaaaagaactatcttataatgtgcttaaaattatggaaagtttctgaattctagcctgaaatttaagaacagttctaagtaattccttaaatttgttaagtcttttcaatctttgggttttcagataagacaaccaaaggactgactgcagtaaatagagcttttgaaggcattatcattctattaacaataaagctgagaggatagatttgttttatgattttcacatgatattacttgtcggtgacctgagctgaatttgaactggcattcttgaaaagaaagattccctttacaaatcctttaacctctaatgcagtcattttaattcacaacaggctagaaccttgcataattgttctcagctcaatacaatctttaacagcttttgatttacatattgggcagctgttttgaataagaagttgtccatcatggatccttttgtcatctgtccaaggaatgtatttataaatggttccaattagagtaatgaaggtttcatgtgaaaacaatgatcaatagccaaccttaaaaacaatataagtcaaagacagatgtaaactgtgaccaggcataacaaagtcaagttatctatggggaatgtataccatcgctcctggaaaacaaatagaaattttcaagtctttgactattggacagatgttgattccatgacacagaagcatttagattctgtgttaaataaatcattgacccacatatgactgagactatgcagattaatgagaacaaccgtggccagggaaaaggcagctcagtgaagccagctagatcagatcctcactgtgattatggactgcaccccatcagccttcaggaacagatgtctgttgctataagaaggagccacgttgatagtgaagtttctgtacaaacacgtttcagactatgtcagacacatctggtcaagggctttgtaatagctttatttatttcttgcctgaactggaacgtcagaagcatgcactccacattaagccaagagttccctttgttccacacggctgccacagctggaaccttttgttggatgacacagccagatcttctgtagagaccattatattctttggcgtatttcagtgagtttgcatcttttaatccacctcagcaagcagtggggagttcataagggccatgcacagagccttctcttaaaactgtacaggaacaccagctgggattgcaaaattgatagcatcaaggtggcctgctaccaagttggccttagtgagatgtgctctctgccatagccctgtttgcttagatcatttaggaaaaaaacatcaaaacagaagtaacttctcattcttgtgtgttgaggttgctcataggttactctctccagccaaaaagaaaaaaagccaaagaaattttgtcatagactataagatctgtgtatgatgaacagtttcatgagggttactatagaaacatctagcctacaaaagtagaagggaccagttaaaatgaagttctgcctagatttctaatataactaaagctgtttttttccctctccccctctcttctgtctctctctttttttctctctttaaccacatcaattgacagcccaatttccacatataaaataggagtcataagttaaaagaaggtgggggctgaaaaacaaaagtagatattcagaaatgtgcacctagaaaagtctttcagacacattgagttgattttgtttggcctgattatcagaagttcagtgccgtttttagttttcgggaacacagtctcaaacatgagagtagctctactccagccccggggcacccgccctcactttgcctttgccacatccttcctaccaactggcccccaactcagaataaaagctggtctagcctttccaattggcaagccaatgacattcacctgcatttctcttgctagtgatcctcttaactaatgcttaagctccaatttcttgccatagtgcttatcacagattgtactcctaagactgacctccagatttatctcctgaagcatccccatcaagagtgtctgatgggggccagacgcagtggctcatgcctgtaatcccagcactttgagaggccaaggcaggcagatcacgaggtcaggagatctagaccaccatcctggccaacatgatgaaactccatctctactaaaaatacaaaaattagctgggcatcatggtgcatgcctgtaattccagctactcgggaggctgaggcaggagaatcgcttgaaccaggaggttggaggttgcagtgacctgagatcacgccactgcactccagcctggcaacacaatgagacttcatctcaacaacaacaacaaaaaaaatagtgtctgatgggaagaaattctcctccagggtctactccatcccgaagacatttctgaaatgattgagaaagccctcaagcataacttgtcattgatgttgctagggcattctattaggaagcagatgcagaaagagctgtatgtagttaggggcatgcacatgtgtctttgctcaatatagggggttgtatacagttgttctccccacacagcatacaggaagtttaaaattaagctatactttacttacatggataaaagtcttgatttttagttttaactaagtatttgctgttttctgttcaaaaagaatgctgggggttcatgtcagtgacagagtgaaaagctagagcagtagcatcaagatataaaccaaggctcattgtctctcttttcatatatattactttttaataaatctatgtttttctaattacagaagtagtataagctctttaaaaatttagcaaaataatagatgagcacagaacagagaaagttaaagaaatgaattttatgcaag

SEQ ID NO: 2696 - DNA, 41152 bp, Homo sapiens
ctgatttattcactgattgtatacaagtgcttcttacattttaacctcacaattattgtttaaatttttggctaattttaaaggtgtgaaatggtactatattctgtatatatctttgcttaataattgacaaagttgagcttttttttcccagtattgtgttggataattgaacttcttttctgatcttgatacttttgcctaaattactttcaatagcctgactggccttcctcttccgtcacattttatctcctcctgtcagagtaatagttacaaaatgtatataatcaacccactgcaaaaatgaaacaaagagaagttttaatacctgttaactgtcaagtaagggcaaactcttcagttggtatctcagactttccatagtcaaggtttaactagccttctagccttttctcacactatcttccgggtagtgtaagtgttagccacaatgtcatactcttattcctgaggccccttattttcctcttccatgcattagtcactctcatctcttcatctgaagcccctctgttccaaccctactaattaggaaaccatcaaatactacacctttctgaaacttacatggtcattccattagaattaatctagtttgtattttcattatgcctttttaaaacccaggttttagtgcttattctccccttaaataacttttgatgtccaaatctgaattttccattccattttaagttcgttgaagtaaggggctgtccttaagcaatctttgattctctacagtgcccaatacagtggataagacataacaaaatttagtaaatatttgttgaatggtttgagttcaataaacttaagactattgtgaaacttatagaggggataaattgttagactctgtaagtgaacagagatgaatcctacatagcttaacttacaattgagataagttacaatatccctgctgccatccattcataagagaagataataaaagctcagaagggacatattattaagaatggttatgaatataaagaagcccttgtgctcttaataatataatttaacatgaggctgtatatttgagcgcttgtcaaccccttgcttcccctcccacataatagttctttacttatttgcttcatttgttaggatgatattttaaagattggcttagattgaggtggctcacccatttaatttcattaagctatgattataaaaaatactataattctgtccattcattgattttgacaacatgttttttattgtaaggcgatttgggactgtgctgcaagagaaggtgaccttggtagaatctaaactactgtacttcttgacacagtgagggaaagcagttgatattggtattaacacaattatgttgttaaatgcatcacaggtgaggtatttaaagcaaattaaacaagtgacgttcttatttcataaatgcatttaatctcatgcttggctgtttttatggtagaattacagcaatggagaaaattaggcaagaacggaagaggaacagatttgttcataaacggacgcttagaatttgaacttaaagtgagtaaggagcatcaaaagtcaaataggacaaacagggtagatggtattcatggagacaaaggattaactgaggttattttaagactatttatatggaagggatgacattacatagggagacctccaggagtcctgactttgagccccagctatatcaatgactcacactgtgtaacctggaacaaattactcaacctctttgtactccatatttcttatttataaagtgtacataattttatatacgataaagttcttgcaagaatcaattagaaaagaggcaagaaaccaggtacggtggctcatgcctgtaatcctagcactttgggaggccgaggcagggggatcacctgaggtcgggagtttgtgaccagcttgaccaatgtggagaaaccctgtctctactaaaaacacaaaattagcctggcgtggtggcacatgcctgtaatcccagctacttgggagggtgaggcaggagaagcgcttggacccggaaggcagaggttgtggtgagccaagataacgccattacactccagcctgggcaacagagcgagactacgtctcaaaacaaaataataataaaataaaattaaaaaaagaaaagtggcaagaatggtttcaaatgtgaagtaacccatatttatgaggtagtattgatatcctgttgtaaaaaccttatcatcctaccatatttgaacttgattcattaattaactcagaaaatatttagtaagtgcaggcactgtattcattagatatgtaatagtgaatggaacagaagatctaattcctgctctcaagatacttatgatctaataagggtcactagttaacaaactgatactgaaaatcagagtttgtcttaatagtttccctttaacccacttgccagattagctagtgttttccatttcatctgcaaaacacattgactggcgtctcttatacactgaatgcctgggtagtaataatatctaatatttatacacaacacttaacaccttccatgaactgttttaagtgcgttgctcaaattaactcctttaatcttcacaacaaaaccttaattaatgtcattctcattttgcatatgaggaaactgaggcacagagaggttaagtggcttgtccacggttaaaaaggctagtaggtaatggatcaggattcacacccaggcattctggctccagagcccacagacttaatcactaggtaacaacactagcaggtctgtctattactgctctcaccagttgaattgaaaccttatttaaaggtcatctgtatttgttcccaaacatgtttataacagttgtactagattttttatgtaatttaatcaaatatcatgtaacatactagaaatgcaaaatacaaatgtggttttggacatttataaccaatttgaatatgctgataagacttaaggggtgttgcctttaaaaagttgggtgaagaaaatcaggaatcaggaatcaaatcagaaatgggtgaaagcgaagagtaaactacctcataaaacatagacatttgctgtagttggcctcatatgcctttatgctctcattttaagtaaaaataaatgaaagtggaaaatacagaaaagtacatatttatagtgagtgaatcactaccaaaatacaaagtcttggccctactgtaaacacttgaaaagtgaattaacatttatatattttaagttaaaatatatgtttaatatatatccacaggccaggcatggtggctcacacctgtaatcccagcacattgggaggccaaggtgggcagatcacttgaggtcaggagtttgagaccagccttgccaacatggtgaaaccccatctcaacttaaaaaatacaaaaattagctgggcgtggtggcacacccctgtagtcccggctacttgggaggctgaggcaggagaatcgcttgaaccctggaggcggaggttgcagtgagccgagattgggccactatattccagcctgggtgacagagtgagactccatctcaaaataaaattgtacacataaaattgtacgcgcgcacacacacacacacacacacacacacagatgatttttgtgacatcacattttgtcaacttttttgattaacctactaactgtcctgtaagaaagaaatattttcaaatacctccacttccaaacattagaactatggctggtgttgtaggtagagccatatgagtttctgttactgcaagagggtgaatcacagtatatttcttaaaggccgaaccatagaggatggattgtggttcccagtgtggtacacaaaagatagattgtggatgccagcatggtatgtggaggactaatcgtggctcacagagtagatttctttttattccacataatcaactctgttcttctttccagagcaacaggatgtggtagaaagaatcctagattctaatcagaaacagcctttctctatgtcagtgtgttcttggtaactaacctaacctcactgtgttcttgggaactaacctaaccttggcctagtttatttgaagttggcaatttcagtaatgtttttagatctaacatagccctcaatgaatattagttaaatggacctgaaaacactttggaaatcacaaaatattaaatcccatattttcatactatgaatatattgtttgctcagttattgttacatctattttattatacaatgattagctataaatctgtgagctccatgagattccagatcttggctcattaatttttgtacagacacctgcacctagccaagtgtctaggttcttctcatatatagaaggtattcagtagatacaatttatgtgaactaattagaaatcccctattttgaaccagacattttgatggtaaaacttattttgataggatataaaatattcgtatcattccagttttagatattgttatagaggtgtttttcttactttctcaaagtctactaaaattatcaaagaagtcaaaaaagagggaaaatattgtcatctccaagaaagcaaggaagcctcacaactgcaatgatacaaattacgaagtccatatattaaatattgaaatagataatcaaacccactaagagatgttgactcagacattatcaataggtgcctttcccccaaaaatatttggtagtttttgattaaagagagcttagtttctgcgtgatacataagaaaagtagagaataaccacgtagaaatcccgcctgagactctagaatggtagggaagggaagcctcagagggactttctgccaacaacctcgttctattctctaccactttgtctttcagcccaggcagtctgtcaaagaaggtggaagaagtaggtggtacactgctgtagggaaacttgctgtgatccatgcaaactccttaaataaaacaaacaaacaaaaagaaacgagggaagaactactttcaatgttaagaaaataaaatatttggaaagaagatgtttgagttcgtaagctgaaatagtggctgccaacttcctcagtacatttccagctatccccttcctcttcccctccccattgtactacttggtcagttgctatctcattcaaagaggagtagcgatcagaaagggaacagtggataaactcatgcataaaactaccattttctgtttcacacatggagaggaaaacaagcaaataaatgacacaagtgtatatcacaacaaatacgtattctaaaaatagggttcagaaaggagacagatgaattcaaagaagagagtatacagcaataaaagcagtgaaaacagaacaagagttcagtaaaaaatgaaaatggaaatgaaaaaaatgacagaaataaaatagacactggaagcaacacaaatagaataaacttgattgaaaacaaagtcacaagcatagatactaggttggaaaaaaatctgacaaaatgaaatgtgtatgaacagtgtgaagtttttataatgaagaaagatacggaagacagggaaaagagagacaacatgtacgtaattggtgatcctaagaatagggaacagaaaaaaatgaatcaataaaaataaaaaataaaaagaagaaaattgttacaaagatttgaatcttcaaattgaagttcatactctgttctaggacaattttagatagaacaatgaatactgagagatactttaaactgtttcctgaactccaaggataaatattcaaccagatgaacatttatggaaaagataccagctacatgtaaggagaataaaggttggctttcaatttccacgtaatatgagaacccagagaagcaattactacacaattctgaaggaggggaagtatgactcaagttttattttcagtcaaatatagtatcaagagaaagacattctgaaacaaaacttagacaatatagaaccctggagctcttctttaaactcatgtgcatgcacatacatgatgagtcaacatcagtagctcaagaatggaggaactctgatttaagatggttagcatcaaatctatctatggataaaaaataacagctttagaaattagagaatagcatataaatggtataaactatgataatgaaagcatgttaatgaaaatgattaatatgtgacaaggtaatattggaagaggtatcagttaatttccctaactacatagcatggggttaatagctactacctaatgttgaaatagacagatgattctaacctcctaaagtttttccattttttacctcaactttggagtgcccttgtagaaaagaaaacatgttttgggtttaagaaacgtttacctgaatttcagtttttagttcaaattttctttagtcaaattaaaggaaaagaaaatataacatttaaatattaaaatgcatatataatttgatttcatttttttcaaaattaaggcttatgtatgtatacatctctctgaccatttttctaccttggtaaacatttagctatgtttggaatgatgtttacttggtggtagagatggctgttttttttctgataaatggaatttggatgacttaaagtgaaactttctgaaacttctctttattacttgaagtttttatataggacatatatcatctcaatgaaagaatagtcattcttttaaaaaattacagccttaccaccatctcttctttagaatttttttccattagctactaaagaaagtctttggcaaatacattataaattttggaattgaagtacaaaataaaagagatcataggaacagtatcttctccaatattttaatctaaaaactaattttgtctagaagaatatatttcaagaatgcatatgttacaaacaggcaccacctgggattcccagataaagatatttcttaagttatatagtccataatctcacaggttatacaattaggaagtatacagtagttaattaaagctgtaaatagaagccaagattcccttcaacaaaacagaatgacataaattacaatttttgtgtaaacctattaccactgctgcatcaattttataagggatctatgtaagtctactgtggttataaatttaagaaaatcacttgtacacctgtgaagcactaaagcatgcatggtgaagaatggtaggaaaagaaatactttttctagtgaaatgattagtgcacaatagtgatcgacttctacaatgaaccaaaatacaaactaatgttgattctttgctttaaggggaaaaaaggttattttttacactcccccttttgtctctgtccttcatcacttgtttttagagacaaattctctggagtgtttataaaacagcagtcctgggaaaccctgatttagtgggtttttagaccttggggctctggggtaccttttcacaccccaaatggcacactgggaaggctagatatcagagatcaatctacatccttgtgagagtgggcctgtatcttttctgtattcaccagtaatgactttaaaattcatgcaaatcagaagtgcacatttggaaaaaaacttccaggatattacatcagagtaactgtcaacctctttaaaggaaaattttgattatactgagctgctttacctgcctattaccttccttcaaattaattattcctcagatttaactgtatggtattaatacttttaatacttttgtatcaagaaaaggaagtaatctgtactcatagccatcaacaagtataactgtgcttttaggagtactgtgtttgccgaggtcatggtatagttcagtataaagtgttttaatgtgactttttgcacagcacgtgaatggactttgaaatagcattgcatgtctgagaattctgtctctttaaattgtctgctttgcttattggaaatgataacaatgattgtttgaagttattattaatttttttagttttaacaaatcctaataaaggaaaacatatctattaaaaactgaaataactactcactgaaataaacagcaaacattatagatatacaactttaattttgaatggtagagaattttattaaatgaagagaggcaacttaatagagtattaaggacagacaccagatgcatttgacagatctgaatttgagtcaggttcttacacccattagcatttttgactttagtcttttcacctaacttctctgagccttaatttctccatgtagaaaatgaaagatgatgtctttcctatctcgtttaggattgctgtaatataataatatgtataacagtattgcttaaagaatattacctagtggccattgcagtgcataagaactggtaagatgccttacctggaaaatataagggaaaagtgttggtttttttaaaatcatgaaaagataagattgaaaatggcgtgtctttgctgctaattaatgattgctttatgttcatggagctgtaacatttttcccacctgcagaacatattatagtaagctctagttatattttctaggatcgcttttaataaaactttaacaaacactcgtgaattccaacaaaaatcttgatcattttacagaagtgtatatccaaaaccaccgtgaagctggaaatacatcaaagacgtgattacatttgtccaagttaagaggacaaccaatgagggcacaatggacagggttctttaggtatgttgggtataaattgtgataatttttatcttcgtagggttcctgaagacaagcaagtaggttttatgttttctaagatgaaaaagaacaatgatgctttttgaaataaagctttggagaaagtctgcagaataacaaaggttttcatcattctaaaatcataaaggcaaatatttataatttcctcacaattgtgagctataacaatttatattatatcaaataatttttaaatgaaaaatcaacctaaagggaaaaggggagaagatactatagagaggactgacctgtaggtgggcatctaggagatctggcaccgaggtggtggcatttctattttctctgggtttcagttctctacccatgaaatgaatgggttggactagatgatccctttcagctctgaaattccgtgaccttgtgacattcttcatactctgtgacataggaagtgcatcacacactgtagggttttccccttctgtcagtacagtgcactgcacagtggataagaatgtagactccagagccagagagagttgtgtttgacttgtatctacggagcttgtgatttttggcaagttaccataatttctttaagtttctgtttcctcatatattaaacctaaagataatgcctatagagttcttgaaatgacagaggaggtaatgttggtcaaaaccatggatgggtactcctggggctccatagtgggtttcaagggcaggtgtttatgaagccaggttctggggcctgatgatctgggactgaattccacctctgccacatgcaacctgtaggtccttgggcaaattacttcctcaagttctgcttccattttctcttctgtatgtatggttgatgataatacctacctcctagggttattatgaggattaaattagttcatacatataaagtgcttagaaaagtacctggtacatgtaagcactctatatatttgctatcgtcatcattatcatcatcattattaaagttacacatagcctagggtgaaattctactaaaaattttagggaaaaaatactcatttatattatcaccaacatgtacatgttatggaatagaatgaaagtttccataaatattgacagtaaagttttaagtttaactccagaaagacaatgcagcactgtaaagcactttctggcttcctaattgcactctatgggtaaatttctgttttttcactagcaattgtgtattctactgaatttgtaaccttctgaatagtttattattaaaaacagaacaggctagcttttttttttttttttttgagacagacttttgctctgccccaggctggagtgcagtggcatgatcttggctcactgcaacctccgtctgctgggttcaagcaattctcctgcctcagcctcccgagtagctgggactacagtcacataccaccacacccggctaatttatttatttattttttgtatttttagtagagacggggtttcaccgtgttagccaggatggtcttgaccccttgacttcgtgatccgtctgccttggcctcccaaagtgctgggattacaggcgtgagccaccgcgcctggcctatattgacatagttgacaaataatcttaatttcagtttaataatatgagattttatagatttatattgtagattctctattatattatagttgtctaagattcatggtaaatgtgtttttgaaaatgtcaattcaattgttaggtttagaagaaataatgttaaccataaaggagtataatttgacaaatatttaattagtatctacaaatatgtcaaactctgctgagaactgggcatacaaatatggatatgctcaaatcctttctgtggaggagttcagcatttggggtatggcaaacattgttggttggctgagtcgaaagctcttgctaacactcttctttcttgcatggctatacaaaagcattggaaaattcctagcagctactgatatgtgagcagaaacttgctggaagtgatagtggtggtggcggtggtaaagatgcttctgttttcttattaaaagaggatgattgtagctagtgctccccccactcttcttcttgccttgagcacagatctaatacctacaggatagcagccatctggggactatgaggtgataagccaaaaataattggagagatattaggcatcattaagtcagcaatccaacattaggtgacactacttcctgactttttattttcaaaggtaaatgataaacccttttatattttaaaacatattttaaaacaattttaaaacattgttggattttctgttactgtatccaaagattattctaactaatgtgggaaggaggtatatttgcctacatacaattatgagacatgttagttgctataactataataataacttttctaaagaacaatatgtatttataaatgatatgtgtaatcttctgctttagtgcatatgcgtgtgtgtttatttttcttgtaatgccatagtactagttagagtatgataaataattctccaaaagcaagagtcacaatcttgaaggttctaaagagccctgactcagaaggaagagatatatagtaatggaaggacaagtttgaatccctaaagcctccaggacaggtagctgaagaagaatctatactagaatgacagggttcttgcttagatccaagtttcagaaccagagaatgccagagatgaagaggagtgaagaaggaagaagagacagtacgtacaaaccataacatagaaagtctctgatgcaaaaggatatgtttttagccactcactccagatggagaggtgtgacctgggaaaaggaaataagagatttggtgacagaggaatggagtaaaaaagtctagcaagagaaacaagagactgcaaactgctcctgttttttctctcaatctacaaccatcaaatagaaaggagactaaagagataataacacaacaaagagctgtataaaaaaatcacaagagaaatttcccaaaaaacattggaagattaggataaaaattacccattcgctcagggaaattatactagatatgatacggacaagcaaacaaacaaacaaacaaaaagcctgaaaaaatatctatgagaatcaaagtagaggttcaatgaaaaacagatgaaagaggttatgtatatcaggagagaaatgggagagaaacacgaaagctttcatagacaaaaatattagaagcaataacaacaagtggaataaatgtgactgaaaaccaagttagaaatatggagaaaagctttgaaaaaaatcccataaaatttagttcaaatgcacaaaaacacaacatttattatgggaagatgaaagatgtggaaaagaaaaaaaagggatccaatataaatataatttgtattcttgaatattaaaatagtagaagataaattcctgaaataaagacttacatatgattttaatggcattctgtatcacggtaaggttaataaatattaaaaataatgaatacatgtatgtgtttattcagcatgaatatcaagtcacatggaagagagaaaaatgaggttagttttcccacaggtttattaaataccaaaatcctatagaattatgtgtaaaaattctgagtacaagaaagtatataccaaggttttatacccacccaagttatcttttaaatataaattcaaatgcacaaacattttcaagcccataagaagttacacaagatagtataaaccctcattaaggaaaattaaaacaagaaaacactgaaaaacaataaggtaaacaaagacttaaaaagattcttatgcactggggccttctgtcttattttgctgttttgaatcctgaggctaccacttgtgaatatgcctgagctagcctactggaggatgaaagactacatggagcagagatgtgctatcctagctggggcttctaaatccaacaagcttgtaagagccagacaaatgaatggggctatcctagaccatcaatccccttcaaaactggcagatgacttcagagatgagccaggccagccccgatgagaattgccttgctaactcacacaattatgaacaaatacattattgttcttataagtaaaaaaaaattgaatagccaccctgtaaaaacaaaacaaaacaaacaaaaaagctgtagtgaatttcagcctactaagaggtgaatcaagacaaacaattcaggtatggagggattccaactaaaaaactgaatataaatctttaatcaatgtaaattcagaacgaaaattaaaaaccatgagcactatggttattgaataaaatagaaactatgaatgaacaatgaaaaatataatatcaaattgatggaagttaggataaaacattaatatgttcatttcttcagcttttatagcaagtaatggtcccaactttttaaagcataagtttttcctgaactcatcaatattttattacacaatacattttggagtgttaagaaacatttatctctactgcaggataaagatgggcattaaaaaaaaacaagaaaaaagaaacatctcattttttagtaaattcattaatttcatttaaagttcttatactgtgattaattcaagtatagctatatttaatatggtacatatatttaatatagtgtgggtagcttgagtccattttaacaaaactgatcttcagttcctatccacattacctgttggcctttcttcctctgtagcttcctttgtatatatttttatcaaaatatctgaaataatggctattttgaggtgaatggtttttatgttatgtgtaacttttgagttacttgacaattttttgaactttttttttaaaaatactatttttattaatatattcagtatggaatagaacctttctactatacttatttgtaataaattatggattttaaaatggtgggaaatgttgagtggtctttgaaggctgtaacatttacagggaaacactggcaagggtttcagaaaaaagcctttaccttatgttttcaggttttcccttttactggatatcattttaagattttagattccaagtttgacctaattaaagtttcagtggcagttgaactgcctacagtgtgaaagtcctgcttgtcaaatattttatctcttattttagaaatgaaaaaaatcatgataagtatacatttaagggctattttatgttaaaaaaaaaaagtcagattgaagccaataaaaagttggtcaagggtaatttaaaaatcaagaaattattttaaagttagctactttaatttcaatatccaaatagtgggagaggaaaaagagccaatttgttaattccttggaaatacatggtgagtcacagtctaatttcagttcaatgtgttgatgctaaacaggaactgacacccaagaatttgaaggtaaaatctggtttaggagtcacagaggcataattgacaatgctcttgaacctacagtgaagaaccaataagcaatacataatttttaagactgtaagctgggtgtggtggctcacgcctgtaatcccagcactttgggaggctgagcagggtggatcatttgaggtcaggagttcaagaacagcctggccaacatggtgaaaccccatctgtactaaaaacacaaaaaaattagctggacgtggtggcacatgactgtaatcccagctacttgggaggcagaggtaggaggatgccttgaacccgggaagtagaggtgtcagtgagctgagattttgccactgcactccagcctgggcaacagagtgagactccatctcaaaagaaaaaaaaatttaagactgtaattttgaggaaataaagagaacaaatgtatcaaacagaatttgaacattcaaagatatttattttaaatatttcaccattaaaatgtttacatcttatagtgtgctgatggcatcataattactcaagttttaaatgaatttaaatttttattacataatttgtaaactttataatacataattctgaatctcttaaataattgagacttctactttagcaggtagaggttgaagttataagagaatagaaaacatctgggggatttgtcccaggaaaaagctaagtttttggaaatagaagttgaataaactacaaagcaaatgaagataaaattactcttttcaagatgtagagtagtatatacatagcacagaaagagggagaaagagaaggggtggagggggatagattctagcttcgacttttgcaaagtttattagcaatttggtaagacagatactttaagaggcttaagcatacctctttatcacaccacttaatagttaagtggtgtgatgtagagaagagagtacagctttggaatcaggcagaagtaaacttaaatcctgactctgccacttcctgtctctgtgactttgtggcttcactttatgcaactcagcttccctgcaagaaacaggcacaggagttcttaccttgcaagatagttgcaaagttgtttgtaaagtacctggcactgtactgttcaacaggtggtagataattactgtaataatggaataatgagataagatgctgaataatttcaaaataaataatcaaaaaaatcatggagtaggttgggtgcgatggctcacgcttgtaatcccagcattttgggaggccaaggcaggcaggtcacctgagaacaggagtttgagaccagcctagccaacatggtgataccctgcctctactaaaaatagaaaaattagccaggcatagtggcatgcacctgtaatcccagttactcgggaggctgaggcaggagaatcacttgaacctgggaggcggaggttgcagtgagtcaagatcataccattgcactccagcttgggcaacagctcaagactccgtctcaaaaaaaaaaaaaaaaaaaaagatggagtaaaataaacaaaagcattacttttgcttttgcttgttacatttagagattaattgcgatttgagaccacatacctttttttccgattcatcagatatattcacctttgcctcctcttcccttatctattcctttcttcagcaataacactgggaagtcactagtctacaaagctccctcccatataaaacctatggcctatgtgatcacaggcacaatgaacaggtgaagaaagaaataattttgaattaggaaatacaatgaaggaaatgaactaggaactgagatagagaatgtctgcttgggggaagtgatttagataaagtgtatttagatcaggtgttttctcccttcaattatgcctcttccacattgatgaggaggttggtaaagatgtgaaaattagtaaggggcagagttttaattaaaggtcatcattttctattgaacagcaccattgtctggctttggaaatcattttctttaaatggaataaataaaagcagtaaaatgtcaagaaaccactttttaatttattatccaggtaaaaaagcatttctctccattggaaaaaaaataatccataggaaaaggagcttgtaggaaaaacaccaatcccacattgtgtactatttcctgtttttgtgattatctctatgaaactaccttgagggtttggcgagtaaatagtaacaaattcagtcttactaattttgtccttttctttgggggtaatacagcctaacaacaaaatctgttcttaaaatactgcgttctactagagttatttcccttttggctggaggaagtggtggctttgtcagactgaacatacatagttgtatatgtttaaacaaagcatcagaaacaagaaacttgcagagttccccaaaccaggaaatattttataaagataatgaatagcaaataattgacatgatataagttaaaaaggcatttatcagtgagtatactagtcttttgaaagcagtatttgttagactaaggatttcaactacttgccaatgccatcagttatcttgacttattgtaggattagttctgtagtcctctattagaacggatcaaggttacaggcaataatgatggtttccactgaaaaaaaaagccacaaatatcttgtgtttcaaaatttctgtgatcagcattttttgagggaagaagcattatgggaagaaaaagctaacagagatgaagtatcagacaccatgccatggggctgtccttacatgtgtcatcattttaacagggaagcaagatacatttctctccttttctcatcctcatcattaccatttaattttttgattcacatgaatattgataggtggcttgtggcttttgtccatgttttgactttctttaaagacaggaagaaattttataaagagtcagacttttaaagcaaaaatctttctctgaaacttttttgtagaaatcaaaattcaggccttcttctcaattcaatgaccctgttaattaagtatttgtcactactcaaatacatggctgatacacagccatggctccacagccagatcttggcaggtggctttttttttttaacatcaaaatgcaggtaagttatttatgttaggtgagaaaactggtttgattcaatgtccacaaatattacctccactcaatatttgtaattgttgcttcagaatataagtcctttgagtacagaaattccagacctgatatagaacttactcatgcaataaaaaacatgtgcaaggtatagtctcacagtttattctcttccgttttatgctgcactttggctgatgcattgcaaatgtatgttaaaatcaaccaccctctgctagagacaacacatgaatctattaacaaaattaacctctcaatttgtattgatttctccagttaactggccagaatctaactagtctctagaggaataggacctgggcagtcaaattctgcatgaagacagggacacccaaatatttgccactagttttatgttaataagactcacttgaaaaagtaatatgaaataggtttcatggttaagtaagttttgcaattgcgtgagttaaatgtagataaaatatttctttacttcaggacttataagagccttcagtatatgaatagattaggagaatcctaaggattgggaatatagtatgcaaagtttcccaaaagtattcgatcttggaacctctccgcactctgatttttttgagcaatatcccctaagactgaaatacttggaacatactatgggaaatattggtgtagggcttgaagactttgtacagtatgtgaagctctttttatgccaggaatagttcaagattactcagtattagggttaaagcagaagacaccaaagaaaggagattggccaaaatggtcaggaagtcatggacattaatttcgtttattccccaatattattagtcataagcataggcactgtgcctgaataattggggcagtctgattcagcaggcatcctggtaaggaatgaagtcactgtggcgggatgcatagattatttcaatggaaaggggcattgtaattatgtttgagtgttgtagctaaaagactgcatatgtttgttagtggcctatgaacataaccatggcattataaatagtatcataattaccgtgaaagcaatactgcatctgatgaatgtattttattcggcagccacaagtcttacgaagagtatattttaggtaatgaaaacttgagccttggtatgtttagaataataatgatactaagtttttatcctttcctagtctagtttattaaaaaattgttttttatttatatgaagacattcataatcaaatacatgctaaataaaacctaattgtgtttatttaacccagcaattatatatgaaatatggccagtgactctggaattaaaaaaaaaattctgcttggtaacttagtactatattagcctgatttttggaaacaagttttataaacaagtaggcatcctgaaatacatggcccagtacccagctagccattagagccattaaacacagctctgagataatttacctgtgttcattgtgtcaaaggagtaatttagactgtcataaataaacattttcaaaggaattttttttctttttgttttctgctcctcaaccataaataccagttaaattaaagtagctcttatctatggcttggatttagattcaaccttgtagaaagcattacttttcctatcattaaaaattaaaacatttctcacttttacagaaagcctttcaatatgtatagaatgtaaacaatgatcctagatgacttgcactgctctgagaattagtagttatttgaagttatttgtccactgagggctttggcaaaggcgagggcagtttgatatataagtagaatattatagataagaaataattacttattgttttgaaaaagcttcccattcgactctgtttaagagaatatgaggaaaattcaaaaaggggaaattagtgaattgaatccatttcaagtcagagagcttagagatcattgaatccaacgatctcatttttttaggtgaagaaactgagctcctaaaagttaataaagcttgagtatggtcagtcaaccagacggtgacctcctcggaacctaggtcttcggactctaagactcatacccatttctgcactctctgcttcctcaatgtctatttcccagccatggtgaagccctgactgaaagagaaatgcctggttgtagcaaatgtgttttaggaatgagcaagctccttggtaatgatgacaaggctaaacagaaagaaaaggaagagatacagtcagtagaaactggtgggtttcttttcctatagcacccttttttattacatgctttgagatagtgtgagtgtgccttttgtgtccttgatgtgtgcctgacaagatgtatgtaaatcacagttttgtaaattgcattatgaatacaattaggatccactaaagttgtcttgtggtaactttctttataaaattattctttttgagtattaaagactaaatttatctgttggtaattctacatagtaatgatatattataaggttttttaaaataattagaaagttttacttcaagctggtgaaaaattctatattcctctaaattttccacctgtctgtgccccccattcccatttccccatccttctgtcccccacccctgtcttcagctcctacttcacctttttggttttaggtaaatttccatgagtacctagcattctagaagtgaactcacagcccagattttatgattttattattagtttatttaatttttttctctttttttttcttttttttttttttagacagagtctcactctgtcgtcaggctggagtgcagtggctccatctcggctcactgcaacctccgagtccctggttcaagcgattctcctgcctcaccctcccgagtagctgggattacaggcacacaccaccacccctagctaatttttgtatttttagtagagacagggtttcatcatgttggccaggatggtctcgatctcctgacctcatgatccacccacctcggcctcccaaagtgctgggattacaggcatgagccactgcacctggcctatttaatttttatcgtcctttcttggactattccttcctattttctctctctactttcgcattttattttttaaactcaacagaagagtttgaaagctgctgagtcagcccttggtcactttccagcctgttgttcatgagtaattgactttggctagacataccaaaattaaattctcagattgccttagcttttacagaattgcactggcattcttctctactcttcataatgcgctccccatagaattttattgtaattgtcaggtgtggggtgagggaggacttgtatttatactaattgactttacatcaagatttcttctattgaattcatatatctaattcagtttaattgaatgtaaagactcctgtaataggaggcagcagatctgactcctgtttcctgggtaaattatataagttcatggtttctttatagatacagaggttggaggaggtgattggtgtaatttttagcttgttgtaattttgtgattactgaactggccttaagcccaattaagtggaagaccttgtgtaagtaggtgttgtctctcatagaactaactaggtagcagtcaacatcatcacaataagtagatcggtttcatttctcctgcatttaaccttcttgtgccaattcgccatcaactttcgtcatcagctgtcttgtctattgggtcagcaagagtaagggcagccttttcttacctcaatcactcaccaattatttatgtaagaggagtttagaaatctattccaaatggttttacttctgcagcacttagtaatttatctaaagattcttgtaaatgtttctcttgagctcatatagcaatcttaaaagctgtcttcaggaaaccagatctagtcatctggaaggccctatatttttacaatagagccttccagagttgttagaaatatggagaaaatgctatcatgatcatttccatgtatactaaagcttcagtagttttaattgtgaaaaacagctatcccataaattgaagtgttagtaagacaaatggatgcattgtattaaagctgacagagcagtgactgggaaaatctagtcactgatctaaagccaacacaacaaatcagatgaccttcaatgacttttaattacaatttctgaatacattgctgttattaggaaaacattttaggaaaataagactagaattagtatacaaatcagaaaaattgatggtcaagtaatctgtcagtgatataaaattcaactaagataaattgataaaatacagtaaaattgccaattgttttttgcttaaagacttatgaaatgtacattattcatttctactttctatctaagttaaggcctatttcatcccaaactaaccctgatctagtttatgtttccggaagcaccatttataggttggcatttaataggatttcttttgtgacctaaaagggatgcatgctgtctgatcacctctatagttagaaaagagagacaatagtgattgaagctagaagaatggattttatggcataatcatgttctgatccatacaagatgacaacagcccagttttctgtgtaatacaaattgatgatcttaatttaattattagatgcttacctatccttgattatatatttttttcaggaatcccaagttttttcttgaaaatgttaggcagaaggcccatgataatttcagattccagtgtcgatttagcaatgcctatttttaattaattgatttacatttttattcagtcacaggtcttttaactgataccttttaatgcataaaatcatgtttaaattcttgaaataactgaagtcttaatgaaatatttgagtgcaaaccatcaattgaaaatgataaataaaagtagtacaaatatctttaattttgaaatatgagggttttctgtgtttctatagtgttccaattttattaacttttgccctgtcttccgttttctttataactaaaatagtaataaatacatttctaatttaattgtcttatatgcacagaagttctgagtgatactgaatttttggtgttgattgagatttgctttatgtatatgttcagttttaaagcttattatgtatttaagtgaatgtgtgttctctaattgtagggtccatggttttacatatagccattggaacaaacttcttagttgcattatttgtatctcccacaatccactaatgccttctgctgcctgatgtatcagttataagaaaagtgcattgaaatctcccattattgttgatctgtgacaattgctctttctaatctcaattttactttgtatattctggacaatgttatttctcacatatgagtttggaattactatattttttgctgattccttctttattgttccatagaaacttctttatttccaatgtgccttttttgcctctctacaagtgtctcactttcttctgttcattgtcattcttcatctttttattttcaacttttctgtgtcattgtattttatttgtgtgtcttgcaaaaagcataaaaatataatttgcaatatctgtcctttacttgcaaatttagtccctttgtatttattgggttattgatatattttgatttatgtctacattttattttgtgctatgcttttacattaactatgcttcttgtgctttaaaaaatattgttctatcttctattttgaattttattcctgcaactagtactaaaacaacagtgtatgctaagtaaacatagagtaaggaggcacttatttctgcttatagaaaaagaattgtagcactggagtatatgggaaggtagatgagacataaatctggtgagatatgcaaaggctgtgctaaaatgccgtgttaggaatttggtttgcatcttatttatgtaggggaatggcatcagccatctcattttagaaatataattacaattgttgtagaagaatgagctggaatgggggagaaatgaggggatgaaactgagcctggtgggcagggaggccagttagaaaaatcactgcaataatccaagtgatgaatgatgaagcagtggtagtgaacttgaagaggaacaaatagatttgcaatatattcaggaggaagagtcaataggtcttaatcaccaattaggagtgtggggatggagtggaatggatgactgtaggcttctggcttgggtgattttgtggatagttgagccactaattaagaagagaataggaaatagcaacaaatttgaggacttcctctgcctggggaacaattctcttatagattgttatgacggaataaggtataagattatttaatgaggtatttagatgacaaacttgcttgggaagaaatgtgatagaacagagagatggtgtcctaataatgaggggaagaacatccagaaccctgaatttaggaaaacagtgtataggagtatttagttacatgaatacatattaagagatttactaaatagcagggatctaaaagttttaccagagcttatgaacagacaagaatttggtttaaactgttctagatatgcctttgaaatgttattgttttatcagttgttagattaaatcatgcttaaagtgctagttttaaaatgaaatctgattaaaacaatttaacacaggtaaattaatttttacaaacaagaaagaatttgtggtcatttggtaataagtatttcctgctcagattgtatcagtcacattcatttttataagagattgtatcagtcacattcatttttataagacctctgcctatgaataggatatgtgagtcacaactatggaaaattaggcctctgaaatgctgaaataatacaaagggttgttttgccaaatgcttgacactaagcaaagacgaaaaagctgtttgatgtgcagatcatcttctgctcttattcttgccatcacatctaaaagttttgggaactgtttgactctctgttagtattaatataaacagatctataactgctatccaggcagctaaatgtctgtcttattcttgattatcttttgcatttaatccaagataaaatattaaacctcttgatttaatgtcacaaaccagtagtactcacaaagctgaattacagactgtcaacaggtggataattgctgaacatttacagatgttagttcacatggaattgtttagaattactgtgtttaacagtgtaattgtagagcaaaatttcaaatgctactttagataatatttttgcacatacccttagaaattttttttccaataagttgagcaagcagaaaactgcataggcgctaattaactcaaataaacacataagtgattgacacaaacatgcttttttttttttttttttttttgtagagacggagtctcactctctcacccaggctgaatgcagtggtgcgatcttgacccactgcaacctctacctgctgggttcaagcaattctcctgcctcagcctcctgagtagctgggactacaggcacgcgccaccacgcccggctagtttcttgtgtattttagtagaaacagggtttcaccatattgcccagcctggtctcaaactcctgagcccaggcaatctgcccgtctcggcctcccaaagtgctaggattacaggcgtgagccattgcacccagcccaaacatgcattattaaacaagcttatctttgagatatattaatggcactcttgctctttttactttgttgcacagctactaagttagatagataattgctttgattcaagatgcgttaaaatttttaatgcatttgttaacatctctaattatataatatcagtctccttgaaaccattaaacttcatttatcaacagagctttgagacctacttgtgcaatgaagtagcttaggcaatagagagtaagatgaaccacagttcagtcctaagtagttttcagtttagtaggataatattacaaaatatgtaaataagtaggtaaaataaagcgtactaaaataatttacaagtgattgtgtaggatataatagtaaggtaatgtgaaaataatttatgtttataggatacaataatgtaataaaccactgaatacaatgtctaatgcaatatcagtactccataaatattagttcttattagatttatgaaacaaagatggaagtgtataatttcctctgtggatttcaggaaggtttgtagaggcagtaatgcttgtattagaccttaagaatgagtagaaattcatcaggttaaaggcaagtaggggagaagatttgaagatcttttaagcagaaggagcagtgtaagcaaagctacaaattagtgagactgagtctgagtcttagttgtctggcatggataggtagcagatgaggaaagaacctgaacttaataaaaaaatatagagatgtagacaagagccagggaataatgttaaggatttgtaatttatcctgcaagaatattggtaacctttgaaaggtattaaacaggtaggtatgggtaactttatctgcttcgtgttttaaaaagatcacttggtgaatgtttggagaatggattaaaagaggtacatctagaagcagggggtcctgctagctgactgctaccatgggccatgtaagagatgatgaggacttgaaccaaggctatggcagtgggtatgaagaaaaggaaaaagatgagatcctgtgtaattcccaggacttggtaaccaatttgatatgagaagtaacagagaggaaaaagtgtcttcagtgacacccaaggttctgtcatagaggcctgggtggatggtggttctattcacggagagagaaatacaaaaggaggagagtatggaaatcatgggttatgtttgagattatggaatgtgcattatttctgtgacattcaagcaatgacacctcagaggaattggaaacatgggtctgttgctcaactgacacatcttgggctagagatctagatttaggagtatttagcatatacttggaatgagaaggcatgaactctgggaaataccaggacagaagtagcaggaagatagaccttgtggagagttccatcttggcagtgtgttgtggtattagctgagcccatgttttccacttgttgcatttgggtttcctagttttacatttcatattgtaacatttggcagattttaaataacttgtacaatgtatagaaattctcaaaggactgatgttttgtaaaacttcttcacaataattattagatatacaaagccctgcagctgtattctataaatagtattgaatgtagtgaaatagtcatcaagctattccttatcttaatcataacttgaaatgttgaaaattctgtttggtggtaagtcatgattttgtcagcaattttcacagtgtcagatctgcccttgttgagagtaaagaattgaaataatgaactttaggtatccttggtacttaatgctatttttgtatcatttgctattgtaatattacttcaactgcttttttcctactttagaagttcagcatgatgcaaaactaggaattgcagatatttggtaattgagggatgaaataggaatgttcttgtgcttttaaagagactcacactgagcttcattccatttattaagtgagctaatttgttccacactgtacctaatgtagaagcaaatttcgaagttattagctaaaggtgtgattagcaaaggccaggcaaacccatttttaactacgttaaatgtccgtataaagcttggagagcattttcctttcttccttctttcttttcatcttttccttttaaccactggagtacctgggtagttgctcctttacattacttactggtttttatacgagggaccttctataagaatatagtgatggcaactcacttactacatgaatgctacttatttctaggagcttaacttggttaagatagtttgacctggcatgattaatatttacaaatggaaaattaaatcttttacttcagtttttattcagtctgttcaccaagttacattgtcctgctatatctggcagtgtacttggtgctatcagaagacaaaaagttaaaacatttgcccaaagagcttagtctaaatgttgggagaaacaagacaaaaatttgtctaagaataaatcggataagaagaaattataaagcttagacgaaggacataaaagaagacctaaccaaatttgcaaaacaaaatatatttattagaataacaaaggtcataaatattttaattttctccacataatccgaaatacaggctcaatgaaagatggaggttttatctgtttttttttttttttcatttatgtatcattagtgcaagagcatagtaggtactcaataaacatttgttgaagaatgttatctgaaagttcactcaaaaatcacattataaaatttggatggaaccagacaagttaattctaaaatttatagattcatagttggaaggaaaagggtccaaaatggtgttgaagaagcctaatgaaatgataaggcttgtcctgccagaatgcaatagattgttatttccaaagatgatcacaacactattttccttcccaggtactttttagcaaagtgacattgccactcccccatcaagaggtgcagtctactttaccttcttttaatcaacttgtaggaatagaataaggcagaggtggctttgagtgatgtctgaggctagactttaagacatctgcaatttctgcctttgctttttgtaatatttcttcttggatcccacctatcatgctttccaaagctcaaatagccacatagagatacccacatggagaaaaacaaaggctttagttgaaaaccccagctgagctcccatttgtcagctagcactgtggtagtcaaccatgcgaatgaggctattttggacctcatgatcgtccagtgcctgggctgataccatgggaaacggaattttgtggctgcccacaaaatcatggaaaataatgattttttagaaaacctccactgttttgttttgcagcaataaataactgaaacaccaatccaaaaaacttataaagctataacaattaaaacagtataataatagtaccgggatacaaaaatggtcaaattgaagaggatacaaagcctcaaagcagtcctcactcataaaagccttgttgtatcactaaaaaggcattaaaattgagaagaaggaagaactagtggattaattaataaatgagaagtatccataaggaaaaattaaaattagattcttgcttcacattatgaaaaaatacaaacaacagattgattaaagacttaaatgtgatcaacaaaatgttaaaactgtgataagaacatttaagaaaatagttctataaccctgggataaaacattttcatccaaggcattaagtgttaaatgaaaagactgatacatttattcattagaatttaaatttctgttgccattaaaaaaaaagtaaaggacaagccacaaactggaagaacatatttgtaatgcataaaactagaactgacaaagaattttttattcagataatactaagaactcctaggaacaagaagaaggagaaagaggagtggaggaggaggaggaggaagaataataggaaaaggagaaggagggagaagctcaaagaaacaacaaataggcaaaggatataaacagttgatttacagaagtgcaaaaccaaaggacaaataaacatgtaaaaagatgtttagcttcaccagtgattagggaaataaaaattaaatcaataataaaattgcatctcacagccattagatgataaaaattaaagcatgacaatacatatgtctgggaggtagagaaactggaactttcattcactgctggctggaatgtaaattgatattagttctttggagagcaatttggcaacatctgataaggctgaggaagtccatatcctaattgttgacgttcacaaagagacatacaaggatgtttgctgcagagtgactggatcaaatcaaccctgggatttatacggtgaaagaagacccaagacagaacactgaaaggggaggtatgaaggttaatggccaacaggagtggtgaatagatggccttcttttctagaatgagatttctttggtataaaataatcataactgattaaatgaaagtatttgatattattctggcatatatacagaagagactagaaaactagaaaatatcctacatgtgatatactttatgaagtttaaacagcacagagttctggcaaatgttactaatgatgaataaaatattttgttttctggtgcatgcctctaatcccagctactcaggaggctgaggcgggagaatcacttgaacccaggaggcgaaggttgcagtgagccaagatcacgccattgcactccagcctgggcaacaagagcgaaactccatctcaaaaactaaataaataaataaatttgttttcactgagtctacaaaatgttttatttgttagtgtactttataatgtttaaatatacccttttaaattacttcaaaaatcaaaataaatagagataaaacatgatggtgttacctgtgatttagtgttgatataattttctgagtaggctatttatgttgataaaatatcctttaattttaaaaaggattatcttaaatattatttcagaaaagcaaactaattcctggacattggcacttagaaatatatgtcttgataagtaatgtgcagatcatttaaataacttccctcaaattatactaatttgaaatatgaaaatttagaaaacctggcatagtgacatttttacttccctgaatgtttgaaaagttggaaaaactccaaagtgctgctcatttacaaaacccctatgttgtgtgcttttagaacatctgttcttcaaggtcagaggttattttctgaaggttcttctgcagcgtgtcttgtaagacttgtaccactagcaaatacatttccatcattagcagatatttgtttcaccaaaatgttcaatacatgccatcatgattactcaaaaactgttaaatgttcataggaataatgatgctttgtttgcctcaccattcaaaacaaattaactagagttctacttggtctactgaaattgacatgctaaagatgcccatgatactagtgaaattttacttccttgaataggatatctgtattggtaaaggacagattttggttacataattcaatttatgaacattatcaagtagtgagacataaaattccagattatctacatgaatctcaacaggttcaatgttaactttgctataaacatccattatccacatggtgtagagaaaaggacacttatctggtccacactggctcctaacttgctgagtcatcttgagcaacatttgacctctttatttctcagttaccttgaatgctaaatgtgggtattagactagaactagatgatttctagttttttccataattctctaggcatccatgtacaaaaaaatctaaataggttccgtctgcaaacatccctggaataatatggtgattagaaattccatatgcaaaatatgttcaataatgggtgggttgaacctctgtgcatctttcttatttaaatggaaacaaggatgtggttaattcagcatagaggagaagaactgtggtagcttcaaaggatagtactacagtttcagagtcccttcacctggccacagcactacagtgttgagtggctgctgtggatattgggagacaatgggacacattggccccacctcattacttttgccatggaagagaacctgacttggttcatgaagcagattcaactgagcaagagaaggaatctcataacagcttaatgatgtctactgacaagcttgagtataaactcttaaagaaaatgaagacttctccaacccatctcatagtgagatgagcttctcatctgttttatgcaaggattattattgcatttctcttcgtataatatatatgtgcctgaaaatgtgtgtataaactaagatattgaggtggctatcttaattttttaatgaagttcaacaaatatttcttgaacactaaatgccaggaactgtggtaagtcctattgccgctaaataatcatagagtaacttctgttctttgagatctactctagtggataataaaagcactcaagtctgtttcctggatgagctcagaccagcagccaagtatgataatcctctgtgccatgaaaatgaattttctgaggaaattcactcaaaaacccatctagaggtaaattcttttaaaatttaaataagtagtcttattatgtaaagactgttacgttaggtaagctattcactcatatatagaaaaagttctttcagtatgtatatatatacacatctctttacccactccttttgtttgttagctaacatggatatttgagttcatacatgtatcaggctaatcccacatgaccaaacatatataacaatcaaaccatagtgtggcatctgcagcactcattttattccacaatgaaataaaaatgaattcagctattaaagtagtctaattctgttatacctacaaatataatcaagaagcaagattttggaacaatatttttcaataaattttcctctgccacaatgcttgtttctgtggacttttagggaataagttgacatatattaaatatgtgagaactttatgctgtattctaaaataacagttgattaattaaagagttaaatattgacccctaggagggccctctgctacagtcaattggagaaagaagaggaataagggcttggcattaccttcaaaaagattttactccaagtcggattcttcatttcttgctgctagacaagagccatcaaagtaaaacagatacaatttccaggaaatacaggaaataaaaaaacactttttcttgctatgagaggtaacgagactgataaaagagaggtagaaaagggattttttttttttaagtgagaggaaacatcgaggaccaaagcccaggaagcacccggatgtgtaaggaaatgaagaggaagatgatccttcagtgagtagtggagcaaataggggaacccggtgtatttaagtgtgtgtgtgtagggtggagagaaacagggaggagggcagagtttcaggaaagaggtttataatgatctattgattatattattattaggaaatgagaataagtaggaaaaaaattgcacctgtctcctttcttcttagctgtggtctcattttagttcctagtattcagaggtgacctaatcagactgcagaatgttctgaaaggttttaaacatgaactgttggttttggcaatcagaagcactgacataacatagtgtatcaaacaaaaatatcagcttcttcacaatactatataaaataatgcatgcaggtctaaaaatagatttaaattcagaataaaattgtcaaagtgactgccaaataaaaacacacaatacacagaagttggagcttttccactcagtaagaatgactgagtttgtggaatgtcagtaaaagatgtatactttaactttagatgagtatttgtgtaatagctagaaaatcattgtattggcttaaatgttgctttgatgaatttctaccaaaatcataatctctgttaaattagtaaattccaaatgagctaaattcaaacaaacagaaaacttgaatataatcctgtgaatataatcctacctcaatgatcctgtgaggtagtattattttggggatcatttttaaatcaatgaagatacttgagtttgaagattaggaaacctgatccaagtttatgatgccagcaagttacaaaggaattggaaatttgagcttagtttctgtcttcaaagcctgtgttccttcatgatactatacagtctctgccatcctaaagaataataaattattgacaaaaagactaaattatattaaataaagttttgatactaaagcatatgattatattctaattccttataatttggtaacccacatttgttatgatagaaatgtttttaaaagatcatttgaaaaattgaaaacctgattttttaaaaccctctgcataaaaaggagttcctttaattcattgtaaactaacttaaattgtaaagccactgattaaatcttaaatctggatcaaaatccatctttgcaaaatttatccaaatttagttatcatgagctaaattcacagaaatgaagtagttcataatttttattttgccagcatcttaccttatgtttatattctatgtttaaagtgtaatggtaagtctttgaatggaaaaatggtgttccaaagttaactatacaaagcttaaggacaagacatttcctcaatgattcttgggaatgagacagtagtaactggatgaattttcatggcaatgaggtaaataacaactggatgagcctctctttttcagagttaactggaaaataaattaaacaaacaaataacaaagtctttctgggcatctcggattgctaagaccccaagcctcagcattttttgactcctttctgattcttcagccctacattctatcatcaagaaatcatttcacctctaccttcaaatataagtccacagactatgatcacttcttccatctctcatctgaatcaatgtgatactcttataactgtctctctaattctgccttgctcccctgttacaatgtcaatcaggtcatgtcatgtgccactttgtggccacccgtttcattcagagaaaaagttaagtccttacaacatattctgcttccctctcccttagtcctgccctgtgtccgtgtttcaaaacctacgcacgtggctctagacaactttgcctgcttgctgtcctctaaaatgctaaaaggacttcacgtcgggacttttgcacttgctattctttctctccagaaaatcttgtatatctgcttggtttcttcttcttgcttctttcagatcttggctcatgtatcagcttattagtgaggcccattctgacgatgtgaccttgactccttattcaaatataaacttcatgaagacagtgatttttggctatttggtgcacttctgtattcacagtgtctagtgtaatcccatagtaggtgttcaataaacatctgttaaattaatagattaattgatggagaaatgattgactatcatatgtgttatttaactgccatgttaactgcagataggtagtatgatctctgttttgctagatatgataaatcaacctgattagcctgatagccatggagttgtaaaagttgacttacaaggtatagttgactatagttgattcattctaaaattcttgtcaggtaaaatgaggtatcattttgtatcattctcctataaactacagagtatttcctcatgaatgattagttttttcaatgtattgtttttaatcacagaggtcttgctactttattttattttagtttagtttagcaagatggagtcttgctctgtcgctgaggctggagtgcagtggtgaaatcttggcttattgcaacctctgcctactgggttcaagcgattctcctgtctcagcctccagagtagctgggactataggcatgtgccaccatgcctggctaatttttgtatttttagtagagatggggtttcaccatgttgcccaggctgtctggaactcgtggcctcaagtgaactgcctgcctcggcctctcaaagccttgggattacaggtacgagccaccatgcccagcagtcttgctattttaattaatctggcaagtaattatatctaaagtatacaggcactggtttaatctctgggacatactgattaaccagacaggcaaatctggaatttatagttagttaaacagatgcacaaactaaaaagaaaatatcaaaattgtaagtacaatgcaaataattaaaagaaggaatgtgaggccaggcatggtggctcacgcctgtaatcccagcacttttggaggccaaggccagaggatcatgaggtcaggagatcgagaccatcctggccaacatggtgaaaccctgtctctactaaaaatacaaaaattagctgggtgtggtggcgagcacctgtaatcccagttacttgggaggctgaggcatgagaatcgcttgaacccaggaggtgaagattgcagtgacctgagatcatggtactgcactccagcatggtgatagagtgagactctgtctcaaaaaacaaacaaacaaacaaataaacaaacagaaagaatgtggtaggaagtgactaggggcaatgggattgggttcttgatgatcatttccacctgcccttcctggtctctttgcccttctccattctgctttccactccagaagaccaaactttatggactctgtcgttggtctgccttacttctggcctctggttgtgtttgaccaatgggaaccatctgcagaagatttgagaactaggggaggaggagggctgggtatactttcccctggatcctccctgccagctccccactgattggcagtgtttttctttacctaaggccaggttcctgttgggcacccttcccctatattttcatgttctgagctgtaggaactgtttcttcctttattctctcacccttggtaaccactcctccctggctcttgtagtacagaattctgcattatatgtgctatcatattgttaaactttataacaataaataatcactatattactataaatcacccctttactaaataaactatatgagtacctgatttgttttttactcacccatgactgataaaggtggtaggaaatacctttgtggtgaagtattagataatgttagtcttgcagaaggcagccataaggaaaatatctaggaaggaacattctagacaacggaaaaatctgagacaaagaaacaaaggcagggatgagctctgtatgtttgtagaactgaaatattttggctcaacagtagtgaagaagagagaggattgtaggaaatgagggtgggatctaggcaggtgcctaccttgaattaatgttcttattgtacttaaacaaaaaaaaagcaccaaaacagagcaaaaaatgtgtgtcagtaaaaggcagtattttgtggggcatgtctttacctaattctgtttatttgtgagttttgtgaaagtgaaaggaaaattaccaaaaataaattatttaaattttcgttttcctttctttgtagcacattttcttaagtcatttaagtgtgactttagtcatcaagtacatacaagaaaaaaagcataaaggaatgaaaattaagagggtaaaacttctgcaggctatatttactatttactctaataatattaaaaggaatcatgaacgcattgagaagtattttgaagatcaagtttatgtagcagtttattttttaatctatcctcatggctttgttgtgtttgtgagacaaaatgacttcctaagaaacacagattttatttccttagtgttacttctagtaattactctttctctcatatttacatttggtcaattttatctgcttcctctatgcaagaaaaaattaacttcttagacttttaaccttccttcttgttcccccatcactctaatttgttgtattcacatactaagaataatgtttggtattctcttagtttccctttagccagtttatcaactatcttctggatttctggttctcaatcctgacaataaatgaaatcatattctgaaagaacgtcatcattcgttgaaatattttcatttctggtaaatacattgtcttgacttaaaaagtgttttttttggtagcggatgactcctagaatagtacctggcatgtgttaggtgctcaataactatttactgatggaatgaacacaggctctagtgtaaacagatgagacttcataatgtcacttaccacatggcactcaggagatatttagcctacctaagcctcgattatcatcaactataaaattgagataataatagtatctaccatttaccgttgttctaagaattaaatgacatagtgcatgcaaaggacttagcatagagcctatcacctagcaagtgctaaaacattagctattatttttaacattaattatttttcaaccctagaatggtacatttttaacaggtagtacattttaacagcaaaattttagcagaatgtatttatcccccactttgcattttttcctaaaaactgtatcatgggataatttattttgctgtggagaaagactaaactatctatgcctccctccacctgaggtcatttctgaagctgttggcattgggccaggggttgagtggcagaataatctccttatcaattttgttatgtttgatgttgtacaaaataaatagctcaataaaaactccagtttagatgttaccatggttgggaagaaaatggcagtggctacctattaagaaccacaatcacaaatgcagtccttctgtattttatatccttggttaggtgggtttcttgttcttttccttgtttgctccatctggggatgcctgggcacccgtacaaaactcactagtgcctaaacacagacacattagttggggctgcccctgcttcagataccagggagagatttgttggcataatgcaccagggtcttatgccagctcctgattctttgctgatgctgagatgaggaacatggctgggagggggctaggatggaatgaaatctgtggcagccaaagcctccatttgtctttctgccgagtgtgctgagctgtagacactgcagtgttttcaaaaataataataaaaaaatttgctcattagtttttaagtcctgctgactttgtgaaatcaatatagcacattgtaattgatttatgaaatcaaaaaacccctgcttgaccaggaagttcggcagtcgctgctctcagcaacctgcccttctgctcattagtgcatttcctttagtgctgcctgagccgagggcgccttcagagctggaaggctcaagccctctgcagacagtctgcttaagatgtagcttgcattgtgtccctggggtcttatgcttctccccttcttcctaccaggtcagctgaaggacttcagcttctctcttagggtccctaatgttctcataatatcttactggaaaggcaagactccattcatacctgtattttgacattttaatctatttgctacttttcttttctctcaccttttattcttccttgtcttattacttagcttatcttttgccatctgaccttatctattcattgatctcttttattctattttatataacctcacaaggttaacaatttttttctatttcaattgtctttgtctaatttcagtacctactgttttattcttaagataatattttatacctcttcctgccaaagcctgctataattatgtttgtatgccacctttcaaaaattgaagtaactgctatacaccaaacattgtcctgggtgctttacatcaaattatcttctcaagaagtgtgtaaggaatgcattatccttggttagaggtgaaaaaactgagatttagagaagttagtaacttgcctgagtcaccccactactgaggggcaaggctggtatttgaaactaattctgtttgactccaaagcctgtgtttcttttttccagtacaaaatgattattccaattggcctctgttttacattaaatgcttaactagcaaaatctagctcttggctgcccttaaaggggctcattctctttagtgccattcttccaaataactctgctgttcaaactgccagaatgcaaatgtatttattttaagatcttggtctatgctagcatattggatggcttatcctttttcgtggaattctcatctatctaatgttatgtgtatggagccccttgcctcatcattaaaggtgagggaagtgttctcatattgtcaaaagtcaccaagagcaatctcataacctagaaaaatcgacagacagctgagccaaataggcagcctttgggagcttcctgtggatttcattttctctttgttcttttgatgcaactttgggagcaagtaagtgggaaaattatagaacactgcagcagcaggaagatgatgcaatgtgctcgatgtcctcacttcttaagtcgttgaaggaacctgtagtttctccatacaggtactgtatgtttcagaattgcgggcttgcaagaatctcattaactgtagggccatctgccacgttgctactcatttggctcatttaatcacaggtgggtaggaaggtctcaatagttttggttcctgttcaattctgatttttgcttgggaaacagaaggaaggtctcaatagttttggttcctgttcaattctgatttttgcttgggaaacagaaaaggccagtgacagctgtggcagtgccagggttctcttttctctgtgtgagccagaagatggcttccctatatagtttgctgctaacagagcaagcagacagtaagcatttcctcgccctagtgtttggctgctgaaagaattatctttgttgacttgtggtatacttggcttaggagaagagacaaggaacacagtggtctctaaattagtaattgacttcatcaggggaggaaagactggttattgactgccgtaggtcagttaaagcacctgacatttacctataacttgtgtctgccttcctggctcagaaatgaaatagaaacaaatttgattagtaaccaggaaatacagttggtgctttacaagttattaggtacattctaggcctctaaacattttagggaaaaaagtgtctccagtgccaatgcataaccttgttttccttcctcttcttttgaacacaaaagaataaaaacttgatggaaccccctggtgttccaacagtacttgaggaaagtaaagcaaagcagaacacaacaaaatacaaaaacaggctttttctattttgttttactttgtttttcagtctagtgtttcaaatccaggaaatgtcagttctttcaaaggaccttttctccatagaataaaattttgggaaattttgaaaaagctgtagttctattatgatagtgataaagtagattatagctaacatttattgggcactcaatgtgtgcacaacagtactctgtatctcacctatataatcctattcatccccacaaacatctatgttctaagttctgtttatactccccattttactgatgtggcaattgagggatagaatggttaacaaattcttccaggtcgcatggccagaagtatggcagagtcattatcaaagcccccaagttagtgcctgagtctgcaccctgggccgaaattttccagcttctgtgatacagaattttatgccagaaactcttacattactaaatttttcattctttcttttaatataaatatacataaaaatgaggaaaacttccataggtgtgttctaatactgtgagcaaattaaaactcaattgaatactattttcacaaatacatgtatgcttatctcactttaggatgaaccaattctaaaagtcctacttaagaaatagttatgaccaggcatggtggctcatgcctgtaatcccagcactttgggaggccgaggcaggcagatcgctagaggtcaggagtctgagaccagcctggccaacatggtgaaacactgtctctactaaaaacaaaaattaaattagccaggtgtggtggtgggtgc

SEQ ID NO: 2697 - DNA, 4498 bp, Homo sapiens
ggaatttctcatgaagaagcagtagttgaaacgattaatgacactgagttcttctactggagagagttggtttctaaatgcctagccgagtattcttctcctgaatgttgcaaaccagatcttaagaagttggtttggatcgtttcaaggcgcacagcccagaacctccacaacagctactatagtgttcctgagctgccaacgatacctgaggggggttgttttgatgaaagtgaaagtgaggactcttgtgaagatatgagttgtggagaggagagtctcagcagctctcctcccagtgatcaagagtgcaccttctttttcaacttcaaagtggcacaaacactgtgctttccatcttagaaatctgattgttctgtcagaatttatatttacaggtttcaaagcaataaatgggggaataggtagtttcctggtttagcccccatctagtcaggaattaatatactggaatacctaccttctatttgttattcagatcagatctggcctattttcatatttatcctaagccatcaaatggggtagtgcctcttaaaccattaacagtactttagacattggcactttatttttctcgtagatctttagctactttggggaggagggaaggtgctgataccttcaatttgttacttttcaagatttttaaaaataactagtgtagcttatcttaaacattttataaaaccttcagatgtctttaagcagattggaagtatgcaagtgcttccttagcagggacagtggataatccttaatggtttatcatagatttcaccctccccccttctcagaagagtgagtatgctcttaaatgtcaaacacatttttgttgttttgttttttaaatgatcagtgtctatttgatgtgatgcagatcttataaatttgggaattataatattgacatttctgtgatttttatatatgtaatgtcttaattgagatttctgttaaggcagaaataattaggctagggctcttagttttcattcctattgcccaagtattgtcaaactatggtattattttaatgttactttaaaaatccataatctgctagttttgcatgtacttatatgaaaacagtgcagtaagttgaaaactcagtatctatggaattgataaatgttgatctggtgtagtatattttatcgcattttcttatattaaaaaatgtctgcatgattacattttatttcctttgtaatttacatttcagaatagtgtattgctatatgggtgccaagattgaatatgaagaacccgagtgtttgtagtattatagttttaagcaaatctgtgtggtgatacagccataagaatggggcttatataaactctgtacatgtaagattttgtacagagaatttttaactttataaattgtatatgaacatgtaaatcttttaaaatgtacataaaatactgtatttttttaccttgtgtgtgatagtctagtcattgcatgtaaatataatttattatgtattctgtagtataaatcatacattgatgacttacatttttactggtaagtcaacatccgttggatgttttctgaagtggctctttttgaagtgataatagattgtaattcaaaataaaattattaatgaattctccttgtttgggatcacatcttaatttttaatctgttaaaagttcttgatgtattttaatgagaagactttaggtgaggctacagtgattccagagtgagccttctaactggctagcagaagttctctaggtttggcatctgtgccttggagatactgaaagagaatctgtcatttgacaattgacctctttgtgggatggactcattaagtatgctctcagagactggtatattaccagaatgcctattaattttcagtgagaggcaacaggtattaagtagaacagaatgctcaggttggcagattagaacgatctttcaggagacaaagcaagttttaatcagttgtttggttaataagtatggggtgttcgctgtgatagggccccgccagcttctggctcttgtggacctcaaaagtatcaggtggttttgcaagtggtggtcctttcccctgccccaccccaataggttccccatctgtctagtttgatttttgtagacctttgttttctctagttagaaaatcaggtacactgaatatggttttcatgtaacacctcttctctggagataggggtatgttttcctacccttctagtggagaatcctacttgaggatgacctttcctctcttactaaataatattagtaaatagtgggcaatatattctgctttcagattttgatttgttgagatgtaaaagttgtttggggcttaccaaatctcaagactctctttagctcctgcaggattgtattgcttttcttactggatatttttcctgggtaagcatctttgtggcttcatctcttccccctgtggttttcagtgtatttagtcgagacctctctgctgagcttgcaacctgtttattcacatggcctgccatgccacttggaggtttctgattactcccaaacctgctggttctttatgtctttctcagcgaataattccatctattcatgttggaaacttaggtgatatgctcatctccttttgcctgtttatggaggtcaccagcctctatcatttgtatgatttcgtttacactgtttatatctctctgtcccccctttttctgccattggcatggtttagacctgtactctttatcagcagaggtactgtaatatatttgtgatccctcagcttccaggcttactcctggtctctgccttcctatctacatatccttttaaaataaaattttaactatctcctgaaaaattgttgagtaggtcacgcacaatcaggagaaaaatctattcatgacatacaagtctctgtctaatctgaacactgcacctgtctctggcctttttttcttgtcatttcctagaccttaaaaaatgtgtattgagaaagaactctgttagctatacagaagatgaactgggcaatatagagtagcagcatggagaccagtctgactgaactaaggcagtggaagtgtggatgaggaagagaggtgaaaattgagaagcgctatcctttctctttgggcattattaggaggctcacagacaagtccaggagcctggttataccctcctgtgccattcaaccaggtggctttcccatgactgtgatgaataaaattgagaagcccctgcccttttcagagcagagggtgaggagaaagctaccattttgtcctcatccttacccccgttgacttggcgagagatttgacctttcaggttttgatcctgtcattttctaggatgtggtgcacgcactttgctgttgcgcatggtgaagtattgtgcctaggtcctgggtcttcatctgtttggctctgctactgtttcctcctcccaggaagtgtggttagacaaataatgtgttttaattacctgtcacactcaggattaatacatactcaggttaactgtagagaggcattggcttcagaacactcctcgtgacaattttaaccattttctttgtctagagtctgcctttttcttttttacaatttcttttatttcaacactaggtttcaatatggtgttcctgctacctcccacctccctcctccctcatcacacatgcaaattgtcagcttattgagacaacccacttagattcatatatggacaaggacaaggtattttgcatttgttactggaattcagttttcctaactatttactaccagaaatggtcaataacttactttgtgtttagcaaatcaaattgtgtgatagatagtttcccagtatgatggccagtcagtctttccatccctgtgcctacatgctgctcttcccgtccacaagtggagtctgtttctcttgagttttggctggccttatgaatggctttgcttactgaagtgcagcagaagaaatttagtatatgtccaagcctaggctttaagagactggcagctttccttttatcctttttggaagctagccaccatgctgcaaagaagctcagctggattactgaaagatgagaggccatgtggagagagactcttgaggatgagagattatcttggatgttccagccttaagctcccagctgaatgtgggtgtatcctcagctacaccacagaaaacagaggaactactcagtcgatcccaatcaacccacagactcactagaaataacaaattattgttttaagccacgaggttttgggggagggttgttaaacagtaatagataagtgagacagattgcttgttatttatggtcaaatggtgattatctctggtgagattacaggtgatgttttttttaagttatgcctatctgtagtttcctttttttcctaaaattgatttgaattattagtgtattaacagaataaagaatgaactttaaaacac

SEQ ID NO: 2698 - DNA, 1051 bp, Homo sapiens
gtggtgtgatctcagttcagtgcaaccttcacctcccaggttcaagcaattctcctacctcagcctcccgagtagctgggactacaggcgcctgccaccacgactggctaatttttgtatttttagtagaggcaggtttttgccatgttggccaggctggtcttaaactcctgacctcaggtgatctgcctgtctcagcctcccaaagtgctggaagtacaggcgtgagccaccacaccgggttcaaaatatttgccttccatgcaccctttttccaaaagttactagaggttgtgctccaccaaaatgaagaagtaagtcaagaaagagaaaggctgaggacctaaggaacagatccaacacaaacataaggtgatgggagcccgcagaataatagtaaaggtagattctgggatcacagctggtgagtaggccagaagagacaccagtccagacagaaacaggaaggcagagacctaggagggaggcaagaaaggaacaaaacccaaagaaatagagattattggctctatgaacaggaacccacaaaggcttaattgcaaaccatctgaatgaccaattgtaacacctcgtggtagagacaagacccacaggaatccttctgagtcttaaatccttactataaaacaaatgagatgatatatgtgaaagtactttgtaaactagtgtgagtcacagtggaagttccttagcaacctctgccaacctaactcactacaacaccaccaatctcccagtaaaacacagagactaatgcccagccatgctagcccattgctactagtacagtatcgtttccttccctacattaaatgtggccctttggaccaacagcagagcatcacctaggagtttgttagaaataaagcatctgggccaggcacggtggcccacacctgtaatcccaacaccttgggaggctgaggcaggcggatcatgaggtcaggagttcgagaccagcctggccaatatggtgaaacccatctctactgaaaatacaaaaattagcctggtgtggtggcacgcacct

SEQ ID NO: 2699 - DNA, 1283 bp, Homo sapiens
agctgcagaacggttgtgccactgaacagatcttacagggaggctgtgagggttctcagagttcaggcacacaagatcttagcactcagcgtgttgccaatgcccagaatgttctcattaacatgttagtcactggagtccaatctttgcatgccatagtgagctctcaaaccagactcctgatgggtcctccgccactgtgtcagtgacaaggtcacagttattggagctggaattactgtgtatgaagccttagcagctgctgatgagctttcgaaacaaggtcagttggttgagtatgagcattgaagttcaagctgggaagagatatttttatccgtgtcatcgacctgtttaccattaaacctctggatgtcgccaccatcgtctccagtgcaaaagccacagagggccggatcattacagtggaggatcactacccgcaaggtggcatcggggaagctgtctgcgcagccgtctccatggatcctgacattcaggttcattcgctggcagtgtcgggagtgccccagagtgggaagtccgaggaattgctggatatgtatggaattagtgccagacatatcatagtggccgtgaaatgcatgttgctgaactaaaatagctgttagctttggtcttttggcctctttaccctgtgtttatgtttgttccaaaaccatcatttaaatctctactgtcacattttgtttcttaaaagcaaagccagctaacaccttcattcatccctagttcggaaattcaagctaactacttaccctttaaactgtcactgcatatgcaagtaccgctctaatttttggatcattaaagggagttacacaacttttaagtgaaaaaaataggtaacaaaacaaccacctgatagtaagttttctgataagactatagataagtggtagaggtaatcaattcttccgaagtgtttccttcgtgaataactggtagaggtaatagttttttcaatgtatttccttcatgagtaaagaaaatgtggattgaagtatagattccagtagcctagtttccacagcacgataacaccatgacgcctactgctgttcccaccttgggattctgtgtgctgccatcccacctgcagctgccctggaattcccttcgctgtttgccttcatctccctccacgtttgagaggctgtcaggcagcagcgaaagcttgttaggatgtcctgtgctgcttgtgatgagagcctccacactgtactgttcaagtcaatgttaataaagcatttcaaaaccag

SEQ ID NO: 2700 - DNA, 2416 bp, Homo sapiens
tcaggttaatccaactattgctatctaaagattaacctatttactttatgaagaagtatatgaagttcatgcatcccatagttcttccatataaatgatgacacaagaagtcacccagcacatgataagcagaattgcattgagaatttatacatccttagcttcttctgtgacgttgatctgtggtatagtagacatttagtcttactcgtgtttaatcctgataaaagagccctggaaccaaaacaaatttgaacctcacttggtaagttgagtttgctttgggcttgttccattcaatcctaataagtttaaccttaataaaatcttgaagtgtatcctgtacaagtctagcaaattgacagctaaacatgtgttcccaattcctctttcagtgtattctgattctcagcgctgcttttccttcttttctagatgcctccttaactctatgttattctcagctacccaattcttgtattaaattaattaattgtatttaatttagatcaattgtatagccaaagagaaaagctgaaatctcccagtcattatatttcttggccacaggagttgccatgttctctactaaatgtattattcatacatagcaggaataagtgaaaccataaagagcaaagtagcaatgaatagaaatttggaagatcagagaagattgcaataatccagaaccaccttcacaataactttcgaagaagatccacaaatttttcgcatcaggactgtggatcagtacatctttggatctccatgtcaggaactaaaccgacctgtctacaagactaacatccaatgacaaaaagtccaaatgccctaatcttctccatgctcccaatataaagatttctgattctcagataacatctctacttctctttacttctgatattgatctaatagctactggtattttgccttccatttcagcctaataaaagtaaatgcagttctctaggtattcaccgaggattgtttctagcccttccccataccaaaatccagagatattcaagtctattatataagatggtgtagtatttgcatataacctacctacatcctctcacgtactttaaatcatctctagagttcttaaagtacctaatgcaatgtaaatactgtgtaaattgttgttgtactaatactatgttgtttagggaatgatggcaagaaaaaaggcctgtacttgttcagtgcagacaaacaattcatttttcttgtctgaatattttcaatctgtagtttcttgaatccacagatgtggaactcatggatacagagggctcattctactttgcttcaattaaaatagaatttcacattcgtttaaaagtagtggcattcttgttctttttcttcctttttagtatttttactggtaaactaactcctgcatcctctccctattaaccaggagagactgtccataggctccagatccatttggcccacaatttatacctgactattgtaaaccccttccccataggtacagtaattatttcatgagtggacatgtaataaaagttgatgagattaaattcaatcctgaaatttgtaggttttaaatggcaaacagagcttttcactcaccattattttttcacagttttattgagtgataacttataggtcataaattctgtctggaagtatacaattccacaatttttagtatatctattcaccttgtgcaactttcactcaaaattcactgttagaacatttctactaacccaaatagtcgcctcatacctgtgtgcagttaattcctcctctaactacatccttagagagccacttatctgctgtctgtctataaatttttcttttctagacatcttatgtaattagaatcaagcaacttgaggccgtttgcatctgatttatttcattaagaagaacgttgcgggctttttgcttgtttttttagatgaaagcatgttgtggtatgtatcgataaaaggaaaaagtgtgtctttcctattactgattagttactctattgtgtggctaaggcaccttagtttatgcatgcaactattgatagacatttggattagacccttccagtcttcagcttctatgaataatgctgctatgaacatttactgacaaaagcttgtgtggacataaattttcaattctggtaattagatttttaggagtggcattactgggtcatatggaaagcttatgcttaactttttaagaaactgaggaattattttctaaagtggctgtaccgttttatattaccctcagcaatacacaaagattccagtttctccaaacccctgccaacacttggtgtcgcttatggtttttaatataggcattctcatattaagtggtacttcattgtggtgttaagatttctctaataactaaggat

SEQ ID NO: 2701 - DNA, 2628 bp, Homo sapiens
cttgcaagtgcgagtgtccgcgagctgcaggggaggcaggacgcgtcacactcgcgggggcgttccgagtccctggggcgcgccggcggggagggagagaaggagtctgagcacccgctgggcgcggcactgggcagaggcgcgcgtgttgccggtgtactgaagctgcccgcgaccggcgggagcggcgtttctcgcttcctcggggtccggtactcgaagcgcacggcagtctgacctcggctgggaagcgttaagccccagcagagggctgggagggagtgcaggagcacttgcggggtctgcgcagaatacacagaagatcggggcaacgagcaaagcaaagcaactcaccaaacaatgaagttaggagaacccaatcccgtgaaatgagcggaacaagggaataacagtgcaaaggcagcttgaagtaagaccagaatgttttgctttgtttttactattcccaggaagatacactaagaggttgggacaaaaattgggatgaagcgtaaagcaagtgtgtccatccaaggaaccaaaccacacaatgcgcaccaccgagcggcctgttgcactgccgctttgattcggttactagcatttcaccgtttcctatgtcaacagcataacggataaccacttgtttaagcaaccattaaaaaaagaggagtgtgtcttatacagaattgtgtttgtggatacaacatgaaaaccattgcacatcactgttctgtccttaagctgagccttgtaagaaaatgttgatattttgtttagccgtttatctttacatgttgttaaccacgtagtatccatccagaaagacttgttcctggcaaagtgtattggtaagtggccagtttcagactggagctgacagtaatggtttcctaccacatattgtcataattgcagagtcgtgaaaatgggctgatatttaacacaaaacaaaacaaaacaaaatccagtttggcagacaacataggtaattgtgttctgtaagaagtcacattcacttggggaagggaggccaactgggaagtgaagggtctgatctgcctagggaactggcaagaaagacagtcataacgtgggaggaagcaaagattgcctgctgaagagcctatcttgctacagcctgcttactctccatgaatattttttgccaactttgatgattctggcctggggattggaatgcggagttggggggggtggttcccactagaacaagcataatttactggatcgcttgcaaagtttacaggccggttttcacatgtcagcaggcactacttcaatccctaaacttctcatggcatggattcctaggaaagaggatcttaactcctacagtttttctttcaagctgtaaactctgcaggtcagtaacaacttattaccaatctttgccatccatctctgactattcccctactccaacattcccccatctcaccccaagcaatggggaaacatcaaacttaaatcagaagtatttcttaataggaaaacactatgatttatagcataattctgcactgcagttttactattaaataagggattttagattcactgaatttgcacagtgcttattttccgaatatttttatacctttttaattttcataaggcccctcacaacaaaaacctactatttaacctttcctatatatttgtctctagcttttctttggatgggtacctggtggcaggccggcccctggtttttgtgaatacgagagcaagagtgcagttgaagatcctcccccaggcccctgcccccttgtcttcctaacccctgactcagtcttgcaccacaaggagtcttgcacagaaatatgtggagagtatagttcaatatgtggacagtatagttcaatatgtggacactatagttgttgataaccaagctctctccccaaagccaccttggtcctgggaatatgcatctcaaacatgcaaatgacccttgattggatggacctagggaagatgcctgatcaagccctggaagcgagttatgggaccaacatttgagcaggaaatttcatgatctcaggccttcagaccaggactggaatctacaccactggctcttcagctcccagactttcaaactttgtcaccagctttactgggtctccagcttgtacatgacagattgtgggacttctcagcctccacaattgcatgagttgatactttataataaatatctttatgtatatccatcctactggctgtttctctggcaaaccctgactaatatacacttcttaaagtctaaagttcatagtgttcatttatgtatccatgaattcaaaggactgtggaaggtgggttacttcctttaggtcattcttcaagagaaagcaaagataaacatgaaggaaaggagaattgcttgggcaaaaagctaacattaattcttgttcatagttttattgatgttactttcctcgttcaaaagacgagtttaaatttatattttatgattcctatgcatgcataaatacatttttttttcaaattgagtcctaagaacaccatctgtgtcctgtggtatttgagacaaggtctacacttcacggcaggaagcagaagccaccaagaaaagag

SEQ ID NO: 2702 - DNA, 2726 bp, Homo sapiens
atcagctgactgatgtacccggaccttaagtgttcttcagtgctctggaatttgttttcctgcttagtacctaaaatagtaacatgacataaagaaccttttattaacacaacaatgatattttaaaaaggaagaataataatttccaagaaaaagtacaggaatttattttatgtctttttgaatttagacagagaattatttcatagacatcatttagacaaagttagactggcctgaatttaactgcaggtcctgagacttattattaaggtcatatttgccaatgtctggtgagaaatagactgggaagatgaaaagcatcaaaagatttctaagggctaccaagattattgaggggatactgaagaacatgttttttatttaaatatttcctaggactgaccttcactcttttttcagtgaatctaccattaaaaagggttgatgttctttcactgcgaaggatgcatggaaactgaaaaaaagacatacagaaaaaaagagctatgtcagctaaatgaattgacttacgttcagttaatagacagctgttcatgttaatgccctctcacgccgtctttcactaggctacattcagagaagaggtatatttgcacgttttctttcccacagttccttgggcatgtgttatctcttttgcatcatcagtttatatttgagctaacagaggcttccatattaggcaatttatatgacagttggtttggcccagttgtttttcaagtatctttaatatcatctttattctattatttgtgcttctgataattttaaccaggaagatataaacaacttttgaaaaaaaatggcacagctcttttctattttaatgccctttgttgtcattcctgtactcagttttcttttgtaattaaaaaatatttagtacaatcagtgatttatttccacatttaaacttggaaatcctcttcaccaatatccttatcaatttctttcttattgataacatgttcatgctgtaaattgctttagtattattaatttcttgcctcctttcttctaggaactgttgagcaactgatttttgattatttcctgagttgttctgcaggcttgaaaggatagtttcttgttggtcaaatcacagaaaagtcttatacaagaattatcatcgggtcaagttctcagacttacattgtaattaattgcttagcctcattacttccacactatataatagttttactctttgttctttctattaaactggttttactttagaattttgtttcactgtaatgaatgccataagaatattctttaattcgatcattattattattattattttgagacggagtctcacactatcgtcggggccggagtgcagtggtgtgcaatctcggctcactgcaacctctgcctcctaggtacaagggattctcctgcctcagcctcccgagtagctgggattacaggcgcctgccaccatgcttggctaattttttgtatttttgaagagacggggtttcaccatgttggccgggctagtccccaactcgtgacctcgtgatctgcccacctcggcctcccaaagtgctgggattacaggcatgagccaccgcgcccagcctcggtgtttatttttacaaacaagatagctcacatttccctccaacaccattttaaaataaagcttgtcatttctatttgaccttttgttatctcttcctgattttctgagaatgatttatactaaatattatatcttttatattgtgtacatatatatgttatttataatcccatatctgaatatctgaattccaaaatactccaaaatctgactttttgagcacagcactgacatgacactcaaaggaaatgctctttggagcactttggattttggattttcagattagggatactttacggtttcaaaatctgaaaatctctgaaatctgtaacatttctggtctccagtgttttggattgggaatagtcaatctgtaacatacatgcatattacactgtgttttctttaattaaagtaattgcattaatttgtctaagctagggatgtatcaaaagtacatatttcattttgatccttaaatcaattttgacatatttcttcttatgattaaatacacatgattcatagaagaaataaggtcctccactgggatctttttgttttgtaaaagactttcattatacagctctgttggctatttatccagacccagctcctgtcataaacctttatgctttatgttacagtaataatgaattatttgcaattcctaaaatatcacaattgcattatataattccaattgttggcattgaagccaaggactgtgatttttccatagttattgtctcagcaactagcagtatggtggcataaatatctgttgaaacaacaaacagcttttctttcacagtagttactacataaatatttgctgaaagaaattaataaacagcttgtctttccaacatttcttgtatttgaaatacttccatctaatctttctttattatctgcatgctttctcctaagtatgagccatttactcaccaatttgagttttatttagctccacaatcttgaagcattttagcatggcgagatgatttgaattgccttaatgacagtcaggcatatgaaacaggtttgctaaatcctacttttctagactttttcggggaccctagaacagtattttgaa

SEQ ID NO: 2703 - DNA, 28496 bp, Homo sapiens
tgtaaggacacctgggaggggagcgaggggctggcctgggacttcaagggactgaggctgggtggccccagctgctggctccaggcagcagcttccgcagcgggagggctgcaggtgtgtgactcacctgggtgggggaggccctgagtcacggctcctggtgtgacagccccaggaagcaggccaagagccctgctcatctggatcccgcactgaggctggctagaactcccgggcagtgggccgggctgttgggcctttagctgtgtgacagcacagatgccaacaaatccacctttgccccgctaccctgcatttacccagcgtttcccggctccctccgtgcatcggaatcatctcagggctcccgcggcacatgttggctgtctgcaaagcggagaaacatccctcgtgttgctttatgaagctcctttcatgcaggccaggcatctagccttcaggcctttgctctctccgtccccaactgcctggaaagccggtgcctccttgtccttcaatacccagctcagctcagtcatggctccactaagccatgccaggtagcagcgatggctactccctgccctccaatgcctgcagcgtgtcatctgctgtctcctgacaccagcactttctgctttgccccttctctcctcagctaggcggggctccgcctccgtgtccctccgcatgcctgctgcatgattcctgggtgtaggtctccactggatgaacggcacaacttcccccactgccctgtatcagttgcttttgtttcaggtgttaccactgtccccccagaatgactgtgagcttctgggcatggggaccagcacactcctccacggtgcctggtgcatgctcagtgtagaggcatgcttggtgaacatcccctgattaaggtgtgggcgtgcgctgtcttacaaagcacacctgggaggcagcaggaacccgtgggagcgtgccagccccacactgagggcagtagtttcatctttttctggtacttccgagagtaccatagaacaattaccttagttaaatttataccagtgcttctcaacctggctggatttggccctcaggggacatttggcaatgtctggagacttttgctgttgtcattagctggggaaggagtattaccagtgggtagagaccagggatgctgctgagcgccctacagcgcatggggcagtcccctgcggcaaagaatcatcaggccccaaatgtcggtagcgccgaggttgagaaaccctgggccacacattgacagctgacgctgggacttgatttgtttatgtgcccctatacactacgggaggcacaaatggaagatccgaggagccaggaacggaacacggacagaagcatgcacggccttgtgcgctgtgcctgcctgggagggcagctctgtggcaggaggctgctcacctggacacaggaaggatcagggaagcccgtactgctccagctcacatcctcacgggacctggaggctggagagggaattccaggagtccaggtacatcctgtctggtcccaagatctctgaagggttccctggggacagtctgtttcctgaagcagctgtggagtcctccagcttccttcgtgagctagggaggggggtgctgccgtgattctgtaagagcttgactccaggaagcacgaagaaggctccagagacagcttttgccttgattaagtttgatttgatgtgtttttgaattattaaacaaaagtcagtaagaaattctcaggtgccctgtaatctggaggagttctatttccacacggttagtatcactggaccccatgctgtcctgcttctcccagctcaccagaccaaggagggtccatgctgcaccagcagagccccgcattctcttcagcgtccccacccccccccccagaattgctggccagtggcttaggaggcaacaccccaactcagggtgtgctggtcttgcttctcaagcctagtaggagaagagcagaggggcacgcagtgttttcagggcgggagcagcagaaagcatcccttttctttctccaaaagaaaaaaaaagcacccttccttggcagagtcagcaccttgctcatgtgagcagcccaggagcaccaagcagagcccggcacacggtggtgctccatgacagtgacagccaacatgtatgagtgctcccaggtgccggcccccttgcaaacactttgcgtgtctctcccatccaccctcagagatgagtactagcattactcatcacattgccacgtgggcacgagcatcagcctcgttttctagatgagcacacgtgcgtggagaagctaagtagcttgcctgaggtcacacagcaaatacgtggctgggtgaggcatggaacccaggaattctggctgcagagcctgtgctcggacctgctacgtgctactttccccactgaacaacggatgcgcggatggatggatgagcactgggctcatttagcggggattcagcacgttagggctggtgtggttcaggtggacacaggggtgttaggtgctcccccaagggacagggtgtcaggaggggtgaggggtgagagggtgaagatggagaaaaaaaagggaagcccagggaagctttccccaggcacacgagcatccctcactgccctgcgctcagcctcttgccaactgtccagggcaccagccttctgtggtccccttgcataggacacaacctttagggccatccatggtggccctgtgggctgagcttctgtatcctcgccagcagatggggtaagtcagtgatgctccaggcagtacccccttgggcaggctgccctgctccttgccagcagtggtggagcatctcctgcctgctcctccacccccgtggcttgtcctgggttcagggccacgggctgtaatgtgggtctctgccccctccacccttcccattactcagcccagcctactctgatctcagaagctagtcactgtctctacagcctgtgaagcattccctgtgtgtacacagatcctcacacagcaaagcttccagcctccctgcctttgctctctggctgttcctcctgcctggaattccctgccctggccccatctgtgttccgtttattggctgctcagccaccaatattcagctcaggcatggcctccataaagccttgggccagaagcttctgacccgtgagctcactgctggcatcgttgtttccgagcctccttctggctccaggcctctctgcttgtcttgctccctgggctgtgtacacttggatccctgcttgccctcctggctctcacctgtgccttgttgtgccttcgtggaccctgtgcaccagggtgtgaactgaacctacccaatgaactccagtctgacccccagctccactctggtttttgtgaccggtctgccccctgcagactcagggctgcaccatccttctagaagcaaccatctaatggcctggtctgatggaaacgggtaatgagaatcccaaagaaagctcctctagcatctgccttccataagaacgactcaatttcaggctcaaaacatagagggaaccagtgttttaggcacagaatgggacccaaacgttaattcccaccccttcctcataccatagtggggttttttccattaactctttaacagggcagcttaaactagaagcagagttggatactttctaaaactatagatccaaagtgaagctggaacagcatagcattttctgaatcaaaccaatactttctttaatgagacgctttgcaggaaatatgcagaaatatttctcattgtgacattgagacgagtaactagaaatggaatctttggagggacttataccacatgggggcaaactgagccccagataagagtttctggggcagatgcactggtgcataagagacagggcaactgagcttcagctggtgccatccttgaggtaagtttgaagaactttgtaaaactggaatttcagaatttctccattggactgattctgccacaaagagggagcttcgtggaagcattcattttcctcttttgtctctccaaccatcctgtatgattagagagacacagggtttgcaaaatttcctgcaagtgatagcctgatggtggaggctcggtgtccaggcaggtcacgacaaggtggagggactagcctattcccagaacagcctcgcatcagcacaacacaaggatcaagacgtcgccaagttaagctggagggagaagagcccagcctgaggctcccagccggctgtgtttgagaggatcacagaagcaggtggagggagggccagggagcccagaacgaccggccaaacaggaaaagacgaagccagctgtttaaacggcaatgacctcagggcgaattattttctggcaattaaccatggactggaggcagctcagaggtgcagctgcctggcctgtttgtgcaaaccagaggatgtgaatttggaagcctcaagccattcctgtaacaagatgtcattgtcggaaggctgaaggtgacctctacccctcctggccccagcccagggctcacaccctgggctatccagccgcagctatggtggaggttgggactcagccattccactgggagcagctctacagtgaggacaagaggatgagctctggccagtttctgatactaacatacattcctgacccggggggctgggagcagagaagaggaccagggctggggtaaggagagctgtagatgcgatggagtgagggttaagttggaagaggcagggagggagcaaactggatgctggggaagcaggaggtattctacaagcacatcaaggaaatgcagctgagcagttgcacttgctcacacctgtaagcccagcaacttggagctgaggcaggagaactgcttgagtccaggagtttgagaccagcctggacaatatagcaagacctgtttctcaaaaaataaaataggaaaaaaagagaaaatgtggctgaggccatccaaagcgccagcccaaatgttggggtctaagaggaacgtgtgtgtgtgtgtgtgtgtgtgtgtgtgtgtgtggtggggggtgggcctggaaggagaacagaattccagaactacacgcccaagacaggcgtccactgagcttcaagctgggactattaagaacttagttggaatgggctgagtcagggcagcacccagagagggcagcagggcctggccagcaggctggggggatgggggccaggtgccccatggggagacacagagcaggggactcagaggatgctcagtggattcaggtatagggaggtgaccaattgccacttcttcccagccccccctggaaagcactagacattcccgtggctgtcttcttacaggctttggacagagatggtgcagcctgcagatacctgtgcacacaggtggacagaagggactgtgcaggtggtgaaggtgggataagagcagtggcaagggccccagggcaggactagtggtgtgtccctcgcagtgataattcatcctaggacaaaagtggctatggggggtagggaaggctaccaagaacaagagtgaggagataccaagaacagggcagcctaaaggttaggaaaagtcctgaggcccagagaggtcagagcctctgaccaaatccaaacacaaattcaaaccacctgcacggtcctttaccttttaatgcaggcacctggtgttcctcgctagactccaagcctagaactgggccacagtcccgttcttcctctccccttctcaccctgtgttttgcccagcagagcaggaaagctgagaatgtgctggaaatgcttgttgaggccgacgtgtcaggcagcccatcagtgcaggatggagcctcggttgcagagaactgcagggaggtggtgtggaagctcattggctgtaagaactgctccgctgcgacagtgctgctggaggtggtggtgaacaggtacacccactgcagcctggagaggtggatgttgacgcaaagtctatgagtctcttgtgcagccagctcaaggctggctcttcaggatgtttgtgtcctgcttcccaaagagccttcaggcttcagaggtcatcttctccattcccctggctctaccacacaagccaccctggatgaggagaggttcatgccagagaggggtcgggattctccaagccctggctgcaggagaatttttggagcatgggggctgtcatctgaccaaagatgaaaataccacctaacagacgaggcaaggcccaccgtggggctgggtggctggtggagcaacagaaaggaacatgtgggtgagaaatgaggggaggatgcagtccagttcccgggtccagggacccaggttcccccgaacttcccaccagtcccagcttctttagaggatgtggcccagccaaggctgtgggggtctgggggcagtgggcccaagaataactcttacttatgtaggtctcttctcaaaggagcttggccatggtgacggtgatgagaatgttcaccagagccacatttttacaatctttatataatgtggtgactcgtttcctaagacctgaaaatacttcctccttatcctcacacctcgtcccagataaaatggcaatgccaaagtggcaaagcagaaagcagtgacttacctgaggccccagagcaagctgggcaagctccatgaaaaccagcttttcagcctgagcccagatattatctttgatcctggaccccattgccctggctgaccaagcctcggcatatttgatggaagtgttgcaattctggctcccctcattttcagaaattagtttctaggacttcttactttttaatccatcccctgataaagacccagttaagtctgaaccatccatcatgatgttcatttggcttaagatataaaagttttcagagcccacattcaaaactctaaaaatatcttcctcttttgatctaggtggcatctgtcctggtcatcggcctcgggtccagatggcctgaattatctgtctctctcatgcagtctttgctaaaagagaaggtctggtgtaaataatttaaaccccattcccttcccctctctgcagatttctgatgccaagctgatcatcgtctcagcaccagcaaagacatgctattcccgtccctgacgagcatttccttcttgagaaagtgattttgaggggctgcagatgtacttggaggaaggtttgggccgggacagatgacgtgcccatgtgggagctggacggcccctctctgggtagctccctgggaactcccatgtccgcctcccgctgcctcctgatccaaggtggatgcacttcatttgaggcctggtctttcgtccttccctctcctcttcggggaccactttgtctagtgctagactcattgtgcttcccccttggggcttccttcagccctcagccgattcaagacttcaaaaggaagttggacatggagaggaaaaaagaaatgaaaccaggaaggaaccgccaagaagcacacaacgcgtttatgctgccttaaccacacgcttgactctaaatgggtttaaaaattcttacttgtgttagcccaagaaagtttctgcagccgtctttttggtttaaacaatcaaatactcaataattctggggctggtgggccaggatatgggttactcagatcttctgcttcaccccatgctcggtccctgagccagttctgtcattggttctttcagaccagggcaggaaaagtcaagaaagcaaaagcggattctaggctgtggggtttgctgtttgctagccccctggcagagatgcctgtccttgcagtcctgaactggtggccaagtgtgcatgcatgcacgtgcaggtgtgtgcatgtgcaggtgtgcatgcgtgtatgtgcgcacacacattcatgcttgtacatgtttgtgtacacgcacacttttttctgctttcaatttcaagctgttgcctccctgatgtgtctgtttagtgacttgagccagaaagattcccggttctatgtgggatgagaatgaacgcaggcaggtctccacagaagtgagtaaagtagagctgagaagaaggacattgtctcatgccagcctgtccaatagccactttgccccagccctgcctcaagccccagagagatgacaaggctctctctgtttgtcgactccttgaagctcagaaaggtagcccatactctcacccagccggtgcccttcagcctggaacctttggatggaggattggaccttgtgaccttcaagttcccttccgaaccaaatatgctctaacccaggtatgctgttattttcttatataatgggagcaaggaggcactgggatgcccaaggcgtctagggtctcaccatgacacccctggtctcctgccctagtggtctggctgggtcctgcacagagccctctcttgtaatcagccagatctccaagagccacggctccacacagacctacccatagatggacggcagggtgtgccctgcacacattcatccctgccccgctcagcttcctgcccctctgccttcgttcagccttggtccccaggagaagcagactcttggaggcaattccaacaggctgcaattcccagtccagctccggcccttacttcctgcacgtctcagcctggcctcctcatctgtaaagcaggggagatggtgctgttgcccaggaagccggtcaccatgacgagagtacccgctcagatgaggatgcaggcggaggcggtgaaggtgctggaggccaggatgctgaggtagctgctcctctccaccagggtccagatgcccatggccaggacagctgcccccctgacctgcaggagaccaccaggttggagcagggggtggcgggggcctcaggagctgccattccttgagtgcccgctgggtaccaggcacttctcgtgcattgtcttattcaatttaggcctcctaagagcctgtgagaacagtgtggtggcctagctttacagatgaggaaacggaggctgagagaggtttgcaggcttgtccaaggtcacacatgtaagcgagctgcagattttgaatctgggtctgacttctgattctgtgcatcttactatggttcctactgcatatgaggcggggagaaatgacttcagttttggggatgactaatatacctgagtcccttcgcctcccctcccctcagagcgctccctccctctgtccacgtttccctgatggatgtggaggtgccattttgagcacctccccttgttcaatccttatatttgcccattggggaagcacggctgggccccttatccctccctgttctacagaggaaggaactgaggcccatggaggagaggtaaatggcccgagttaggggcagggccaggaccaggactcagagcccagggcctgcttgctcagtctcgctgcctccatgatggaagggccactgtgctggacaagttggagctccctgggaccacaggaggagggaggagagccttctttgctgtctgactccctttcagtcctgagagggggcagggacgggacactgctgatttgcaggtctgggggatgccttcttggaaatagagtacctgggaaatgtagctggggtggtggggcttgactgttctttcctgccatgaagctgaggagccttttagtgactgttatcctcagcagagcatagtgggtgggtgcaagtgtcctcaaggtgccagatgggggctgtttggagtgttttcccaggatttgggtcctctgggacctctgaccatctctgtcatttgctcctgggaaggtggacttctgtctcccagtctctctgcccgccatttagggacgggtccatttcctctgatggtcagtagatgcttcctcaaggggtcttgggtgtagccaaagctagagaagccctcccgggctctgttcacatcccctgatgcttttccctgcaagttgtctcccgtctgccccaggaagactctctgtataacctaacctgtcacttcccagttctctgttccggggagtcgcagaccttggctgagtaaatggaaggtggttcttagcaatgaacaggcacctacattactcaactcgcaagtattttaccattttgccattttctcttctgagctttgcaacagctctgtgaggatggggccgggcaggaggggccaggctatccctgtcttgcagataagaaaattgaggcttggagagaataagaatgtgcccaagatgacaccatcagagggtcagaattgaggtgcaaacccagttatttgagggcaaatccaggcctctgtccttggatcccccagagtaggctgggcctgcttctctcttacttctacgtttttaatagacatgatttcttcaaagtgccattttatctccataggtacctccagacaccacccaggctgcagcaaatggaatgggagaggctaacacaccataatttttcaattccatgatgcccattttttctcacattttaacgtctctaaaattggggcacatcttatgattgatggcatcttacaattacacttggcagtactttttcttggtgatacaaaaaaacaacagtgtatcttacaactgatagcttagattcagtgaaatcctagaatacaacaggtttgaaaattctctgtgggtgagtgttatctgtggcccatacaacctccatgaccagtgagggatttcctgagtctgggttccagcaaaatatcctggacagaattctttttgaccctctacagcatgcctggaaggcttgggcacgggtcccaactgtgtataactagctccgtgacctaaagagagtccctgaacctctccagacctcagtttcttcacctctcgaagaagggagtgagttatattagaccagtagttcccagcctgtaactaccaaggaccgtttgattattttttcccatgggttttatgttttgagggcttttgcctatcaacgtgcattaattaagtaataattcacttctcattttttattaatcaaaggcacatatagtgccaggaagagattctgaacagcatgagacagtcaacttgaccacactgagttgatctaactccagcaaaaggccaagaatcttggcttttcatgagaatagcctctttatagaaatatgcacattatctgtgatctgttaggcttcttaagcctgtccctcaaaccagagtgggggctgagcatatggctctggggccaccaaaagacatatgtttggactggtctggggaccatctgttgggagacacagaacctcactgaaagcctgatgaaaagctttgcatcctttgcccagagaaatggtcattcacacaaaacaatacccttggggccaggggctgaagtctattttgcactacctaatgacctgtggcctttatggtctgtaggcctcctgcacccctatggtgccctaagacctggctgtacaatcacctggggagctttgaaaaacccaggcccccctgcaggcccatccgtgtctgtgggagtgggacccagccatgaattttttatgaagttcctgggtgatcccagctgagaaccattgcccagaattaacgaatggggtccaggtgtcctgccctcctcttcccagttggtgacgctgtgctgagcctcgcagaacacagcggcttcccggtcgctcagtcccaggaggggccccttgaagctccaggttccctcccctgggaggagttgcctggagggctactgagatttgttcaggacctgaaccccatcctttccttccgtgtgtttgttagggtgtttgctttggcagaagctttaaggtagaaagtggggtaatcctgaggaacagaattttcatctaaaggggcaaaaatcagattatgcaagaaaggaaaaaaccatggctcccaggggagtcggaggctatgagaaatgcagccccggagaggagcagtgtggatctggccgacggaggcctgctctctgccagggcacctgcaggccacacaaatggggctgggatcttgcaaagcttgcaaagtgacgccggatcctgggccacggggcagggtctggaaggggtctggagggacacatttccctgattcaggtctagagaacaacaaatccacatgcattgctgtccagaagaaatcaggagatgagtctgggtcaacggggcctggttatacttagccaggggtctgcaggagccagagtgctgcaagtcctccgggaagctcctgccggggacgtggtcagctctttagaaagcaagctttcctctgagcaagggaaggaaaactgctcactgttggaatgggtcaccagagggtgccacgggagggcggaagtcagcaggtctgcatgccagtcctggccgtgcccttgactgggtatgtgactgtggacagacagttggcctctcaaagccttagtttcttcatctgcaaattgggggcactggatgggaatatctctgaggtcccttccacatggttaaactgtccctgttagtattgggcaacagtgttctgccaagacaccaccagcaagatgcttctggaccagcggctcatggctgtcactcaaaccacttggaaactgcccagttcaacagaaagcagtggaagactggtggggcagggagagcgctgaccccagtgagcggttttaacaaccattggcgtagagttgattcaacagtatttggctctttgtagaaactgggttggttttctgtggagtattaactgcatttctcaaaaccatagcctgtggccgattagccagcaaaccctgcatagggtgaagtcaggcaatgaggacgtgagcagaccagtaagggcagagcaggtcacccatgccgtgtaattttaggaacttctcatttataggagagaaacattgccaaagtgtggcccacgtcatcatggggagaagcgttagcttgaactgccacacatgcctggggctggatagaaataaggcagcaggcttgaaggaaagcaggcagtggcgtaacagtaaatgtaggatttttctttgtcctgctagctagggcttctgtgttgacagctggggggaggatggggtggggcaggagccaggaccatgggacgcccagtaaagaaggatcccccgggcaggggagttctctaccttcggtgctggggttgggtgggggagcccatggcatgggaggcagaaatgcactggctgacagtatagttcatttgtttgatgtttgctactaggaaccaagcatcacgctggactgaaaaggtttttggcctggacaggagttcccccactgggaaccacacacatcatccgtgtctctccttccaggtcggtctggtcaatggcaccatcacccacccaccctagaccagactagacacctcagggtcattattgactccttcctctccgctcaatgacagccagttctcctctgctctcaaacctgtctccatctccccaccgtcagctcccagctcctgctctacctgcaggctggcaggctgtgccccaaggcactccctgctgagcaatccccacaggctccaacagccagagccccaagcccagactcttttgcatggcctcagggctcttacgtgtctggccttaacctatttttggctttatcttctgctactttccttcctccgtacctgggctttaatcaccatgaacaaagtagttgcttttcttgtaaacattgtagatacccattaactatggcagcaatagtagagtggtaaagagggtgaactctggggtgaagtaccggtgtccgagtccaagcccctctgtttacggctgtgtggatttggataggttaccaaactctgggcctctgagaggctctctcctgtcccttcccaacctgctcacattgttctctttgccgttccttttccactgaattcctactcacccatgaagccccatctccagtgcggcacctgctctgactctgctgggcaggtgagcttgtccctctcgtgcacacctgtggcactgctcccctcacagcagccctcggcccgggggtgggagactcccccgactcccctcagaaccccgggcccagcaaaccacctggcacctggcagccgcccacatgagcatgggactccacgaacggggctttgtagggggctttggaaatagcggcatctgctcccctcacccgtctgtctgctgagctcctgaggcaacaacgagtatcccccttccctgttttatggccgtttttatttttggaggggcagtctgcaaagtgccagcagtccccgagggcaatggactttcctccaggtcattaggaagaagcccctggaaaggatcttcatgccagaccaatgcttggctattctcgttctttctttcaacccacacccactgtgcacttgctatgaggacgccaggctctcaggccatagtggggtccacacctgtcacttcacctgccctcatgtcgcaggccagtgactagatgggaaggcccagcaatcaccagggtgatttccattagaaagagaggagaatgggtctaatttcagggaggggggctggcaaacacagcctgggggctcaggagaggactgggaggccatgtctgagcaaggctcggttgcttgtaaagaatggtaccccgttcccacatcagaagagtcagctgaaccccgggctgcagtcccaatagtgcactgctgagcctggcgctcacctgcagggtagatggcacctcagtgccacacctgagcctctgagctctccaggagggcataggcaggcatgtatcaggcaccactgctcaccctgctcgtgagtgacgtttttctgagcaccaggcaagcacttctccccggctctgtccatgctgccattgccttggtttgactgaatcttcaaggacaggcttgtcatgctaagggccattttccactttgaggcattcttttcttggttctctggttttaaagagcacttgataaaataaatcagagcactgcttccccctctgtcttccccatcccatctacccttataacaagagcagaatctcatggggcataccgaggggtggagctggaaaggaacataaaatcaccttccaaacccagctcagtatccaagggaaaccttccttggagctgtctctccccactcctcagcaaaccattctgtcctctgtaccagctccatgtcttgcccatgtttttgtaattatactcatcactgcctatttgttttatttgctaccttgtgtgtcctcttttagcctcttgataaaaccttattcatcttggtgtctccaatggagtcctacatgtgggagggaagaaagaaggaagaaaggaagggagggaggaaggaagggaggagggaatcgagttcaaccccttttatattctggagggagaaactaaggcccagagaaaagtgacttttccacagtcacacaactagccaggggaagcatggagctagaactcaagaatcctaatgctcagtttagtgtccattttaccaattgggctgctgacccacacgaagctgcttggcccaggaagcaagttgtgcggtgcctgggctacagtagatctagagtccctgagctgcagatgggcagctaggaggggtgaccacagcttcatcctgacttgtctcactcaccatggccccgagcagaccaaatgcacatccctcttgatatggtttggctgtgtccccacccaaatctcatcttgaattgtagttcccataatccccacatgtcgtgggtgggacctggtgggaggtaattgaatcatgggggcgggtcccccatgctgttctcatgagtgagttctcatgagatctgatggttttgtaaggggctttcccccctttgcttggcacttctctctctcctgccaccttgtttgcttccccttccaccatgattgtaagtttcctgaggcctcaccagccatgctgaaccatgagtcagttaaacctctctcctttataaataacccagtcttgtgtatttcttcatagcagcatgagaatggactaatacacccctcagccatggccctgtcccccagcagatcctgacagccaagaggggtagaggtgccccgaaagccgtggggagtcccatgccattcagcatctcaagaagcggtgcagcagagaaaccagctacgaggtccctcacctgtttttcctcaaatggcaagcccaggaagggggcagaggccacgttcagtggggtgatgctgtccgaggtgaagggctttctagctctggcaaagaggtgagcagaaggccccaccagggcctccctagatcctgaagtgatgctcccaagccacctcattcccctgccaggctcggtcctccatcttctctgccacctgtcttggtcccatgcctcctttaagggctcccaagcttccctgtaggctgagccctcctggcggcctgggaaggagcaaggtctccgcttcaggagcagaggcagcctctccagtcacggagtgcttcccattgcctggcagagctcctgggaggctggaaaagttttgattatgaacacagccaagcagctaattaaaataataaattagagaaaaacattgcaggggtaatggtagctgcagggagccgtggaggaaaagggaggggaaagaaacacatcttctaggtggccgcctaggaaagcctgggccacattttctttttagggccatgaaagaggcatgaaagtgtggcattttggttcctcctctgctcagcaggatcatcccataatgattatggcttaactgaaaccctaggtggggtggggcggtgggagtcagagatagggtgacggggaagaattgccacctgaatcctgcttcgtgttttgcaaactttggaatgtgacccatttgggtgataaaataaatttagtgggttgtaacctgcactaaaaaaagtgagctaaaatagtagagaaaatatcagcatgcatctgtattaggattttctagatgggtagaactaatagaatctacgtatatatgaaagggtgtttattaaggagaatcgactcacaggatcacaaggtaaagtcccacaataggtcgtctgcaagttgaggagcaaggaagccagtggtggatcagtccgagtcccgaaacctcaaaagtagggaagccgacattgcagacttcaggctgtgtccaaaggcccaaaagcccctggcaaactactggtgtaagtccaagtgtccaaaagctgaagaacttggagtctcatgttcgagggcaggaagcatccagcatggaagaaagatgaaggccagaagactcagcaagtcaagtccttccatgttcttctgcctgttttattctagccatgttggctgctgattagacggtgcccacccacattgagggtgggtctgcctgccccagtccactgactcaaatgttaatctcctttggcaacaccctcacagacgcacccaggaaaaatacttcacatccttcaatccaatcaagttgacactcagtgttaaccatcacagcatcatataccgtaagggtaagtttagttttctgaatgtttcgtgtgagcatttcttatgcttccatgcatatcatgagtcaccatcagaaaagtctcaaagtcagcactatggacagagaaagtcattaaagagaccaggcatgcccatcagtctaatcataatagttatgcataatagctaagcactgagtatgtggcacaaattgtgctatttttctaaatagtaacctctaattcttacaggtattggtattctcatgtagcatatgaaaaaactgaggctcagtgagattaagtgatttgcctaatgtcttagttcaagctgctgtaacaaaatgccacagtctgggtggcttaaacaccagaaattaattgtctcacagttctgcaggctgggaagtccaagatcaaggtgatctgttctgggtggggctctcttcctggctggccaatggccgccttcttgcggtgttctcacctggtgcttgtctatggagaaaaagagagctctccctctcttcctgttcttagaagaccatcaatcctagcagaacagagccatgcccctatggactcatttagccttacttacctccctgtctccaaatacaggcacattgctggttagggcttcaacatataacttttgggggacacaattcaatctgtagcacccaatgtcccagggcaaataaataatggagtctgaatttgaatccaaacttgagtctgagccttcccagcatgctgtgctgcctcgttaattcatgaatgccccgaggacactaggaaagtgtgcaatttagagctggggctgcaaagcgtggtgaccaagcacacaggcctggggccaggcagcactgggctacagctccgggacaaggcacagtgcttcccattcctaaagcagggctctaagagagccattcacagcttcaggcagggctgggaggattaatgggatgatgcacctgcaaggacaagcacagaggcccaccatagtgagttccaggaacgctgggaactttgtttactgatagaccctatgggcctagacccatgcctggcacttactaggtgcttcatacaaattgtggactgagtttttaattgtcattttcatcactgacctggtattagaatacctgggtgccagtgttagctttagcaacactatcagaccttgggtgagattcagaaccgggtggcctgttccctgtctgtaaagtgaggataataatgacagtgaccatccaacagctcctgtcaaatgctgggctcagaactgcattggggccaacccaggtttcccctctctgtgctgggtttcgataaagagtgcagggtgatagactagagaggacctcgttctgggggagaaaggaagcttgtgtttcccctgtgctgtgcctcatacctcggcaggctcaggcaggaggaccgcgattggacgctgggggtgtctgtgtgggagggaaccttctcttgttggaagggatcctcactggccaacgccccctcctggggaattctggtgagttcctagggacttggtgctctgtccctagggactgggcctgcaggctgcccagtgtctaccccggaggagattgcagcaggtcttggggaccggacgccaggaacccctgtgttggagactgaggtctgaaccttcaaaatccaaccatcccccaccagggaaagaagtctgagctgagctggtccctgggaagctggtccacggccagccaggccctcggcaggggtatttttaactggaagcagggagcgctgcatgaaggaagctccccttgctggcaactgcaccagtaacacacttgctgcgcagctgtgtgcactgccacccacaggcccttctccttccctccccaaaaggatgcacacacccaacaggccctgggtcctccccaaccgtggtcaccatgtctgctgcccactcccacctacgggaccttggcacaggcaggagcgcagggtccgaggccttccacaaatatttgggcagagcacctcaagacagccctagggactaaagagccgatgaccctctggccccatctgctactgcccagccctctcctggtgcccggccggtggtgtctacacggagtccacctcctctaccctcccgtctctgcactttcctgaaagtgctttccccacagctgcccctctgttgctaagcccagtggcctctcaccgctgaccttctcaggcccctggcttccctcccacctcgctgactgttccgcctcaggctcccctgatcaaactgtaagcactgatcagcttgtctggggctctcttggttttagactaaaagtctcacatcctgggaactccctcagttcagggcaaactgggactgtgggtcaccccagactcaccctgaccttggggacaccccagatcaccctgaccttggggacaccctagactcaccctgacctgtggggacgcccatgtctccttcttgcctctcgtttcctcttgatctccatgctctccctaagggatctcctgtatttctgtggctgcagctgccattggggtggggatgatccccaagtctggggtgccagcctaactttctcctgagatccagacctgtaagctaactgcctacagggcatctctgctcagaggtctcctggcacctcgaaaagtcaccatgtctacatctgacctcaccatctgaccccaaacttctctctccagtctctggtttcaatgaagagctctaccatccatcaggagattcatatcccaggcacctcttccagccaaaggaatctcttcttgtcaatttcacctcctaagtcccttgactccaagtatttctgtccccgctgtcatccccacagtgcaggtcatgaccatctctcactttgatcggtgcgaagtctagaggaagtgtcaacagtggccattcctgggatggccagtggtatgggttggactgtgtccccccaaatatatgttgaaatcctaaccaccggaactgtgaacatggccttatttggaaataagatctttgcagatgtagtcaagttacaatgaggtcagaagggtgggccctaatccaacatgactggcgtccttggaagaggaagacgtcacgcgaagacagagacacacaggagagcagcatgtgacagcagaggccttagagattggagggaggcagctgcaagtcaaggagtgctgagaattgccagccactctcagaagctggaagaggtgataaagggtccctcccctagaagctccagaggaagcacagccctgctgatgccctgattttggacttgtagcctccagaactgtgagagagtgaatttctgttgcttaaagctatccagtctatggcactttgctacagcagccctgggaagctaacatagggagataaggacaattttcattttcttagcatacttttcagtattttagaggtgatctgtagtggatacacaagacttttatgattaggaaaaacatagtcattcttaaaaagaagtgctcatcagtaggaatcctaagcgtcctattggatttgtccctgagaattgaagccatctatgccacacagtttactgtcctcatcaacacagcttttttattccacaggagactcttgcccaggaagataaaagctgaacataattttattgttcatttcggggactttgcaaataacatttacacaaacagcagattgtacaactttttaatagcatctaatgactgtcttttcaccaagactcttcaaaaactcttgccttgccatgtcttcccatcccaaactcctaggtcatggctcttcccaatcttaatcaagtccctgcaggaaagatgctcaaaactcagacatatcccatttgcatttggttttctgagatgattctaagactctgtaaagggtcttctcccttaccatggtagcaggaaacctggctgccttatctgagggttgatttggtggtattttcaggcatttgacatctgatattcaaaatattgcatttatggaatgcaaccccaatcatccctgaattgtagccagggaaacaggctcctcgaacttcagttgctcaaggccacaccattagtagctggcagagcctaggtccagctgcctgcaaagcctgcactcttacccttctcctactttcccaaatttagtgagactgtaatacaaaatacttatattctggtgtctggctatttttgggtggtattcggctcccaattgtccagataatggccccaagcggacaggctatggtcctcaggaagacatcacccaggcaggtttcctgcggggagtcaccatagagaccatttccatcacaggcagcagcagcctgagcttccgggacttctgtttccctgccctgggcctggagaatgttaaccatgaaaggcaaatgggcttcggttggaaacaagccattattagccactatttcaggcagtcacatttcccacaaggcacttgtgcaacaagttagcagggaagaaagaagccgagcctttgtacggcggggccagaacacaaagctcattgtgatgtttgtgcttctattcagacgccacgtggtacggactccacgccaacctgcagactggattcttttcttccccctcagtaacaaacatacacatttgctttaaagtaggcagaatttgcccatgggtggtctttgatttggaagaaatcaacttcaaagtggtgactcacaaaaaacaaaggtggcttgactcattcagtgctcgggaaaggggatgtgtgtgcagaattcactcatccagaagcagaagttgaagacaaggagtaaatacttcaggtagacaatcagccagtcatcctgcttggtcttgtaatgggccatggctgctgagtctagagaaggcacacaggctgggctggggaattaccgagagccacctcacccctccaggagccagggcgcctcagccaggttccctttgaagggcttatttgcctgtcttgccagggatctttgaggctgtgggtgtgcagcatagagtaaagatcagggaatcgcaaaggctactggatgccttagtggaggtgaatttgggcagaattttccagaccttcaggtgccggttttgttctcttgacaaaggtctaacccacaaatcttccacagatttccctggccttgttgtgttcttattctctttccctgtctcatcagggttgcaggacacaagtttatctgtcatagacacacactctttctctctctctctctctctctctcacacacacacacacgttcagcatggctgctttgcagtggaaacctgtactgcacatccacaggtgtggcaggagtcccatatcagagcatctgtgccggaaagacctcaatgatgacccattctaccttacctggcctctacaccccttgacttcccagatgaggaagcaggtccagacaggcccagactgtttggcagaagaagtctaagagcctctggagtcttaactccttgggttcaaaccctgatctgtcacaaggtgtgtgacactttgggcaagtgacatgacttcccatctctcagtgttctcatctgtaaatggggataatgatacctacatcacagggttgttttgaagattgaatgggataatctatgtgacgtgtttagcatagtccttggcacatagtaagtatttaatgttagcttttattattacatgccatagagctggtactagaacctacgaccccaatcctaaaactccactctttgccccagcaccatgctctgtctcttgtccggacacccgtcaatggactttctagggaaagtcaacattggtgataaaggcagagaaggcccactgtactcagtaatcgcatttgcttcttagtcagtctgaacctcagtaagtctgaagcctctatggtttcctcttcacctggacctacttgtacccctgggcacctgcacactcacagagtagttgctctttaagaaattgtccccattttgggaagctcttttatttcagaaccatacgcaatgaggcattggttttgcccatgaccttctcttcctctatcattcccaaccccccatcaggccctcctccccgcttgctcttgcctctttggctggtgctgggccaaagcccaaattacttccctgagccactgctctgccttttatttcaagcttatgggctcatggagacagggagagaagaggagagaaaagaaaaggtggctgtcttatttgggatttctatttgcagaccttgaagaaggtaatttaagactgttagtcttctcattaaaaaaagacaaaacccatttttcttcaatttagtttgagagatagggtggtggaagagatataggagaaaaaaaggaagcctgtcaagaatggcgatggatgggggtggccaggcaatcgagcagaaggtgtttggaggtcattctgcagtcggccctgacaagagactgggtgcagcgtcctctgggtgccatgggtttttagtaagctgagggatttgtgggggcctgggcgctactgtctgcagtttccctccctctgcacgtccctcccctcccagccagggcccactagactcctaacacagaaccttctctcgatctgcagcagaggggcacgattcactcactcaaaccaaggggtcagggcccctgaaaggaaaattgtattttttaaaaaggacttcaggcagaagataggacttaacaaagaaaaacgtaattctaatggtaaaattttagccattattggtagagaagatagaaccacagaatgtcagggttaaggggaaaccttggggctcacttaattcaatcttttgcagacagaatgaggaaatttacccatcggagctaaaacgcacatcttaaaatgacttctctagaagtctgtaatcgatggttgcagttttctatcccccactattcaaggctccatctcctgtaatatcccaccacacttgggtccctgtgctgggagtggcaaaggccccaaagaaacttggagccggatgcctggatctcaaagctagccttgccattttactggctgtgtgaccttgggcaagttacttaacctctctgtgcaggtcacatttatggaacactttcgcgtgccagatgcagacctaagtgctttacgtgcattattctggtgcctctttccaatacccctatgaagtagggctagtcccattttgcaatataaccgaggttcacacaggttaaataacttgtccaaagtcacacagcaagtaaatggcaaagccagagttgaatgaggaatccctggctctggcctcaagctcttacccactgtgcagtactctcaggaccagggaacccagggcaaggcaggaaggggtggggggcagagactgatggtttccctcatacccactgtgcagtactctcaggaccagagaacccagggcaaggcaggaaggggtggggggcagagactgatggtttccctaatatttgttctcccctttttcattgggaatagagcatctccattttaattgggtacttggtcacctggagcaaaagacatttcccagcctctcttccggctaggcatagccaggattccctgtttgccggagagcggtatgtaagcagaaatggtatatgcggctttttagaaggatcgttttttggtatctgtttcatgttcatttacaaagaatgtacatcctgtcattgtagagtacagaattctgtatgtgtcgattaggtcaaatttgttaattgcgcttttcacatcttctgtatccttactgatctggtgtctgattggtctattggctattgaaagatgcctgttacaggctctccctacaagtgtgaatttgtctataccttatttaagtctcttaaattttgcttcgtatgttttgcagatattttatggagtacaaacagatttggagttaagatattattctggcggattaatccctttatcgctaataatgtcattatctgtcttttaacagttagaagtatatatatatatattttttctgagacagagtttcatttcgctcttgttgcccaggctggagtgcaatggcgcaatcttggctcaccgcaatctctgcctcccaggttcaatcgattctcttgtctcagcttcccgagtagctgggattacaggcatgcaccaacacacccggctaattttttgtatttttagtagaaacggggtttctctatgttggtcaggctggtctcaaagtcctaacctcaggtgatccacccgcctcggcctcccaaagtgctgggattacaggcatgagccaccgcacccagccagaagtatctttagagtggtgggggcatgtctctcttcaccctttccttcttcctgttggttggaatgctgatgttgtggctggagctgaagcagctctattgaaccgtgagctgaaaactatgggttgaaaaggagtaacaattagttcaaagattctgggtctcagatggtttcagagctgccgttcatccctgagctgcttacctccagacttagtttacattagagaacaacaaacttgtagcttctttaagctacatgtttgtgccaggggcactgcagtgggggcaataagaccagaggcccatggcaggcagtggtcgccgagctcttctgactgtacaccccctcaaatttcttatttataatttttattcatgtactattgtccatttatatagcaggtattcatcaaaacttcattttgcagttttgaaagttaaaaaataatgagggatagggatttcagtaagttttccctgtatcccagtatattgtctgttgccaccttggagaccactggtgcagagtgtgcatggagtgggtgagagctgaaggttaggtggggtcaggtcaagagtgaccttacatgtgaagctcggggacttgaattaatgtcctgaaagtgatgctgaccccaggaaggtggtgcttaagttcgagaaagagatggtggaggaatggagataggggacagacacctgactggcgcagagggaggccccatcaggcaggcagtgtgctccaggaagaggcaggagaggaaagaccccaggagtgggcagaggaagaagcagccaggtgggaagttgaaacagaggcgggggtagaaggagaaccaggggagtgggggtccaggtagccaaggaggacagggtgggctgcagtactgcatgcttgctaagaggtccaagcaagggctcacctttgtccatgaaggatacatggggatcatagggatgcaccatgaagggaggggaaacggagacctggaggtgaatattttcaaatgagaaggctgggagggaagcagctagaaggtcagggaaaggaagtgcttttgtgtgatgagggagggcggctcgggcatgcctagtgcactgggaaaggctccaaagcctgcttaactctgctgcctccggggaaggggacagggctgaaggaaggtgagtggaagagctccagccaccacttccagccctcctcctgactgtcccagtggattcccctctctgggacctcattgtaccccaatttccttttccctggagagtgatatatcaggggaggtaggtgggggaacatggcaatggctgcagctgcccctggagaggagaaaagcaaacataagccacttgatgtgagcttatctgccagcgaatggaggggccagggctttggataatcccccaaatcatttttcattgagctttgagtgtcttatgattgctgggaagccgactggccttcctaagtgggtgttatttctgttcatagcagttgggagctgggcttgggaaccaattgaaggaagtgttcctgaggggcaccagctagacagcagggggcaggcaaggcagagactcccactacgggtgtaaccaatgctggatgcagaatcacggacaagcctctgaagacaaaggagagggaccgtacctcccagatccctggcctcgcgacgctgatctcttccttggcctctaaaaggcacatctgtgtcctccctttggccctttgttcaggctgtggcctgaatctgaaacccctgctactctgtcccaatgctccagggctcagggggactctacccctccctgaaggtggctatttccaccttcccagacccccagggcaaagcccagcatccacggactgcagcagttggcctgggtgcttctcagcatcttatttaacagactgactgatttggttaccttcccgagcttgtggactgagatggggacagcggtgccacacagtggggtccagaccctctttctggctctgccctttacttgctgcctgtgcttggcgaggcaagctacttccctccctgagtgtttggtttcccacctgcagggaaaagcagcggctctcctgcttaggtcttagaattacctgggggactcgttaaagtgaagatctcagggcccacccccagagtttctgattcattaggtttagtgtgagaccctgaaggatttgctcccaggcagggtgactgataatccccatttgcccgggacagagggatttcttgggatacaggagtgctgttcagggttaaacctgggcaatcctgggaaaccaggatggctagtcactgctcccaggtgctgctggtcttgggaccacactttgcatcaatgttctctaaggtcccttccaactctgaaagtccctgtgcctgcagtataagtacccttcacctctgaaacaggc

SEQ ID NO: 2704 - DNA, 4958 bp, Homo sapiens
gcagactagacgctgagcgctcccgtgcgcagcgccccacgcagccgggacgcggcgccgctctgcgggtggaaccgccgcgcgctcccggcctcgggagctgagcccgagagaacttcgctgccttcgggtcgccgctcccgctttccactgtggaatgtgcagcttgggatagagagaaaccagggtttggggagcggtcctcctggagactttctctctgcaagtctccaaggttaagcaattctgacccactggaattcccagagcctgggagttaagcctaaaacgctctgttgctttaagcggcgcggtggggagtcgctggacactccttattttggttttacattaaaaagaaggcggacgagaagatgttgtaggtgacttcctagctgtgttaagttgctcctgggctgtgaatggtgttaatttctgaagtgggcggctccaaaaacttaacaaggaaaggtaaggtggtttttggtagtccttctaactattgtcccttaatcttacatttgggtcccaatttttgaagtgtatatttttttcttattcttctctctttagctcttatccctcatgctatcactcatcttctgtctcttggtatatttagtgggaaataaagggtttataaaacggttttaaaagggtcaacctctgggaaggcagataatcatatacagtcagtcccatcgtgtttcctgtagtgatgaatcttttcccataaaagaaactgatttttttttttcactcttgaaaatacatgattggaccgcccagaagcacaggtgactttagactcagattattacagtgagactgaggaagcgtcctggacaggaggcatctcatttaagtgttaaccaaggcagaggggggtcttcctgcagtaatttacgtctgaaagtaacactcggtagaggtgtagttgtttcaaattaaaaattcagcctgtagaaaagggtaggactgacgaattatgacatctgacaaattagcagttgaccggatatttaagaaatcagataaaataaatggaagtggaatttttcaaataaatgactcattttttaattaggtaaaagttcagccactcttgggtactgtcccaaggcataagtgataggaagataccatcttcaaggtacttacaggccattaccgacctgaactaaaaatcaaaccttttttttttatctggtggtattttaatgactcactgttttctttagcaggaatatagattttaaaatgtattctttaaaagttttaaggcaaggtcatacgaatttctcaggggagggaaagcaaagggttgacaacccaacatgaaggagttgccgaagttttgagctcaaaaggttggcaattagatccagagcatttgagaattgcaggtgccgattctaaaaggtgaaaggtggtcagcggcgtaacacacaacctctagataaaccaaagtactcaacctagagcataagaagagatcactttgtgggagtttgtgttgctattaatttaaacaatgatctttgttagatcaatgacttgaagtcttggagggaactaaaatcaacccagtctgaaaggaaaacagaaggaaaaaaagaaaggaggagatggtttggtttttaatatttttttctggtctgctttacccttcaccttgttctgatatacacactgttggcctctttgacttaattattgcatgctggaaggatggggtctcagaaatttcccaagcacctagcttcattattaactttcagtatgtgtcaaatgaagaaataagcctagctgtgccgtcctttacctggctaggtaggccatgctttaaattaattagatcaagatattctgaatatcaatcaattattaaagatttattatcttcctcttggtttttgcgtttacagaagtttgtaggattgagaattcatcatcatcattttttttaccaatctctatatttttaatagtcaacatatttatttttgattcccccactgtgctgctttaaattaaattttgaaagaattctgcccaaagcagtagtgatactgaggatgaaataaagacagaaagcaagggaactacatgcttctggacacgtgttctatagacttgctctaactagtgttaaagactactcatttttttcctcacatgataagaacattcatattagactatttggtttactgttctaggtaatgattttttaaaagattgggttaagatgaaattattttcttacaaaaggatttaatttgcttttcaaattctgctctgaagctcaagattaaatcatgtcccaaatgactgagctttcattgctatagaaaagcatttggctatttcagtaagtttccgcctccacatcttaagtctcttgatttttcagaaaaggtcaggggagtggatataagcgtgaagggagggagattttcttaaaattggacccaggctcaagtgaaactgtgattaggtaatcccagaagatacataattctggggaaaaaaaactctgaagagggtttaagtttgggattcatgagacttagaaaaagggtatgcttagaataaaggtagaatttgtgtgccaaactttgatgaagttacaatgaagacattaaatgcagctttaagtgcttgtcaccgtgattccaagctacaggttatattgcagtgtttcagctactggcctgattaggagatatattttctttccctcttgggaacagtctctgtgtcttaatgatgatgctgattttctggtttaatatcataaaaggtgtgtgttggtcccaacattactgctccaagtagtggcttcaaagagcaactggataaagattttcaataatagcaatgcagagatgacctgggtttcaagataggaggcctttggagccttcagagaattgtcatagaaatgatcagtaactaattgctcagttgccacctcaagttgttgtttccatcttatgcgggagagattcgggggaaatggcaccctgccattttttgtgtgtggtcctgaatcatcctgttggtaaaactcctgaggtcgtctgagctggagttctgattgcttctgtttctctcatagttgcttccccgtctattctgtgagcgtctgtatggggagaggcagtggggagggcgatctcgtccccttgaagtcaatgaccacctgcttttaaggttctcgtatcttttgctctgaaaaaggtgtgggggaggaaaactttcattttccagcgaaagtagaaagggagagagtgtctagaggaataaacggccaagaaacaggtaagttctgaatgtggtcctagtgtggaatttaccagaaagctcacatggagattaccactgccctcaaaggattgcaggtaaactagcaactgtgggaagtggaggctcctcctctccttttgtaattcaaatgttcctagtgtactgcaatagacactagtttgaatgaattcaagatatcatctcttggtaaaaccaaaagtaaactgattacaaaaggcacaaacccttcaaccatactcccactgtctgcctttcctctactttctgtgtggtttaagtacacctgaaaaaacaaaacaaaacaattacagctcagtttatgtaacttgcatatttaacaggagcatcttttttggttgttatgaatcttccatttttgtcatcataggaacttagtttatgtaaacaacgatttgtgggtgtgtctagatgcatatggtttatgtgtttgtaaagtaaaatacataaataagctgatcacgtaaaagtgattgtgactatagtagctcttttggtgcaccctatcaaagcttttagagtggagtcattttagaaatcaaaagcacaatctctgcttttctgaaggccatttcagggagatgacatcgggagaagacagagtgctagtgtaaccctgaaaaccctttgtgttttaggaaaatatcaatcttttggtctcaggagatttctggttctgcaaaatgtatgctttatttatagattacactcagccacattaatcaagaaaacaacatccagtctccccaaatcacgatatttgtctttggggatgctatatatttgtggttctcatgaacatggtggccctgcacgaagaccacagtgggttcctggtgggtgtacgctgaatgagcctcctgattgtgccttgcttcaatgaattgtcagttttgctcatattccctgagtatccaccagctggggtggaagacaacccgttcccagacgctatggataatccacatgtgggtgagcaagagttaagtatatgtaccaatgggcagtgggtgagtgtacaatgaatgcagggcattgtgcagctgaaacaggaacaggacgcctgtacctgaccaaggaaatgtcagcatattaatattataataaaaagtatctacctttcagagcactgagacctggctcaatcatgtttgtaaagcatttcacgtgccccaagaaaaacaaaaagtacagaagtacaaaatggacagggttttttcaggtgttgtttctcttagatcaatttaattcctattctgaaaatgtgtatttgagccttgtaagctcaggtaaaccatttgtgtttcaaaaacgagggttccaagttggtgatgataataccaccgtgcctggctgcattttttttttttttaatttaagatagagtctcgctctgttgcccaggctggagtgcagtggcatgatcttggctcactgtagcctccgcctcccaggttcaagtgattcttctgcctcagcctcctgagtagctgggagtacaagtgcacgccaccatgtctggctaattttttgttattttagtggagatggggtttcaccatattgcccaggctggtcttgaactcctgacctcaagtgatctgccc

SEQ ID NO: 2705 - DNA, 5683 bp, Homo sapiens
cctggcctcagcttcccagcagagggctcttctgcagaaagtgatcccaggatagggggctgccatgggagtcagggatttgcaccccaaatttcaggtggtatctgagctctgtgtgtccttcctacccacctctcagggcccagcagctcacctggaccacggaaagcacagaaagaactggctgaatgaatcaagagatcaagtgttctccctgaggccctgtaacagctctgcagctgactgcccagaaggaagcagaagtgagtgacaagttgggggaaccagagcttgcacaccataggcctgaacactagcctctggggaaaggcaagtccagctgaccttggtgaagttaggacccgggccgaggccacctcttctggttcaccctctgctggcctcccagcttctttggctcagcaacacccaggattccaggcatgtttgcctctggccttctaaaaatacccaggccacccagcacctcccagatgtctgagcgctgagtctgtgatttccctgccggtaatgggacagccccggggtgggcaggcgggggtggctcgagcagctcaagccacttcctctgcctcccatcccctagcctaccagaagctggacccagccctgcctcccaatccttgcaaggcaaaggagggtagaggctagcagacctcagagattgttgactccagtctcttcttgggacagatgggagatctgaagtctaaggattgctcatggcacttgtgccattaaggtcctcctcaccccactccccagcactgtgttcatgcctgctgctgtctcacttcccacatgctacttggagtctaggtcttggagcccaacctgacttcctccatgcagctgaaagctcctgacagcagtgaaggggaggatccctgtggtctccatggtgcctggaagagtgtccaatccagagcacaccatcagtaaacgtagattggattgaacaatgtagtggcagctggggcaatgggtggagcactgggctggaggacaaagcctctgaattctatctagcccagggtcagccactgtgatactatgcatcctcatcaattgccctggacaaacctgtttctcctgggctggataggatggtgtctaaggactgagccagctctgctgatatgaagctgcaagctgatgccctgctggatattcctgtcccttctctgctctactgtatgtctgggagagatggcacaacctgtaggttccatcagctccaggttctcagcttctgctcctccctccgtgcttctgaacattccacctctggtcctagcccctgaggcccagctcttccaatagtgccacttccacctctgctgctgggtacacaggggtgaatgcatacctacctcgctcactaatcatgtgaccttgggtaaggcattgcccttttctgggcttcagttttatcatatctaaaagggaataataaggcctaccttaaaggagtgctatgaggatgtaggagattccatagctcagatgtcaggttatatatcacctcctgcagaaagtctcccctgtcctcccaaggatggctcagatagcatttgttgctggctcttcagttctgaccttcccatgttcacactatgtggtcattggctctctatgcatccatcccccaccaagctgtgggctcctcaaggccaggagtctccaggacccagtacaggacctttacagatgaagtgcctgggaacgttttttgacagacacagtggatgtgagttccctgaaggcaagaccctgttggatctcacagcaccaagcactagatctggcatgagttagtcaaggttttggagcagaagaatggatggaggaaataatttctgaatcgaacttggaattgaactgcctgaactttaatgccctttccagccttagggatgataatgaattaccaaagtgagaaaaatggaggcgcaagctgttgtcatccttccagaggcaccctccaagtgtgtgtgggtgaaatgtgagctggagagaggattgacaaagagcagtgaaaacatattcctggaccccattctttttttttttttttttttttttgagatggaatttccctcttgtcatccaggctgaagtgcaatagctcaatctcggctcactgcaacctccacctcccaggttcaagcgattctcctgcctcagcctcccgagtagctgggattacagacacacaccaccacgcccagctattttttgtatttttagtagagatggggtttcaccatgttggccaggctggtctcgaactcctgacctcaggtgatccacctgcctcggcctcccaaagtgctgggattacaggcatgagccactgtgcctggcctgaaccccatttttatctctggatttttctctctgttgaagaattgctgcagaaaccatattctaagtataaaaggcctttagatacctaagatgatccccagaaccttgatgtgaatccatttactcatactttacattctcactttacactttgagcatgaagcccatggtgatctggttgtaaaaggtttaaaggttaattggcagccaatgttgggggtgagaagttgctgctgcaggcaggcaggtattcaccaaggcagcagagagaggaggcatctgccaggctggtagaaaggaaatagaaaaagaaaacaggccgagagcggaggctcaggcctgtaatcccagcactatgggaggccaaggcgggcggattgcttggttgcagtgagccaagatcgtgcactacactacagcctgggtgacagggcgagactccatcttaaaaaatcataataaataaaataaaaatacaaaaattatccaggtgtggttgtgcatgctgtcgtcccagctactcggggcgctgaggcaggggaattgcttgaacctaggaggtggaagttgcagtaagctgaggtcacacccctacactccaggctgggtgacagagcgagactccgtcaaagaaaagaaaagaaaatagaagagaaaagagaagaaagaaaatgggcaaaagcaactaaaggtaccacagatcaaaacctttaagatcagcattgggtacaccattgcatatctgctctgggcaaatccctttctgggcctcagtctccccatccgtaaaatgaacaggttttaccaagggctctgagggcttatgattctccaggagtttccttatgtgaggcctttctgtccccaaccatacagatcagatgaggtgtcatcaaagtcaagactccaatttctagggtttgtgggttatcaggctttcctgccacaaactttcctgccacgaacctcctgctaggctcctcagggggagttcactactgtggctgtctgggccgagcccccaagaagaaacaaaactctccagggtctggtgcagaggctgtggcccaaggtctgcttgctgcctaaggaagatatgaaaaggaagcctggctctgggtgaaacggaagtgtctgaggtctgacagttgctctcagcatggtctctgcagccaggagggaagtaaaactgtctgggcatctggtagtttctaccctgagagtccacaggacagtgacaagtggggcctggtgcaggcctgttctctggtccagagccctagcttaggccagagacagtctttggagagatgctggcccaaagatttggagggagggcaaaggagaatactctgaagctggttcatgaccttaggcaaatctctgtgcctctttgggtccagtttctccatttgcaaaaatggagtttgggctaaatttgcctgtgcaataagggtttctggaatggtgggcactggggatacagagacaatttggttacaaggaacctggattgttaccctgctggcaagggactcacagcctggtaggacatagttacagaatcattggttaattgtgattatcaatgcatgtataggtgccgaaaagctgtggacatagagcattaattcagcattcatccagagatccagggaaggttaagcaacttgcccaaggtcatatagatattaagtggtccacctggggccagagtcttgaaaggaaggggaattcagaagaggacatggctaaatagaagtctggaagaccagtctgcttgtgcttgctgctgtcatcaagatctgaacaaagttatggagacccagaggaggggagattaattctgacttaggagaaggaggaagacttcacagaagcagaggttttgagctggggtttaaagggcaaatatgagtttatcaagtacagaaagggagaagggtgttaaaagctgagggaacagcatattcagatgtgtgatgttgctaaaaagagcctgatgagttgctggaaaagttgtctgtgtgtgtttgtgcgtgtgtatgtatgtgcggtatgttaggaacaaagagtacctaaaatgggaggactgagagatgaggtttcatagtctggctggaatcacacagtgaagggccttgaatgtgtttggagggcagtgggcagccataaaagggtcttaagccacggatgcatggtcaaaatagcctattagcagtcttgctcgggctgctaggagggcagaggaccaaagtacagggctggggccaggcagaaacaactgtaaagaggcagtggcagaggattgagggtgtcaggtgtcaggcctagcccctgtcaagaaatagaaacttttcaagagactacataggtgtggaggaaacaagaattgaaacctgagcccagctgtggctgtggtctgggcaggtgccgtaagcaagggaagtgaaagggttggggtgacttccagttgaaggagggggatggcttgtgggggatgctaggggcctgtcctcaggctggagacctgttccaggacggggcagggtaaggggctatgcctgaccaagcccctgcctcttgttcctgccctcagagatcccacttccttctgctaggccttaactctttctcctgagatattccttccctactccccacccctcccagtgttccatcccaccctttctagcatcccatggttcctatccaggtcctgtaggccctccagcgaggctgccccgagcagctcaagttccttggcttctcctacaccaacctgcactgctcatgctgcctgagcagtggtctgaccatgttttgccttgaggcctgttttattctgtagtgttggttcaccaaactagtcactgttacttcactgtcacctcactgcagctgcaggtgcccctgtctcattgggctctgcccacaagagctcttgataagtcagaatcagaccctcatgtgcccagagaagctagcattgagtatgcctggcccaaagcatgaacttggggaggggctgttcatgggctgcgctgatgagttctttgttctggggcaaatcttgacatgattgtgtctgtttttttcatttgttcgtttgtttgtttttttgagacagagtcttgcctcattgcccaagctggagtgcaggggcaccatcacagctcactgcagcctggagctcctgggctaaaatgatcctctcaccttagccttgtgagtagctggggccacaggcatgtgctgccacgcttggctaattttttattttttgtagggg

SEQ ID NO: 2706 - DNA, 1773 bp, Homo sapiens
gaaagacaaaggccagacttgctgcctggaagtggaagcagggctctctcatctgtgttgagaaaggcactcatctgtgtatctagcgagacgggagaaagtggtcattttagaacaagccaccacaagccagacaaaggaaaccaagagaatttgccagtagcagatataccctcactagcagatataccctaaatgaatggcaaaggaagtcctctataaccagaagaaaaaggattgaaaaaaggagtcttagaacaccaggaagaaaagaagaataatggaaaaagcaaaaatggcaagttgagcagtgaagtggcagcctgctgtgttggggtgatggcctcacttttgtcatattaatgtgagatacataagcaggaaagaggttagagaaatttcctgaattacctggagccacaaagaaaaactaaaagctaagtttttatttatattgctagcatttttgttagatacaacggtatttgataccttttaacttctatcaaatgtattatttaaaaatcatcaatctagaattgatgcttaataattttgtcaaaaatattaagtattaatcattgtattatcatgatttttttttttttgagacagagtctcactgtgtcgcccaggctggagtgcaacggcgcgatctcagcggctcactgcaacctcagcctcctggttcaagcaattctcctgcctcagcctcctgagtagctgggattgcagatgcgcaccagtattatcacaatttaaaaaagggttttgtaaaatattaactctcaatctccactaaacctaaaacatctcatatacactctaatatcaaaaaacaaatggtttaactgtatttaaacagtgggaataaacatagagaggtcattatgtcaatatcaagttcactctaatgtgtgagtaaattttatgattaagaagtgttgtctaattgttttctaaggcagtgggactcacctagcacagctgtgaaaattccacatcttttcacactgaagtttaaattgaaaaatagaggccatgtaagtttatgaagtatggtgataaagttatttcgtgaccgttttttttaaatgtctatcaatggaaatactgtaactgatgtggtggtaatatttagctaccagaaaaaaaccatggctaagccttatgaatattatcacttctccctgtataggcctgcactggaaaagtcattcattcaactacagtattacacctctcatggtaaccattactggaggctgattctttacctctccacctcctttaatctgtaacaagagagtgatggctacaattccacagactttaaacactggtcagcatttaagtttttcttctatctttcaggaggcactaagaacatattttgcacaaaaaacactaataagattgcagaataaaagtctcaatcatgcatatattctttccccacttcttttactcttctgttgagttagtgcttaaaacaaaataccgcacctttctccatcaatttcctccatgaaattcaaagtattcaggtgaggataggttattttcacatccagcctgtgtatctcgctgcatcatgagaagctcagctgctgctgttgttttgtttttgtctgaaggcaggatgtgtttgattctctttttaaagttactcaagagaaaatgttgactgctgtaataaaaatctggatgaaattgtagtacaatgtgttctgagactcatactctaggaaatgtatgcagagtacactgaga

SEQ ID NO: 2707 - DNA, 652 bp, Homo sapiens
ctgtcaattctttgaacacctgttagctagcattccaacttggttggtttctgtcatttgcaaccgagaattctgtctcttttgtctggttgtctctctgtggtcaccatgcctttatcagtctgtgtcatcccgggctgaagttcctcacgtgatatttagttgcttgtggccaaaacccgccttcactgcaaatgcatcggttcctcatcatttctcctctggaccagcaaggggctttcctctcgcccatccatctcccaccttttcgttttgtaggtagaacctggagggagcggcagtaattcatcatccatggaacgtgcctgtctgtggcctggacctgtgggatttggccggcgttccctttgcattacatttggtacttggaagcaagcatccctcagtagggacaaggctccagctgtccctttcattagggccctgccaaggacgtttcctttgttcagcacctcctcctgcctgcccttaggaccatcttccaaaaaactctgctctgccctcacccgctgctgtcccctcccacctgtaagaccaggccagctcagcacctttccctgtctccttgtctagcactgctgcttctgtgtgatgctccggcatggtatttctcccagaaaaccactggcag

SEQ ID NO: 2708 - DNA, 1488 bp, Homo sapiens
ccggagcctggaactgcgagtggccgtggcggtggctgtgctgctcttatacgggacaccccggcacccgaaggtcgagcagggacccagcccctgccacagcacctgccaagcatctgggtgacactgtggtcgggtggggcggggggcttaagtcaggtgaatttgtcagctcgggcagctgtgacaaagttgcacagaccctggtggcttcaactgcaggaactgattctcctggaagcccgagatccaagggctggctcttccgaggccccgcttcccgctcttgcacaccgtcttcctgaggcgccctcacatggccatccctcggggcgtgtctgtcccaatctcctcttcttacaaggacgccagtcatattggatcagggccaccctgtcttaccttgacaacctttacctgtctccaaacacagtagcacactggggccctgggtgctagggcttcagcttgtgaatctgagggcctttgtctgcccaggcactgcctccaatagaacctttggtcctgcaggccggcaggtgcctctgcctccatgcagcctggccttagccctgccttcattccacctcccctctgggactagggatggtgctgggaggccagacaggctttggggaagttacctgacctctctgagccacgaggtcttcatttacaggatgtggctgtgtgtctcactgtgactctggggagggacaaggcttagtcagtgcctgcccggacgcccacacccagcacacagtaggtgctcagaaaacgcagcccagattgttggaggcagagggacccaggggcccctggaacaaagccctcgttgagctggtagagaccaaggccagagagccctaggcacctcccccgtctcccaaggcctctggggaccccctttccaccgagacccctctgcccctgcccctccggtgactcggtggttcccacgtcagtgacagcagggcccctcccgcccaggacaagcaccaccgcaggctggggctgcctttccctcctccgtctcccctctgcccactcggatcccaccagcctcctccaagggcctgtctggcctgcccagtctgcgggactccagccatggtgacgattccccaccatctcttgggaaggactggagtcatggttcagctccaactgggggagtgctccggttgccagcggccagaggaccccggggttggggctgatcctcgtcagtcaccccatcaccagctgaagacccccagcgcctcccatgccccctgaggtgagggggctgcctggagcatgtgcccctggggtgactcgtccaggctaccagagaggctgcccaggagcacccgtgtgaggggctggcctggctcccatcgtcagggccagggccaggtggttcgcaggctgagcctgggctcctggatcttggagacagaggagacaaaggaagaggtctccagccatctgggccattggtgcact

SEQ ID NO: 2709 - DNA, 4844 bp, Homo sapiens
tgctgttatctttagtttattttagccccaatattgtatcatttgagatggccatttcttcatcactctggcattgaggagctatatgtagctacggtctgcaagccaaccatcctgggcaagtcaaacagacacttctacttaggtcttccagtggatgtgcctctctctggacatttaaaaaaatctgaatattgcctatggaatgctgccctcagctgtgcctggagcacagggcacctccagttcggcctctccagaagtaaacttgtcttctgcctatcttgtgtttgttgggaggaggtgacctgggactctactactattgatgaagaatccgaaaaagtcttctattagccctgtgccacaccctacctatgaggcttttgggaagaagcagagaaatcagtgtttactgcagagaacacagaagccagcaagcagcagggaagggaggcgaaccaatgcagcagcccaccgggaccgaggaggacacacgcagagcaagtcacaggaagcgcagctgaaaacaaatggacgcttatcccaaatgcacaggacacttaccaagaactgatggtccgtcaaagtaaagctcaacagctttggctggcaggacagtcaaacttttggacgacagaaagtaacagtgggaaatgggacaacatctgccagcaacgcgagaggccaagaccatggctgctacaggaggggtcagcgtcacagtacacgcatggcggcggttgcacatgcatgcctggggaatgtgagtgttcagacatgccaggagtccagcctcaccaggaaacaggcacacggggacagaggcgcaaacactgaaaactctcgctgaatccactcggctgagcggtggtcacgagagcacggccctgcgctccccacaaaactgcacctgggccccagggcgagacaggcgtggaaggtgcaggggtgtgtgtgggggcaggggctcctggctcagagccgtatccaggaaccccccttcaggctggagccctgccctgagccccctgtggagagactgtggagagccccctgtggagagggtgactgtgggagagcagcatcaggcctagtctcggctgtgaagtaccccccacctccacgcaggatcccggggattctgtcaaggtgggggccgcctgctcagcccaggctccctgaacgtgtggctagctgagtttgcggaagaaaccaggagagtgccaacaccaggcttgcaagcaagaggctccctgactgcctgatcctggagcgcaccccatcctccctgtgttccctgggcctcagctgttccccagtgaccttggagacaccctgccccaccctggctccacaggagccctgcccatcaccgcctcagctctgagtctcccctggggacacaaccttcctcctggtgcagaggcgcaggatgctgcccctaaggcccatcttcctctgcagcatgttttgatgtcagctcattcacaggaaagaaacaatcacatctcagtgcccagaatggggaccaataggagaggtcactgggaataaagcccacacgcaccccagggtccatgggctccccagaaatgcaggtggcctccgccagagccaacaagcctaagttgctgatcagcccctccctgcttccctgtgtggaagaggaaacagaggcccagactagtagggctctgccgtggtggccggctgcgtccccagacctctggtcccagggctggctgggagtgcccctccctgtgctcacttcctgctctcctgggaaatggctcagggatggggcgtgtggggacagatgctggcatagctcacaaaatgcttgcacaagggacactccatggcaggtccctgcaggagagcaaagtcacaacattcagagattccctgcactctgaggcccgcagagcctggccgaccaagcgaggctgggaggatgttgcctgctggtcagggcagccctctgatcagggcggccgagtgaggctgggaggatggtgcccgctggtcagggcagctgagcgtggctgggaggatggtgcctgctggtcagggcagccctctggtcagggtggccaagcgaggcagggagggaggtacccaccggtcagggcagccgaacaaagctggaaagatggtgcctgctggtcagggcggctgaatgaggctgggaggatggtgtctgctggtcagggcagctcaggaggtgctgcccaggaggtgctgtccaggcagagcctagggctggtgtgggtgtgccatgctcctgagaagtttctgggttgtggctttaatgttctcctgcagtgagaacgctgacacttggccaaagggtcctcacctctcccctagtacacttctgagatgccaggaaggttctgaacatcagattgattcctgggactcccctccagggtggccttactggagtcaggagcccctgccccactaggatggctctgcagtggcctgaggacagtgagcactgactggtcactggtgcaaagttgcccactgtgatggttttgaccgttgatgggaaccaagtgaaagccctgcagctatttctaggcatttcagagggtgcttccctgcatgtactctgctgcagaccatcctccctgggccaggagcccgctacacagtaggagattctttttcttctcttttgagcacttttattctctttttcttaatctctgctcctcctttgaactgagaaatgtgcaaatcttttttgttagttttgaggttgcttcttatgcatatttcatctggaactttcccctttgggggtgatctgttctatcagcctgcccgctgctagagaggccgaggtggtccggccagccgtgcgctgctgctggtgtctctgtgggcatgacctggtgagatatcattctgcatctgggggtccatcctatcagccctgtgttctagattccccagtgactgacatttagccagtctcctctgtcactctccagtgacatgtacacactgttggcacgaactgcagatgtcacgttctgtggctgagagcctcagtgtgcatctgtagtaggaggatgtcagtgaggactgtcctgtcgctgctgagctggcaccgactgtgcctggtctacactccaggtctgccaaacgacccagcaaggtccttcacaactcttctgatccaggatcacacatcacttgtgctttgatgcctgcttctgaacaattttacctcctgagatgtccatttttgggagtgtgagccctcctctcctggtgacagctggctgaggccgtccagcctcaggacacacagggaacggctgcataaggagatctggggcagggggcccaccaggatgttctgccctgtggggggcaacaccggctgtggtctgccggcggcatccagggacagtctgtctaggtgaggctgaggccgcccccactcgctccctcacccccatgctgacagcagtgagctgaccacagactgggggagccccacagggagactggcctccccagcacatgccccgcagtgccagacgcggtcatcacagaggcaggtacacgacaccacggacgtgccacgtacccgccatcgggaccaaggaccactgagaaaccatgaaggccatgcagcgactgtggtggcaggaccgtcaggaggccataggtgccacggctcccctctggtggttcacctgcccacctgtagctggggtggcccctccagtgcgctccccagagcagaacaccccccaggcaacacgtctgatgaaggccaacagcgtcagtcctctggtgtttggtgacatcaaagctgtgccgaaaggccttccctcactgctaacacttgaagggcttctgtccggtgtggaccctctgatggcgaatgtggtctgtcttatgcttaaagatccacctccattaactgcactcttagggtttcttcctctgaaaaggaatgaacacgggaaccccctcaaaggcatttttaaatgaagcgtggaaggcatcaaagatgtgctcttcttcaggactcaggcttctccatcattctctgttccttggaagcgtgagggctaaggagctgctgacttctctctcttggccccacttcaagaaaggcttgcttcccacacacctctccacgctcccagtgcgggactgacactctgcaccgggaggccaagggccaccatcgtcttgctgattatatgtcaagttctgtgtgaaatgagagaccatggggattcattattgctggagttgacggtattgcagttttataaccatctaataaattagcatttaatactgagagatttcatcttaaactcagaggattgctttgttttaaagaagatttttgcaaggagaagcaatggaaaccattcagaaaatgtgggagataaaaatcctattcaagaaaacggatcttggatctttgcattcacttgatttgtcagaatattattctgtgctaaaaaatagaagggattaaatgttaaaaatcactgaggcacaattctcttgagttcaccaattttgtactcctatttccagtttcttttcacatacgtcattctccatcctgattaagcttgttctttctgagctcatttctgataccaaaagaagtcataaagttctataagattaagaattctcttagaagtacagatttgcatgaacgtcaaagaaaaaaatatcacattttactcccatatgctttaatgattattttattaggtcaggcatggcttaggttagaacctttgtggttttttttttttttaaattccatttagttaaatgttgac

SEQ ID NO: 2710 - DNA, 1042 bp, Homo sapiens
cgtgagggatgtcgcgggtgagtggtgtcgaggcctgttgggtcagggcggttcgcagatgaaggcacactccacaacttccttctggccaggcccagacatgtctgtccttgtgagataaaagcttccatgggagccttccttcctaatcaagtctcgtggtggaacatctgacccttttcaagaggaaggatgaaaactctacataggaacacgatgtgaatggaagaaacctgtcattatgcaaatagtacggtattccgaacagacactaaaaatagctgtcatctcaaagaatccagtgcttgtgtcacagtatgagaaagtagatgctggggaacagcgtttaatgaatgaagcattccagccagccagtgatctctttggaccttgcattctccatcagattggatcacctcccaccctgaggccccccaagactttgaacagttcttcagtcatccttacagaaagataccctctccagacaaacgcagtatttatatacggtccattggatctctatgaagcaccagaattatcagtgaagaatatattaaatggctcacgggctactgtaaagcatatttctatcgcttgagagtaaaactgctagaaccagttcctgtttctacaacaaggtgttcctttagagtcaatgagaacacacaaaacctacaaattcatgcaggggacatcctgaagttcttgaaaaagaagaaacctgaagatgccttctgtgttgtgggaataacaatgattgatctttacccaagagacttgtggaattttgtctttggacaggcctctttgacagatggcactggtgaggtggattgatgatgaatcttctggcacacctggagcaactccagaacacagtcgtgaggataatgggaatttactgaaacccgtggaaggaagcctttaaggaatggaaagagtggataataaaatgcctgactgttctccaaaaataaggaccttcaaataggagtgattgaaataaatgactacttgcatgttatgctttcatttgggt

SEQ ID NO: 2711 - DNA, 459 bp, Homo sapiens
gggaagaaatagacaggaaacaaagacagaatagaaggagcaatttaagtgccaggattcaaaaccaagttgaaagtgagtggcagaaggtcaagtcaaaagtattaggcatatgtcagtgcacagttactaggagagagcaggcttctgtaaaaccagggaagcacaataggattctgatgaagatcggagacagagatcaactgccatggcctttatacacaatatggttacagtcctgatgttggttgtgctgcattgtcatctggtggctcacttgggagagaaaaactgttcccagtctcattaatcctatatgaatagaaatacaaggaaaacatgatttaacagtagggaaacataaagaagatacaacaattttatttctcctggtgatgtttctttgcaagtggctttggtcaaagagaaggtaagagagcaaagacaattctatgttag

SEQ ID NO: 2712 - DNA, 16482 bp, Homo sapiens
ccctggccgccgccgccgccgcctccggttcccgccttgctccacggcccgcgcttcggctcctgcttcccgggctgctgcgcggaggcagaatcctctcgtgctcatacaaaggtgccggggctcccgcgaggctggtacgcggagtctcgggaatccaagcccgggccgcggtcctggcaccgaagctaacccggaatccaggggcgagtctgagccgcggctggaggagccggtccagctgtgccggggggcggcggggtcgactgctcactgcaaagctacctccgtgcgaccctccccttcccgcctcttcccctccccccaccagcccgatctgggttcttgggcgcttattgttttaatgaaatttttggttgttgttgttttggtccttaaatgtgattttagctgcgagtaacgtgtcctcgctcctctcgcgctctctcggagggttttcagagaggtctcagtgcatccattttctcagatcctctcctttcggggcaaggatctggggccctgaatgagccttggagctcgaagaccgcggctcgggctctcggagggctctgcgcggtggccgaggaagctccggggtgacggcggtggttctcctgggctggacgacgtgaggggagcaagcggattttcccagcaagatctccatgtacagctacatctttagggccgctcgggttaatatatgtcgtcagaggctcctcacgccaatcccggggcggcaggggcggcgcctcgagctctcggcaataaaactttttgatgttcacgttgctaattgccgaggtcctcttccaggattggctacctcctcataaccataagataattaaaacgggggggggcagggttaaaaaaactttttttatcagtcagaggataatgcaagtgtttaacagatgcttcactattaaaatattttcccccaatattgaagaatctctaaccaggtacagtatcactctgctctcttttctggttgaaaagaaagaaagaaagaaaacgcaggtattgcttttcgaagtgctttgtaggtaatcgaggtaagaaaatatacgcaggcagcctcttacaattttatgcaggggcgccgggagcctcgtgacgggcggtgggggcccccacaaaggcgcggctgggagctggcgctctttgccccagcagggacgaggagcggctggagaagggtgtttctttgacccgtttacaggctcgaaacgccggtctcagtggctattgagttacccaccaagttaccccggttagagctgtttggggtggctcacgttattgcggcaaactttggagatgacggctgagtcctccgggcgaacatgtcaagccgattgtaaatgctgttatttccacatccttcagggacaccagtccctacgaagaccttgggcgattttgaagtgcgggcacctcgattccccgaatctgtagtgtggctggtatcggtgttcccctggtttaactagcctgtttgcgggcatctgtggaaagcaggtttagttatcggaggggaaccattaaacgccagtttaagaggcaggccgggaggacggctcgtggatgttgagactgctggccttggtgatcttgaacgcattataacggaaaatggatctccacttgtaagtcaccgggccgcggggcacccgggccgcagcgcccgtgtggcatgagcttcttgagaaggctcacgtgcggcgagggcgggtggtaaatggcaggagctgaaatcaccccaggcttggccccaagccgagaggggaggctgatgtgtatatgcagattccacccgaaggagttcggtgtggaaaacggtgtcaacaggagcccgcgggctgtaaattagagggaggcgagggcctgcggcgccagcgcgggacagggcggcctggggctcgccgctggtcaggccaggttagcccaagggagaccaaagactccaccttgagcatcgccctttggaggcgggcagagtccggccgcaggccacaaagcgatccccacccgaaggactccacaaggacagtcctttccttgctcaccgccgacaaagtggttggggcaggaaggcgaggtcagtgcgaatggagggcgcccaacttcggtgttgcagttgactctgtgctcgggctctgccctccactagccctagagtcttgggcagcaggattgagaaatatatatatttcaggtttgccgcggctgggcggtaggagacagggacttaaaagcccaggattagagtcggtgcagggcccattctttttctaggaaaggggttaacatccttgaacgtccccagacaagcgtcttaaagcattgaacctagaatagggattaactgaaactaggctcgttggtaagcgccaggggcttgcagttgagctcggaacaaaatagtgacctactgctctaaacccccaacttgcgtgggtctgcaattttttagcacaaggagagccttttaaagacctggttcttcaaggaaagaatgcaggtagtgtggttgggggttctgtttacattttcacccggaggcaaaccccgaatgtgtaaatactggtagttcaattctctgacatttgatacgtttttgaaaagtctgtttataaaaacacatttaggccttgggagcaggtagacaaagtaagattgcactggggctgggaacatataaaaattcagggaaattagttggttggctgctttaagacccaaagggagttttgggaattgaagggaggaagaagagtccagaggagggctgagttagggattgagatgctctgtccaccagagaccagcggtgagtggcctcacttttgaaagcttcagaacttgccacatttagcttttctcatgcttttaattgaaacaaacaaacaaacaaaaatgaatgaattacctcgtggctccagatagcattgcaagtggtaaaggaaatggacaacatggtacagaaaaaagaaatcataaaagatgctaatctgaacatcagttctcactcacagtgtcattatcagttaactgctgtggtccaagggcctaagacttgatgtggctcagaaacccaaatccagaggtcactgccttagaaagctggcttgatgagaggggacaaatggatgaaccctagtggtgtccccaactgtagtaactgactcagggaggccaggctggccctgactggttgagctctaccctaaatgcacaaacgcatccacttttctcttgcagtgtcctttggcctgttttgttccaggttttccaggatactgggttagcctgctcctttgggaagttgtgaagcaaggatgccatctcaagtttgccctcaatttaggtgtcctgggcatcctggtggtagtgatggaggtgttggcagtggtggcaatgaaggagagggtggtgttggtgatgagagggaaagtgggagaagaaagggagaaaggcacagtccctgacatcgatgtcagcatggggaccccactcctgggctgcactagtgtagctgctgatgcacatgttgtaagtactcaaaggcccagggaactggcttgctgggggctcctctgggtgcctgtggaggaatcttagctaggagtgcttctctgcctctcctcagaggctgagggctgagccaaaaccggccttactcgtgtccagaaactgcttcacaaggaggcagcccaggtttgggtgagtgtttgggattctgtacctttgttgtagctgatggtgtacctactgtactgcacatgtcaactgccttcagccaaatagacagaatctggttcaagcatttattttgctcctcatgtctcttgtctctttgccgtcactgctacttctttctctggaaaaagacggaaagagcagcagagaggctgaacatggccatgcaaacattttggtcttgtgagatattattatacttgaaaaaatcaatctggtttaaactaattttaaaaaaatctttagttaggttttagggaaaatacagattgtctcagggtgtttattatttcaaaggcaagggcagtttatatcctctgttttgctcataagaacccaaaataaactggacccaaaaagaatcaggccagagggtcataaatgcacattttatgttcatgggaattatggctcaattctcatcatcgtctttcaaatcttgtttcaccttgtttttctaaccaacatagtggaagtgactctgaccgttcccttaagaatctttaatgctcttacatgagatgagcctcagaacaagctaagaaccatcgaaagaacatcaagcctggaaggtgacagaaggagcaatgtgttcttgaagatgtcacctcagcccacctgctccaaggacagtgcttcttgcgacactctgatagctctgcattcttttctgtaccagggtagggtggagtcattttacatgctatccacttagtcccaggatgtttaggatgctcagaacaaggcatattgtctgagtggtggcaagggtctccctctaactggggttgtgtagtccttcctgtttgtgtagttcttcttgtatagtcttttcttgttggcctttgagaagtagttgtctacagacataccaagtgaaagtggctccagaagtgtcgtgctgctcaaagtacacatctgcaaagcagaatcaaattttgttggatttgagtgtctatttcaaaaaaggaagaataagaaaagctgcccttgtgtcttgtgaggtttttttttttcttcttcttcttttaagcaagttttttcctcttcttttaagcaagtttttggttaagggggtggcatatttaggggttggatcctcttcctttctcttccctacatggagagatggagggggaggggctagttcagctgaatgatgacagtggaggggctgattgcttatgaatccttcagtccagctctaattagaaaacagttaagttggtggagaaaatcagggcttgcttagtgcctgcacattccctcctcctctttctcctctccctctttcccttctttcttccttccacccccctccctccctctctctcttcttctctccagttctcccttgtaatttgccgtctagcagcatttgggattacaaggttttttttcttttcttttctttttttccctatcactgaatctgcaactggcatggaagaatgagatactgattcatgctgaagtcttttaagaaaaatcttaatatccacagtcagtagaattttcctttctttctaaataatcaatgactagatcctcatgttaactggtagatatgttgctgcactggagggttttcattgataaggaagaactaaatatttttccaggtgtctaagtgtgtctgtaaatctaaaatcctcattcagactaaagggaccataagataaccccgtgaaggcctcaaagaagcagcatgatgtagatacatgggacgtattattaacgttattatactagtcctaagaggtacagtaaatctgatctttgttaatctttgctactttgtagtaaaatatagagtttagagcaaaaccggtctgagaacctacatcccataggatttatgttaaatactcattcaaattattgcttcaagcaaattacatacacactagcgacattttctttcaagccgggaggaaatcactcaacattcagatgaggaagtgtgatttttcatacgtgttctacggaaatagtaaataatggacttcacctagtctgcagtgtattatggggttcagaataaaatatgagttcaactggcaatttcaaatgcggctttggagagaaaacatttatttgactgaaagatttgcttctgacttgaggcccaggaacattcccagttttaactgtagtgttgcattcctgggaagttctgttccatagcttcctttgcaaattcatgtagatggatttctttagctctgacagtttcctccaaacctttcctacattcttccagggcctttgcttatagacaggggagttacaccaggatggttaggtttcaggttaacaaaaagaaacacttttattgtcaatattaatggcaaacctcgatttttacaaggcttgggtttagcagtgtgagcagatcaaaagcagcttggtttgatttctcaatattctctggagcttagacaattaactgcaattttgctcctaacaaaacaacacaaaaaagttagttacagaaatgttataggtaatcttttggcagagatttttacctgagtacaacatatcagaatctagaaaatttatctactgaacttgagttgagttttgcaggaaaaccccttaagaaaatcttgtgtgaactacgtcctcggttgcaatgccatgagcctgtttcagtgtgtgcattccaggcttgcctttctagctgggtaaggatccggcagactgaggtctccttggtaatttgggtacaccaagtctccagttaatgatagataatcagcctttgggtcattcggtcattctcttattacaaacccctcctgctctctctgatctcctttcaaactaaatttcacacaaacaaataaagcaagacagggacaagttcttaaaaaaagagagagaaatattagaaacgcctgatacagaactctaaacaaggaaaggcaagctaaaagaggataggaaagaacatcttatcaaaatgaacatgttgtgtacaaaacattaaaagaaaaggctctggtttttgttaaagtgacagaaaattaaaataaaaataattgcaggcaccaaagttataaacagggaaggcaggatgctagctggaaatgcgcagcactagggagctaatttgttgttacagattatatatctgcaccctgcttggagaagtgctactttgttccattttccagaagagaatggtttttcttcttaatacttgtgtgaatgcccacttaagttaacacaggccacaactttgaggaatgagaaatggaattgcattctgcttgcgaagcatccaacttcaaacgaagaaattggttgtgtacaaaaaaaaaagtagaatttcattcagaatacgtttggagacttcactaaattggtgtgactgatgcttttttgttttgctgacagaaggcacagatcattcatgggcagtcctctccaccgcctggggatcttcactttcgcagtctacgactgcctgtgactccagaaagacaaactgcagattggccaaggaaggtctgattctgtccattgtaaagatggaagagatgaaaccaccagtgttgctgactgcagatggaagataattgcgtaagttcacacagccatttatatagaattcttgaaatgacaaaattatagaaatggagaaaagaaaagtgcttatcaggggttaaggagcagtggggtggaagagaggtgagtgtggccataaaaaggcaacaaaatggatgcttatgataatggaaattttctgtatcaatgtcagtatccttgttgtgatattgtactgtgtttttgtaagatgttactattgggagagactgggtaaagcgtgcatgggatctctattatttcttacaactgcatgaggatctacaattttctcaaaataaaaagcttaataaaaatgcctactgatcttcaggaagttcagttccctgttttccataactgatctgaaaataggggaaggacaattgagaatttaggagttgtaaactctgaggctgattttcagcgaactactcaaattattctgatttttccccttgattcttattatggattgtaggacattcttcctactattttggagaagaaaaaatgccacctctctatcataggacttctgttttacatatgatttaaaaatctattagctgactaatttacacactagaagatgaaacttggttacattagatccacaatttattttaaaaatcagagttctcatctttcttgtttcttcttcctgccttactttattttcttttttccttattctatttgaacccatattttcctatattgtactgtttagtctaaaaactagtaagcatgcatattgttgattaaattagcaattgacgctcttaaaatgagaactataaagactcttgagcttccacacattatgctatgcttgccatatgcttgggtgttcttattttcggagagaagtaatggagattataaatgttatttttaaaatttactggtgatttgttgagaagataaagtaacaacactattacagagggttgctcttgatctcccaggccaccagtgcagtcaccgagccctctgcaaacacctgataatgctgaagagtgtgttagtcattgtagaggagctgctgtcatgacaaataggggttaaattgtgagaatttcaggatatattttggggaaggattaaataaatcaggggacttgctgacagcaaatagtatctttgatttgaaacacagaatcagagaattgagatgaatcccaggtggtggttgggagtttgaaaaagtcccagtgagttggctgactaagtgtagacttcatttcaacatcattaaatagtctttaagtggtgacttaataattgttgccccaagaaaagattttgctaaatacagaggtggaattaagtatattaatccaagaaacattttatttaaatgattttcctaacagtaaggttggaaggccctagaactgcttctaggagcttgaagtgcatttaatagttaactgtcagaatgaaaaatgaaattttaaatttcaacaatgcaattaagttcttattttcttatgatagtgaataataaatttcattcaaggacgccattggcagatgttgaaaagaaccattttcactccactagcttgcagtggactaagaggtagcaggaagggagattggtactacagatcctgaaaaaacaaaacaacacaaaacaaaatccacaccacaaatggacacttccagatgcttaccaacaggaagtgccttggaggacaagggctgtgagacaggtgaactctagggaacaagaattcctagttccatgtctgtttacaagaatttgtcatgactggttcacctcactttatagtttcctcagaccaaagagacaaagaaaaagcaaaaaacaaaaacaacaaaaattctgaaacgaatggacaatacaaccaaaactttaatatgaaccaaaacaaaaattgggctgattttatgaggttgacttaaagtcaggaaaagaatgataaacttttgagaggaagaaagaaatcatcaaagccacgaggagctcaaagtggtgtttaatagcagctatcacattgcgcccgagccttgaccacttctgacgcagctgtttcgttttaagatgttcccattcctgttccactcacacagtcctccacagtgacctgagtgcacgcacccaagccggcaggccactctagaaaaccgtaaacccctcagagagtcactgcaggaataggggaaatggaagtgatgaaattcaatatagcatttagctgaatcatcatctgaggttaagcccagtgaacaattagcagtatcgggagtctcctcgtacctgtcaaaatcgcaccgacgggattttgtgcaaagtatgtatgtgtgtggaagttgttttttatgtttaatagcaatggacctggggtagtaatttagatacaactttttaaaaaaaatactaaagggcaagtgtggtgagaagcttcttactcaggaggatcttttcaaacattgcaaaacatcaggccttgaaataattcattttattaagtagcgcactcttgtcttttcattcacaaaaggaggatgatttattatacagataaatgcttgcataggatgatgaacacctgtaggaatgcatgatattctggaagttgatcaaggtccactgtacaccagtaattagaggtcatgatgatgataataataataataataattaataatggcacatactatgtgtcagctcctgttctaacttcgtttctcatattaacttatttatttttcatgattagccactaagatacaattattatccctgttttgtagacaaggaactgagtgaagctcaaagaagtaactaggatcacactgtcacacaggcaggaatgaaacccatgcagattggctccttagtgtgctctctgatctattatcattcatcacatatttactgagcatctagtatatgaaaggtattaggctttatgcaggcaatactttagcgaagccagggagatgtctctgccttctttgagcttatagcttggtgggcaaaaagctaatggtttaactgtataaaaaacttgatgttgtgaaatgatatatgccaatgtttgcatggtatgatgattttgattaagcaccataataaaaatagggagcctgggtctcacacagccttgattgtcttcttccttctgctccccagtggagtgcgtaggaaggtcacaccctcaatgtcaggctccttcactgttctcagtgagtgtctcaggttgtaggctacatgagcaggtttgcacctggatatgattgtggcagtaacaatagatgtgactatacacagtggcagtggcagtaggggtgggagttgggtgatgggatgatcttagaatgcagtgttggtattaactcagttttgttttgttttgatgtacagccagccatacgactctggaatatgactctgggtttaccaacttggggatggcccggggatttaggagatggccccaatggctctcctcttttttagaaaggactgttcaagttccttttttttttctttttaaacaggatctcgttttgtcacccagatcgggggcagtggtgtaatctcagctcacttgaacctttgcctccctggctcaagtgatcctcctgcctcaggtgtgagccaccatgccaggctaatttttgtattttttgcagagacggggtttcaccatgttgcccaggctggtcttaagctcctgagctcaagtgatccatgtttctgcctcccaaagtgctgagattacggtttgagccaccacatctggtttaagctatttcttctaaagatatagtcacatctattatctttgacccctgcctaagcaattctgttcagatcttaagactatttcttcccgggattcaaactcagagttaagtagagtcaactatatgaggtatatgtgaggttaatttttgaaacttttatttttaatttcatctgggatctcctctagggaagaccactttatgattatgggttgcattcccaagttcagttgattgaatttattcatacattatttaataaatgtttattgagactgaaaataaacttgaaatcctagaattcattggttgtcttaaaaattctaaatatgaaatgctaactttagcttcatgagtatttagaatagaaaataaataattcaaaaattgttcaggaaaaaaatccatgatttattctactctggaggagcatattcaatttaaaacataccgattcgtataaacttattggtaatgaggcgatatactttttatgagaacatatcaaaccatagacattgagatccagcatctcctgagtgagtaaaatgtcagggttttattgatactaatgataatgggagtgacatatgtgcatagagtaagtccatggttgaaagcctggctgattaggcgctgcgttctgtggtttttgccacttgtgtgtgattaaaccctgcagaatagagtctgttgccatgtatttggttcgtgaagaaaactagtaaagtgatattgaatgaatgattcagtttctcaaaagggtagactattggcctaacaccttcctaacttggagctgtcaacgtgtttagtttggttctaatgggagctaggctggagaagagaaaagttttgtgagaaaggttatgtgatattaataagaaccacattccgtttgatgttttctcaaatgattttttttatcttcctaagaaattgaatgattcaaaaataataaatcttccttttctatggcccacaaatgatcaacattttggatgatcaaaacaattttgtctttaagatatcacaacttctagtgcctctttatttgccagtgctgatttacagcagaaagtatcacttcatattttttccaagcatcaaagtcatgtgttttacaaatattcacaagtgcttaaaatccatgaacctctctctgtattcctatttttttattcttctataagtatgtatttaaattggttaaacagatggctttctacttttgaaaaaaaaaaacccactaagaatattcacctcaagatggagaactcataggttaaatttcattctggaatgcacgtttacaaccaggtaattaacctttgaaaatgagggtactcgaaggaaacaaggaaaatcttaacaagatgatctcactaacgctggtgtgttagacttctcagaagtagagatgccccagaagtttaacaatgaaaaactttaaaatatttttaaaaacatagttaatctttgtagctttccagttttcgtcctttattacgataaccttaggaggtaaacgcttcaaggggtgtatccttataatcataggaattggtacacagattttggtggaaagatggaggtgtcaacattaaccagtcaacatatatttgttgactgcctaccacatgcacaagtctcttccatgcttgcgaagagatacagtgatgtgcaatgtgtagaatctgcccttcatgagcttttgatttagttagtctgagaaggaatagatcagtgaaaagttaaaaggaataatagatggagtgttgaggcagtccatgattgttatctgagacattgagtttacaatgctaagttaaaagaatgagagatcactatgggatagaatggacaggaagagttcctctccttgaagcttgcattaagccataaaagacaaagcaattttggaaatgcagaatttggagatatgaagaaagaataattcccagaaagggagaagagttttggagccagacagatctgggttcaaatcttggttctcttgttctctagctgtgtaatcttgggaagttacttagcttttatggacatcttctataaaaaggatatgatagcgactattttgttaattttttaggattaattgagataatatatataaagtgttttaagcacttgataaaaggtaatcctctcagttggagagaacatcctaaacaagtctggaggaaggagacagccagccatgttcatgggacaaaaagaagactattatgagtggagggaaagattaagagaagtagagtgagatcacatggaaagataaattaggattagcttcagccattcacttgtttcttcatttaatactttattgcactctttatgtgggaagctctctcatgtgggaaaccctctgctcggcatggatatgcagagacaaagaaaacttagccttggatttctcttgaatgtcaggttaaggagttggaacttcatgctgaggagaattatatctttcaaaagtggaggagcttgaaagtagcatttttggatagttaacatggaatgtgattcttgtgacccaagatatgcattaagttaccatctcctagtggttgatggttaatgttgtgcctggagatgtgacccagattctcttgtaggtcattcctgacagagggtccattccaatgagtgaggaggaggagcttctgggctgaacttaatctcatctcctgaaataaagcaatgacattgaaatttttcatattgcacttgtgtttacatttctcatctaatctgagatattccacgtttggtgagtcttgctttgggcctgcagtcttggtgacccttattagttgcactggaatagctgtctattcagggagaagtagaatcctgggaatctggtcttcagtgactttctccatgatcatgaatttcatgagaggaggtccccttcctgttagtagatctctatagcaagaggttctgaggcacacaagcacactggatactcacctacagttctagtttaactgatggaacataggtatttctttcatgaaactttgcctggataaacagcttctgtatcttctagtgacaaaattttgcctcctgttttcccctctagctctagtcttaatctctacttccttgttcagtccaaggctcaggagaacccagatcatataagatatggaacctattgcttcctaggatgtccttgtacacagtgactaactgctaatttcaaggatcaatttctttctggagttagaatcatattatattatgtttcagaactgaaataaaattcttttaaggtgattatattttggctctcagcttggaagatgccactggggcatggcatacaagacacataacttataggaggacctcctttaatgcccaagtgccagcttcatgcttgttgttatatatcattttattcctggctttgatgcccacacacagacatatatccacacaaagttcaatctatatattttttgtagctgtttagctcaggtgattagggcattgagctaatgagaacaaggtcacagtttcagtctttgtgtgggccagcaaggtttgctttgttcagaggccacagacctggtccagccagctgtccagcacatgtctgccccaagtcatgagaggacggggcaggagtgtgtggatggacaagagcaaatccatcaccacccttagaaaaagtcaagtcaagcacgtgtcctactaatgggggtcaataatgtctcatttaaatggggctgacattttattacctcttgctgagagggtcttttgagcaccaaatttaaacattgtcgcttttttgtgtgaatttatttctaataaatggaaggttgtacaagaccttagatgattacaggtttccaaatacagattaatgacttcaatatttaagaagttgatgtgatattaaaaaagaaagttcagtatggctattcagttatcttcccttattaaaatctgttttggctaatgaaataaaaagttcataagttcttccgagagtaagtgagaatcattgccttcattcaagaatgaaaacattattattaaactcattgataatgagaccattaaaagttagcatgaagcaggtacaatacaattctttattattgaagtcttcagatattacccagcctacacatcccacctttcatttttaggcaaacaaattccccaaactatattttttttaaatttagcattaggtcttgttaggcttcaaatgggatcaaaaccaatcctttccaaagtgttctaccccagctgtttccctcacctgggtggtagtgagtataaaggcatttgatacagaagggggtggtggggcagagaacagaaaggaaacttggtgagagaatgatgaagaatgatatattagagattcttttaaaattcattcattaaacaaatgtagcataatggaaatgtctattaaattttttggcataggtaatgcacttgcaagggtaaaaacagaaatatgagatggtattttatgaaaagttttgctcaccccgcatccatcatgaacccaattctactgcccttgtatagccatttttattagtttcttgtgtactctttcagaatttctttatgccaatatatcttaaactctttcctttttttcatacaaaaattaacaccctatcaattttgttcctggcagggtgaggtggctcacacctgtaatcctagcactttgggaggcccatgcgggagaattacttgagcccaggagtttgagaccagcctgggcagcttagggaaaccctgtctttataaaaaaataaaaaattagccaagcatggttggtgtgtgcctgtagtctcagataactcaggaggctgaggcaggaggatcacttgcaccagaaggttgaggctgcagtgagccatgattgcaccattgcactgcagtctgggtgacagagaaaaactctgtctcaaaaaaaaggtcttgagcttgctttttctacttaacaatatgttttgtaaatctttctgtatacgcaaagtagcctcatttttcatagttgtatatcattctattgatgtgccacactttatttatctacccccctattgatggaccttcatatagtttctaatattttctattacagacaacaatgtattgaattactttggaatgcattaggtagaaagcattcttctttctttaaacatttgcgtagcattccactgaatggctatatcataacttatttctctagccccctattgatcgtcattgagtttccaatcttttatttttaaagacaatgtcata

SEQ ID NO: 2713 - DNA, 47056 bp, Homo sapiens
cctgccgtgtgaggtgtcagtgtgcccctgctggggggtgcctcccagttaggctgctcaggggtcaggggtcagggacccacttgagggggcagtctgcccgttctcagatctccagctgcgtgctgggagaaccactgctctcttcaaagctgtcagacagggacatttaagtctgcagaggttactgctgtctttttgtttgtctgtgccctgcccccagaggtggagcctacagaggcaggcaggcctccttgagctgtggtgggctccgcccagttggagcttcccggctgctttgtttacctaatcaagcctgggcaatggcgggcacccctcccccagcctggctgccgccttgcagtttgatctcagactgctgtgctagcaatcagcgagactctgtgggcgtaggaccctccaagacaggtgcgggatataatctcttggtgcaccgttttttaagcccctcggaaaagcgcagtattcgggtgggagtgacccgattttccaggtgccgtctgtcacccctttctttgactcggaaagggaactccctgaccccttgtgcttcccaagtgaggcaatgccttgccctgcttcggctcgcgcacggtgcacgcacccactgacctgcgcctactgtctggcactccctagtgagatgaacccggtacctcagatggaaatgcagaaatcaccatcttccgtgttgctcatgctgggagctgtagaccggagctgttcctattcggccatcttggctcctcctcctttttttttttttaatggagtttcactctcgttgcccaggctggagttcaatggcacaatctcagctcacttcaacctccacctcccaggttcaagtgattctcctgcctcaggctcctgagtagttgggattacaggcatgcgccaccatgcccagctaattttgtactgttttagtagagatggggtttccccatgttggtcaggctggtctcgaactcctgacctcaggtgatccgcccacctcggcctcccaaagtgctgatattacaggtgtgagccaccatgcccgacctacttttatttctttaaggaatctccacactgttttccatagtggctgtactagtttacattcccaccagcagtgtaaaagtgttcccttttcaccacatccatgccaacatctattatttttaaatttttttttattatagccattcttgcaggagtgaggtgatattgcgttgtggtttttgtttgcatttccctgataattagtgatgttgaacatctttccatatgctttttggccatttgtatatcttttgagaatgtgtctattgatgtccttagcccacttttttataggatttttttttcttgctgattagcttgagttctttgtagcgaatatgacgtatttcttaattttcagagttttgtaatcttcggagagaaaactcttaatttttagttttgtaattcattttgtaattcagataactacaaggcagattggcataaggaaaggtccattaatttagtagagttagcatatttggaaaataagggatagaaatattgattccaacagtagaaaatctggggtggagaagatgaaatgtgaccaactatttgaagtatgcataagactttatgcagaagagggagagaggaacagttagggcagatgtgattgtatgatcaaaggagtaggaattggacagtctgaaattgtatagttggagataaatttggatggaaatctgaggttactaaaggtattgcataaatgaaagataatgccagagtacaataagagttttcagaattacattttctgattttgagaatctagatataatttagtaactttttgctccaatattctcaatagttttttagtactagattttacattttaatatataatttctgtttttattatttttttcctaaactttttcctaaaattatttttgtccagtctagtacactgtcagtttatccttttcctatggaaataccttataactggttttcttgtttccccttttgccctcttccaactttttttcctgtacagtagccacagtgaccatttaaaaaaatgaagcaaattttttcactcttttgcttcaaacttgtgggtggatttccatcattctattttaaaaaatagattaatgaacatctagaagactttaaaaagaaataagctatttgcgatatataagggaaaagagttcgatacttctgaaagaactttctttatgatccataaagcaagacttcctgtcaggggttcagatatataatgtgtaatagtaatagttcatcaccactaggcactgcttcaaggacacacacacacacacacacacacacacacacacacaatcctcaccattattatatgcataaggtactagtatcatctctattttataggtaagaaggcaaaggcacagataatttgtatctaaaaatccagacaaggaaaccttagccaaactggtgatccccagtttcatggtcttctaatttcgtgatcccactgactgcagatcagtggtgtctgcaagacatttttcacttgtcatttcttgatttccatgcctttctactaagttcaatttgctgtttgtttaagtatctagagtgaaaatctgtgggagtgggaattttcttagtgtttgtctaaaaatgtgtttattttgcccacattttttgaatgataatttaataggatatagaactctagactaagatattttcccccagcacaatgaaatattatttttggatgctagcccctgttgctgcagttgagaaatctattgtttttctaattgatttgtttttcctctttggttactcttatttatttttaaaattttattgatgtataaaatacacataggaagtgtacaaatcataattgtacaactctattaattttgatatatatacacacttactttaccactcagatcaaggtttgaaaacatttctaggatccagactgttcccttatgtccattctcagtcaacatccaccctttcccctctagcacttggatctctctccttttttaaaatcataagctcctatctacgctcaattttttttgctcttttatccagcatttctaggtgtttatggatggaagtttttcaggtgatcttgcttgaaatatgacgttaagtagaagtctaaggtaaaggttatttcccattgcacttaaaataaaatctcacctacttaacctggcccacattattctgtatgaactggctcctgtgcaccccttgaacctcatctcacacaactcccttcctcattcaagcagcactggcctcctctctgttgcagagtacaacaagccctttcctaatgccaggccttgtatttgctgtccctctgcttagaacctttttttctgtagttctttgcatggctagtttacccttcaagtcagactgcaatgtcagcgcctcagtgtcctcctcagtgtgaccttaatctctactcatcactctatatatttctttcacagcatttatcacagtgtatatcttaattggtaatttatttttatacttctttaaaaaatcaccttttattttagatataaggactacatgtgtaggattgttacatgggtatattggacccagatagtgagcatggtacccactccctcctgcctcactctagtagttgacagcatctattgtcctcgtgtttatgtatatgtgtgctgaatatttagctcccacttatataaatgagaacatgtgatatttggttttctgttcctgtgttaattcacttcagattatggccttcagctacatccatgttgctgcaaaggacatgatttccttattttttatggctgtatagtattccatgctgtaggaggcatcgcattacccaacttgaaattataccacaagactacagtaatcaaaacagcatggtatgagtacaaaaacagacacacagaccaatagaacagaatagaaaactcagaaataaagccatacacctacaacaatatgatcttcaacaaggttgacaaaaacaagtaatggggaaagaactccctatttaataaatggtgcttggataactggctagccatacacagaagaatgaaactatacctgtacctttcaccatatacacaaattaagataacatttctttttcaaaaatttaatttttaaattttttgtttctgactgcttctctatctcaaatgtcagctctctgaaattaggcacattatctgattcataactatgtgattcgtcaccactatattcattttctaaataaatgaatgaaataacttttgtagcttcagaaaattttaactccaaagaacatatatgttacgtatgcttgatcactgaacacttaagagtctgttctcacactgtgaaccagattcctgcagtgcttaaggcactgctcactaggcaagttagacatcttctgaaatctgggccagttgtggcaagttaatgatagaccatttaatagactagcaaataaatgtattaggttggtgcaacagtgattgtggtttttgccattaactttcaatagtatatcaaaagatatcaaaatggcaatatttctggggtggttcataaacaatctaagccccattgatgttgggtcccactaacccttgttatctcacccccaacctgccttctgggtctaattttaaagttaagctctatttctcccttatctctcttttccaatataagctaccagcccatttcttgctatcaagtttttaaactatttctgcatttcaaatagagtcctgaaaattcctttcgtaaatcagaagggttatctgccattttctaagcagctgatttaagagaattggatatataattgtgccaggtccttagacagctcattatatatgtaagcttatattttattgcttcgagaaaactgcataaaagcaaaatcacaaattccagcagcatactgaagtgactacattgaatgtagatattaatctttgcattctccaatctcttatgtgcaaaaccatttgtgaaagcaaagatagcatgcaagcttcttaatgaatatttgtccagtgagcataagaataacaacattttgatattttcaatccaggtgatagagctttctttttccctctgctctctcagatgtctctagtggagtcaatggttaattaattggtcaatattttaaatatttattgcacttttaccatgtgtatagcaatgggagagggctattatgtgcagggggaagagagtggcatcagtaaggaggtggagacaaagctttaagacagtgtttttacatgaagataagagaacaaaatagtagtcatttagcaaatatttattaagtacctatcacgtattaggtattgtcttagacattggagatacattctcaattctcatggactttaaatactactggagtgagaaaaacatttagcaaacatattggtaaattaaatgatatattatggtgataagtattaaggagtaaaataaaggagtgaggaagtatagcgtgttcaaagactggaggcctataatttaaatagggtggtctgggaaagggacagtgagaacgtgatatttgagcaaagacttgagagaaggtgcaagtgatgtggatatcacaggagtttacggttatagaaaaatttaatattaagcagattatttgtatttgtttctaaatctaataaataaataagaaaataaataaataagcaaaaaatcttgaaacctctatgaatactgtcaaatcagcctgattagtatatgggtctgctctgctagtcctttacaatcctgttcttgcatccagttgaggtgttgtctggctgagcagatgggctgttaataagcttgagttctattgtgccatctgaatcttcttcatctctgtagcattagatgtatcacaaggtgagtcagggagctggtgaggcagatggcacctatgtctcactgtggttgcattaggcaatgtcctatgcatgcatatggaagtgcagacagacagtgcaggtgggtgggaggaaaccaactacccagagaattttcactaggaatcttctcacagcagaaaactggaagattgatcaccttatatttattccttcattacaatgaggacctccagagttttacagcctaagaaacgtgttttaagaggcaacttctccaagaacacttctctaaagaagactttttgtttgctctcttagactggttcaggtgtgactttactatgactttctaaacttctgctgaattctgctcttttcaccactgtacaggaaagggcaggccttgttgactataggattgctatgaaactttcttaaaagttacccagaggtggtgtctgtctttcagaatgtggaagatagtatcactttaatttggccatctctgaagatggaaatagggaagggagttggtattataaggaggaattttgatgttattttttctaccacttgcatatgattaatggccaattacaggtattccaagttagtcataggatccagttattctcataaaattcaaatggtcacctagaagtcaagtttttttttcccataaaatattgggaaagatttatttgtttcattgcttttgttttgttttgttttgtttttggagacagtgtcttgctctgttgcctagtctggagtgcagtggtgctgtcacagctaactgaagcttctatcgcctgggctcaagctatcctctcacttcctgagtagctatgactacaggtgtgcaccaccacacccagcaagtttttatttttggtagagacagggtctcactatgttgcttaagctggtctagaactcctggactcaactgatcctccttccttggcctctcaaagtgctcggagtgcaggggtgagtcaccacacctgggccagaaagatttatatattacattttatgatatctacaaagggaaacttttgctagaagaaaatatgtctattaggcaatcattcatgtcccaaattgcaattacaagaatcaaaaaggatggggagaaataaacatatgttgaaaactttctgtgtgttgggtgctttccatatatggtcatctatttaaacttcacaaaagccccatgaggaaggcattgtcctcaattgacgggtaggagagtttaggaaactttcccaaggtcacacatcaagaaagagttagagtctgagttgaatccagatctgtttgactccaaactacttctcactgtgctatttcctctctgcatggatggtgctttctgactttcccattagtaccattagttacttgttttacatattttattgtctctttggcagataatgggtattaggtgccaagaattcattaaaacattataccataaaacaattatttataaaacaatataatataaaaatagtattaactttctgtattagttatctattgctatgtaaaaattatcccagttgggtaataatgatgcgtcaatgtaagttcatcaattgtaacatatgtaccactctgttgggggatattgacaatgggggcggctctgtgcacacatggagggagaaaggatatatgggatatttctgtacctttctctcaattttactgtgaatgtgaaactgctaaaaaaagaattcttaaaaaaatttcaaaacttatttacccccaaacatagcaagtaatgacaatatatatttatcactttctaagagttaggaatctgacaatgacttagatgggtgattctggctcaggatcccttatgaggctgcattcaagctgctggctggggctgcagtcttctgagggcttgtctggggtaggaggacccatgtgtaaggtggctgtgaagaagaagccccagttttttgccacatgagcctctcactaggttacttatgacatggcagctagttttccccagaccatgtgctacaagagagaaagagagtaagcaagctggaagctgtcctgtgttttacaatctgattttggaagtggtatttcatcacttctgctgtattctgttggtcagtgtgggaaaggactgtatagaggtatgaataataggaggctatctgtgagccttcctggaagttggctatcacactttctacaattttaatactttttcttggttgagaattgggaaaaacatcttccatgaattgtctttttgggcaccttttgcccgcttcttccatgataatatttaaaggttatctaatttgatcattctcttgttagcttagtatcaagcacatgtgctggaaagaactttgattattacttttgtagggactattcaggcttcatatcctgaacactctttatagaaagagatacagaattcttatcctgtatcttattttagctctaaccccaaccccaaacctaagcatcatatgcctgcaaattgcctcaataatgtttaaaaaaatccaatcatatctgatcaaatatagggccatctttctattctggagtatcttttctattactctttgactgcggcaatttttgttttatctccaattgtctcagagttgaagctggcaaagtgagagtaaatattcttccccagtgcaatgcactctgctatttagaccatgtgcatttggtttaatacataagtgcccagtgaataaacatgagttgattttctttaaatgacagctccatcttctcaggacatccaaggtccaaaagaccatctgtgtcattgtggtagacgttgtagcttctccttgcccatcttaagtgcaagtttttacacctcagctcttctctactcaggttgagccccttccctaatccaaggtgaccattatccctcagcagcttagataactcactgtagggattctagtgtcggctttttataaagctctctggcctctcaatcaaagtagtccagaagcccatatcaagaatattttatcttattatttgtcaaagttctactttttggaaggtgggaaaacacttgttaaaaaatgcacatttctaggccttctccagatattctgaatcagaatctctgtaattgggtgggtagggagactcagactatatctgtgattttttttttttttttttttttttttttgagaaagggtctctcagtatcacccaggctggaatgtagtggcatgatcatagctcactgcagcctcaacctcccaggctcaagcagtcctcccacctcagcctcctgagtagctgggattacaggtgcacaccaccactcctggctaatttttgtctttttgtagagatggggttttgccatgtcaccaaggctggtggtttttaatttaaataatacatttattaaaacgaaatttcatacaaagaatttacctttttaaagtatacaattcagtggttttcagtatattcacaaaggtcggcaaccatcaccagtaattaatttcagaacattttttatcacccccagaacaaatcttgaactcattagcaatcactttccatgttccctctccctagctcctggcaaccatgaatctactttactttccgtttctatgattactcattctggttattttatatatggaataatacaatatgtgtggcctttgtattgattggcttctttcacttagcataatgatttcaaagttcatcaatgttgaatcataaatcagtatttcattcctttttattgcccaataataatccattgtatggatatagtatactatgtttacccattcttcagtttatggacatttggtttgcttcaacttctagccattatgaatgctatgaacattcatgtataagttttgtgtggacatgttttcagttcttttagatattgttatggcctaagttatgccctccccacaaattcatatgttgaattcccaaccccaataccccagaatgtgattacatttggatacaagggtttcaaagagatgattaaattaaaatgaggccattagggtggacccaaatccaatctgatgtaagaagagatcatgactgcagagagatacctagggtacacatacacagagggatgaacacgtgaagagaggtggcaagagggcagccagctgcaaggcaaggagagaggctccaggagaaagcagccctggttggcaccttgatcttagttttccagctttcagaactatgagaaaataaatttctgttgtttaagccacccagtctatagtattttgttttgacagccctagcaaatgaatataggtgtacagctagaagtggaattgctggctcatatggtaactgtatatttaacattttgaggaatggccacactgctttccaaaaaattgcaccattttacaatccaattccttcacatccttgccaacacttgttgtctgctttaatttttttttagctatcttagtgggtatgaagtggtatctcattgcaattttgatttacatttcttgaacgattcatgaggtgtgcattatttcttatacgcttgtgttttaaaacgaagttcacaaataatttttattcattccaaaatttgagaactgctgtgcagatttatcatacttcaaagttgttacccagcttaaatgctttatctgggacttcagttgtccaaattaaagtgacctatgctatagtatggtcagtagaaaatatctatgttaaagttaatttatgagtaggccaatcagtccttaggagtatatgtgatgtgacctcagaaacttcacaccagcttgttttcttgcctgcatctgtgacatctaacctctgagagcagtaagtggcaaagtccactttgtcttgggagctagttagtgggaaagagaagccatccttgtgtgatatcctgggtgtgacccttgttatcactagagacacaaccatcactgtgcctcctcatggattaactgcaggctggctgagcctttagaaacaagttcagcatcccctagtttggacttactgctttatccaagtccagcttctgcttttggcttcactcaccttttgaatttacattcttttttgtctaattctgagaaacgtaggtgtttccaaatttacactctctaaatgtaactgagtgttgatataacgtggctctgaaatactgttggagagtctgggaaacaaaaagttgggcaatctttttgaggaaatgctgggcagtagtttttacttgtgtctctattataagtcacatgttcttataaataagcaagaaaattcctttaacattaagtgctgtgtaagaaaactggatggaaatacgtcacttttattcctccttaccattgctagattaaagtgtgtcacttacctgcatgttggggcctcgagatgctgagagtagaaatcaagttctgctctctctccatgaacttttggatcagcaggccgccactgttaatagaagtaatcctaaacccctgaaaatgcagtattattagcttgaaatttctaggcaagttttttttttaaagatttaacaatttttggcaatttctacacatttatattacgtggattgttatttctaattcctgctattaaatatctggcacaaaagtagggatgttaaatctttgcatttcagagctcagctcaacaaacgtggtgaagtttcataacaacaagtgggatgctagtctgtcagttttcagcaaaatgctatctctctttgttatgatgcttcttagtgatgatagtttctctgtaaggcagtccttggtattaactgaacataattaagctttacttctgcattgtagcaattaaagtaaaatagaagaaaaatctggcctgatacatgttagagttgttagattttcatttccatcctctatttctatttgtggaaaattctccattctcccaccattctcctcctaatgaagcttcaagggccctttcttccttttcccgccctctggcattgaggataaactagatcccaagattcagcagctacctcagctgactaggagccagctcaagatttttgtacatgttagattgaaaggcttaatggactcccaagggggagagatctaacaggcagttggacacatggacaacacatttattttacaaagttggacaatgaaaacaatatatcaactcaatgtttctgtttcagtagcaaaatatttgcaagcattatgtaataaaatatgaaataatatagaagtaacctgatagataatttgtacataatgtcttagtaatgtctaaggaaattggtaacatcaattcaaattacagaattatcataatggtttagttatatgaaaagactgttaacatttcattggtcaccattgataatctctttttattagatttatatttaacagtgattaagtaccacaatgtgctggcaacagaatagaataagggctcagaaattgttcctctccagtgatcttataatcttgccttatgcccatgaattttcttttttatttcttctgtgtggaccatggaacagtttgcattattactgctcataaattctgccctgatgagattagttttatagatgtagaatcaataatacttgaacacatttgcagctgtgtactgcccagtattgctcattaatggctttaaaagaatcagtgcattttgctagaagcaaagataatgagccattgattatccctgcacagcacaatttacagcccattttatttttaatgcaatgttaaattaatttgtaaaagatcagaagcattgctttattttcaagctgtgattaaacagttattgaacttttcatggagagcattaatcaattctcatctcttctgatttcccagagttctctgaaaataaagatgaatagcttgtgattacccacacttattgtgaggcagcaaacatggaggagaaaacatccttatggggttcatctctatgtgatggaatttgtcaggaagggttctagtccaagtatttttccttaagttcagattatggatatattctagatcaatgagtggggatggaaatttcactagagttttaactaaaagcaccttgaagagtatgaagatacatagaagttaaggcatgcatgtgtattagttaattcttccactgctataaagaaatacctggtcaggcacagtggctcacacctgtaatctcagtactttgggaggccaaggtgggtggatcacttgaggtcaggagtttgagaccagcctggccaatatggtgaaaccctgcctcttctgaaaatacaaaaatcacacctgagtgttgtggcacacacctgtaatcctagctacttgggaggctgaggcaggagaatcagaactcagaggcagacgttgcagtgagccaatatcgtgccactgaactccagcctgggtgacagagtgagactccgtcaagacctgagactggataatttataaagaaaagagatccacaattccacaggctccacaggaagcacggctgaggaggcctcaggaaacttacaattatggcagaaggtgaatgggaagcaggcacatcttgcaaggtcagaacaggacgaagagagtgaagggcaggtgctacacacttttaaacaaccagatctcatgagaattcactcactatcacgagaacagcaagggagaaatctgtccccatgatccagtctcctcctaccaggctctgactcttaacactggggattaaaattctgtatgagatttgggtggaaacacagatccaaactatatcagcaagagtcatgcttttgctttggaatgatgtatgatttaactatgctcacctacctgtattctttcttcttaaatgtcttttaagctcactttaaaaatatttacaaactcatatagcttttaccttctttatcatttattagcaaacttctatccttaaccgagtctagctaaattagatattaattgtacagaaggactaacatcattgtggtgaattgcttaggccactaaaatgaccttcagacacctgtttgacttcagaagtaaaggactgatttacattctcaatgaagtacttcatagtagatactagggagaaattataggaaaatgagcagagtagaagaaagtgttatatagagtcagatgtcacaatttttgattagatggtgatagaactctaataggaaagacaaaactgttctatctgggaattagcaggatgtagaggcttcttaattacagtgggaagaatagatttagaggggctaagaacaacaactagactttcctattaagggaagggcaagttctagaatggttgggataagaaaattatcctgtaagggctggaagaaggtccacgttaaatttagtatccacggaataaagtcaatcaggcaagcaattacattaggggcccagaaacaggctatagaaatccaagtagtctgtcaaaacccagaaatggggaatgagggacaagttgatcttacgggccccgcaggacagttagggagaaactatgagctcaggattccaatccctacttatcagaactaagtagcagtcctgtttaaagttagaataaatttagtggtgatgttcacccagcatcaagtatctactacacatgctttggcaggtctgatttgttggattagacaacagggacatagggtgaactttagggacctagagacgacctatggagagtgaaatgccttcaaataatactaacagggaacactaatgaaagtgtttacaggctggcccagtaagcaggtagtcatctaaagatgtggttcaatgaccgatgaaaggatcatctgcttcaaaatggctctttgactggcttgctgtctgattcagtatcttcagaccttccccactccctgccacttgctttctctctctttctcctagattttatttactctttgaattattgtttctgaaatatagatacggtgcttgggtaaaaagtcttaatgatttgaggttgacatgttttagactgaggcacagagagaataagacacagaacagatttgctttgtgtagggtaggagaggacagaagaaattagacacttagatagatatctccacagattgcaagcctgggttaaaagtagtgagtggtgctgaacatctggggaattgtgaaagctcttgttgctctgagggagtggagaaattccagtaaaggaatgcagagatttggtaagggcaaacttcagttaccttaaaatgttgtccgcgactgttctgtacagcagtaaatcaacaggttaagtaaggtttacattggaaggaaagatgggttgcgactctttcttgtttgtgtatgtttttgtgtgtgtgtgttgtagttcaaaacaaatacataaataaatgaaattagattgaaatccacaaatgggaaggcagtgggatgcactaacatgagaggcactaagtggtcacatgggaactgttcaggtagtggtgttgtcagagtcagatgtgtagattcctaggtaaagggaaggcatggttagacaaagaaaaatgagggacacataggttatatgcattaaaaggatgtagtgaggtgtgccttaaggaattgtaataagtgacttaaggagaaattgacataagattgaggaggtgttcagtatttatagattcaggatatggggctataaagttacataaaatatttgtagcagcaaagggcttgtgtgaaatcattgtacgtgttcagctttgaacccagatcattgctattatcttttctgtgtcaaagagaggtgtatgctgttttaggaaaactgaatatacaaaagtatatactcatatatataaacatacatgttggaagtgatttgttacattagaaaagggttcatttcagcattgaccatgcattcttgggggactattgcctttgaactggcatggccataggggaaatctgatccaagcttttaccaaggcagggagcccatccatagcaaatctgttacataagtattgcctttgtgttaacacttcacagtatgcagtaaagaaatcactgtctcagttttacagatgggaaactaaagtaagaagatatctaaagttatttagcaaactacccccgatttctaattcagagcttttcccagccggctctccagttgctcatcttccaccaatattatcagatgcctctttgctctgagactttccattaggtggggtattattgagacaactggaagatgatgcagctttgggctcagccctgggtttagacattggctctgtcatctattagctacaattaactaaacctctttgagtctatttgctcacttttaaaatggaatcagatgtctactttatttttttctacaaggattaagtgagatactgaatataaactgcctaggacagtacctgacacttagtaggtgctcaaaaaatgtttgattgctcgctccacatatgcctcagttgttcactttgtctatgaatacatgcagagctatcttaatgacagactaatttctgcaacgtcatgtcctttctaaatatgtagttcatttctttttaacacatgccattcatctaagcctctctgtgggctgtaaaagattcataaaattcttgattttgacatatttctagtgatcgttttgaattagagattaaagtttgaactactgcagaactttgcataggaatttgacttatttgtcttataccttaactgaaataaacttgatattagacctttgcttaagttagctgaattaattctgctttaattcaagttcatctctgcagtggaaaatgacaggcattattgagttatatacacttctcatccttgcaggagcaatttaatacactgcagagcctgtcaaaattcaattcaaggttgaatgactaatgcataaaagtcgattccatatcctatcacagataaagccagttatttctttttattaagtagatggggatgctatttggatctaaggtagtaaaagtttgaaactccaagctttgcaaagttagaggagatgtgagtgtgtggaaaactagggagtttcaggagtaacatctgcctaaagaaatgaatgaacacagacagagtttgacttggtcattttgtcctttatgcaagtacaatttccatagcttttgaatttaggagtaaacttaacacaaagccaagagctggaggaataagaaaagttttctaaggctcttactttctagcaatgctgctgtaatctaaatttatatgtgggtatgtatgtgcatgtgtacatatgcatgtatatgtgtattgggggaacctgcccccgatagtcacgtaggttcttttctattttccctaagtgtcgactggtctgagaaataaagggacagagtacaaaagggagaaattttaaagctgggtgtcctgggagacatcacatgtcggcaggttccgtgatgccccctgagccttaaaaccagcaagtttttattagtgattttcaaaaggggagggagtgtatgaatagggtgtgggtcacagagatcacatgcttcacaaggtaataagatatcacaaggtaaatggaggcagggggagatcacaggaccacaggaccagggcgaaattaaaattgctaatgaagtttcgggcacacattgtcattgataacatcttatcaggagacaggttttgagagcagacagtctgaccaaaatttattaggtgggaatttcctcgtcctaataagcctgggagtgctacgggagactggggcttatttcatccctacagctgtgaccgtaaaagacagctgcctccaaagcggccatttcagaggcctaccctcagggatacattctctttctcaggaatgttccttgctgagaaaaagaattcagtgatatttctcccatttgcttttgaaagaagagaaatatggctctgttccacccagctcactggcagtcagagtttaaggttatctctcttgttccctgaacattgctgttatcctgttcttttttcaaggtgctcatatttcatattgttcaaacacgcattctctacaaacaatttgtgcagttaacgcaatcatctcagggtcctgaggcgacatacatcctcctcagtttacgaagatgatgggattaagagattagagtaaagacaggcatgggaaatcacaagggtattgattggggaagtgataagtatccatgaaatcttcacaatttatgttcagagactgcagtaaagacaggcgtaagaaattataaaagtattaatttggggaactaataaatgtccatgaaatcttcacaatttatgttcttctgccatggcttcagctggtccctccattcggggctgctgatttcccacaacatatgtgtatgtgcatacatgtatgtctgtgtgtgtatgtatgtgtgtgcatgcacattagtgtgtgcaaaaaggcacaagcatgagcataggtcctggcactgcaggcaacctgcctgacatttttctggatgctgaaggtataggagtgaagaaaaattcctaccctatggagcttatattttagtggagggagaaatacaataaataataaaaataataagtatattatgttgtatgtctgatactggtaagcgctacagagaaaaataaaacaggggcagaggaaaaggaatattgtgggaggtacagctttgttaaatagagtgagcatggaaggctgaagtgagccatggaattattttggggaaaaagcattgtaagtagaaagagcagcaattacagaagctctgaggctgggcatgctggcatgttgggagaacaccaagaaggtcagggtttttgaagaaaagtgagtgaaggggagcagtaggagatgagatgagggaaaaacaggagtctagatcctgtccgcctatagaggtgacttaatggactttgtcttcttttggagtgagatgaaagccattggagggttttgcaggaataatatgatctgaattctatttctgtggctgctgtgctcagaatagactttagaggaacatagagaagcagggagaccaactagaaggctaggatatgacagtaaggtgacaagtttttcataatgccactgttgaagcatggctacaggaggagaggctgaagtaggaggaggacaagttaactggaggggaggaggtcagccatgaggccatgttattgtaagggtcatctacatgtgtgaggctaaatgttacctcttgaggagatttgctggatatgacttggggctatactcctaagtcttaatgcctgctgtcattgggcctacagaaaccatcaagaactttcattggaaaagactacagcaggctggctggcattttacctttgttgatatgtacccacagtccttctcattagccattttgccagataatacccaaactcagagttaatacaatgtcggtgcatttattttttgttatactttaagttctggggtacatgtgcagaatgtgcagttttgttacataggtatacacttgccatggtggtttgctgcaaccatcaacccatcatctacattaggtatttctcctaatattctccctcctctagccccccatcccctgacaggtcccagtgtgtgatgttcccctccctacgtccatgtgttctcattgttcaactcccacttacgagtgagaacatgcagtgtttggttttctgttcttgtgatagtaatatcagtgcatttatgatgaaatacactcttccaccaatattctctatgtcctgtcttggagattctactgattaaatacatttctcattctcttggcattgcattttcattttatttcttttgatgagaaattcacttttaatagggaaagtgagctttatgcaggcacatttttagaagtaatttatatggataattgtgtgtctttaaaaatttttgcatcatacaaaatgttcttatgtgataaatataagccagggtttcttttatcagtcagcaaatcaaagcatttaattaatttttgtgtgtggagagcacaatatagaactcagggaagagagctacaaagggaacagaagatataatttttttcccatgaaacttatggaatagtttcagcgtatacagagaaatcgagagaacaataattttcaaaggagcccaccaagcggtcatctagccaaattcctggtagaggtgtgaacagaattaggcttaatcacggaagccttcttagaaagatggacattgatggggccagatttttataatgagcttctatcttagaggtacaaagggagaggaaattccaaggagagaatgaaatgagttccatgcagaagatccaaagtcagtatgtttggggtagaaaaatacatggaaggaaaaatttagaagtgaagttggtgagtcttcactgctgcactggggatttgatatgagaatcaaataatgctggataagtagtgtcatataatgaaaaatggtgctgttgtttttttttttggagacagggtactccagactggagttgtagtggcccaatcaaggctcactacagcttcaaagtcctaggctaaaaccattctcctgaatagctgggattacaggtgtaagccaccactcttggctagttttttattttttatttttttttcttttagacagaatcttgttctgccaccaaggctggagtgcagtggcaccatcttggctcagtgcaacctctacctcctgggttcaagcaattctcgtgccccagactcctaagtagctggaattacaggtgtgtgccaccatgcctggctaatttttgtattttgagtagaaatggggtttgctatgttggctaggctgatctcaaactcctggcctcaagtgatccagcctcctcagcctcccaacatgctgggattacagacattagccactgggcacagcccctgctttattttctttgcacatttataatcaagcacagtctgaatgagctgttttaaaattccctatattatgcatcattttactaggatgtgaagcctgtgaggcaggaatttcattactttttgtcatggccagcatctagaacattgtccgcgcatagtgggtcccagcagacacccgctaaatgaattagtgaatgagctgcagagttagccaacaaagggaagcacgttaagccataggcctggtctacaatggattaatggatttcccattgaactttcagaatctgctggccttctatcacagtcgctctgctgcagagcaccatttttgctattataggcagtaagccagctagcaaacagccatgctggggtacttgccaaactcaacaaatgccatttagaaacaaaagaacctctaatggagacatcagccgtttgttaaacaaaccattagtttggaagcagaagctgcacatgtgatgaatctactaatttacagagcattattggacattagttaattgccagacaacttcatgtcccaggatacattgaggaagcctctattactaaggagagattggatgtcttgcctgttaatgattacaggacgcatatacaagaatgaacgagtgagtagctcctgcatcatcctagtgtttcactgccacttctagaattatttctgagtttttatttttaaataaaagttatacttacacgctgaatatttatttatatttatttatttattcgtttatttcttgagatggagtcttgctctgtcccccaggctggagtggcctgatcttggctcagcacaacctctgcctcccgggttcaagcaattctcccacctcagcctcccgagtagtagctgggatcacaggcatgcgctactgctcctggctaattatgtgtatatatatatatatatttcagtagagatgagttttcaccatgttggctatcctggtctcaaactcctgacctcaggtgatccacccgcctcggcctcccaaagtgttgggattacaggtgtgaaccaccgcgcctggcctttgctgaatatttaaatggaacagaaagataaacaattagaattagtctctttacccgaagtccctttccagatgcatttttttagtcattatccacatataaaatgtcacaagcactcctcttgagattttacttaatgccacatttaggagatttttacagcacaaacaaatataaccaattcttatttaatggttgcatagtgctctattttgtgtgtgtttaataatttaattaatgggacagtactgatagttggtatttaggttttttttttaaactgttatgcaaagaacaagataaatgtacctgtaatgtcctatgaccataatgtcatgagtatatttgtaaagcaagttcctgacagaagtatttctgagacaaggaatatttgtgtttaaaaatatgaaactgctatattggcatcttgaatagaaagtagccatgagagtgcctatttctcttcactgttgctaaacttacatattgtaacatttcagtttgtgtcaatttgaaagttaaaaaattatgtctaatttttatagtttgcatttctttaattctgagtaagtttgaatatcttttccgtataccagttggtcttgtatctctctctctctctctccccctccctgcttcactccctccctccctccctctctccctctctctctccctccccctgtgtgtgtgtgtgtgtgtgtgtgtgtgtgtgtgtgaaggcaaggttaatatgccattcaaaagctttgcccatttaaaaggtgtggttggccttttctaatagatatatatctgtggataggacttaggttccatccctccctgctggactgtgactctgtaatgaaaggactatactgtatttatcccacagtttgttaaatgggtagatttcttttatgtatatggatggtgtaaaaatttgacaagaagtcatttggtatagtaagcatcaggaatagtaaggctaatggatagaaaaataatgaaggaaatcaagcagcttaaaggaagtttgcagccagttgaaatgcaatttgctgaaaacttaatgcaaataaataattatatttgcacagtttatgatgctgcatcacattttcactttcagtttctgacatttgtaggaaaataataaaattttaaaatctccttattatttatttgagatctgttactatttttaacattagtctagcaatgttgatattttctttgtaaagggtagtaagctcagtgtgagttcttaaatatctaggaacccattttttccctctgttaaagcatgtatttaattttatgaagtaagcagaaatatagaaattatatggaaaacagaaaaatagaaattatatactagaattttatttaacttgctggggaaattttttaacatgggtagtgatgcagtcattactttgaataaacttatgtatttatttaaatattatttataatatttagaatactttttcagaccaaatacatgttggaattaagtgtattgtacatattctctgctgttgagtgcatagctgcaacatagatattaaaatcttcttttcaagcaataaaaaactttaagcattgccaacataatttaaatgcatatgtgtgtttcattcttttctctatcataaaagtaatcaaaagagtgttagataccataccaattgtttcaaaatcatgactgccctcatttttgtttgtggtcttaaagtataaatatgtgaaggctacatgtaaacataaagagagcccctttacaaccaatagtccttaaagtaatatactggcacatcaaaaacctgacacagtcttaaatctttaccgaaggtgttgtaagaaaaagcaaacagaagaatgaagtcgtatatataagaacatatgaggtaggtaaagcaatcagcattggttcaagacaataaatcagagcaggttacattatttcctggccacaatccttttgaatgaaaagcaaaggaaaagaaaacacaaagccgtggaagcatagttgttttgggttgaaagtgaaagttggtggacctaaataaatgtgaacctgcttggtagacaggcctctcaagtgtgacttgtctgcagtaaatttaacttttaaccacatattctttcccaaatcaatgagatatttgtttgttttatgggctggaaaaacaaaatgattgttttctaaaagccaaaatattttatttcttttctggattatggaaagtaaaaagcaaaaagatgcaaaactgagaaaaagccctagagcacaactctgattaattactatagctaagtgctctttctttcttctttctttctttcttttttcttttttttttttttgagacagagtctcgccgtgtcacccaggctggagtgcagtgccgcaatcaatacccactgcaacctctgccacctgggttcaagcaattctcctatctcagcctcccaagtagctgggactacatgcacaggccaccacacccggctaatttttgtatttttagtagagacagggtttcaccatattggtcaggctggtctcgaactcctgacctcaggtgatccacccacctcagcctcccaaaatgctgggattacaggcgtgagccaccttgcccagcctgctaagtgctctttctattcacgttctaagtagttttatttagagattattttcccttctgcaatttctctgtctagtcttccctgtcattctttagcagccaagatcactttttgtctagggctccaggccctctcagtcatttggactggtctctgtgggcctttgtttccaatggtcaacactttcaatgacttttttgcctgataggtcttcaaagagttcacagaaaatgcatattattaaaaaaaatgttgttctttgcccatttttaaaatgaggttgctttttgcttgttgacatgaagagacacttctcaaaagaagatatacggccgggcgcggtggctcaagcctgtaatcccagcactttgggaggccgaggtgggcggatcacgaggtcaggagatcgagaccatcctggctaatacggtgaaaccccgtctctactaaaaatacaaaaaattagccgggcgaggtggagggcgcctgtagtcccagctactcgggaggctgaggcaggagaatggcgtgaactctgcggggcggagcctgcagtgagccgagatcgcgccactgcactccagcctgggcgacagcgacactccgtctcaaaaaaaaaaaagaaaagaagacatacaagtggccaataaacttatgaaaaaatgctcatcctcactaatcatcagagaaatgcaaatcaaaaccacaatgagataccatctcctatcagtcagaatggctatcattaaaaagtctaaaaacaacagatgctggtgaggctgtggagaaaagggaatctttaaacactcttggtgggaatgtaacttaggttagccactgtggaaagcagtttggagatttctcaaagaactgaaaacagatctactgtttgacccagcaatcccattaatgggtacatatccaaaggaatatagatcattatatcaaaaagacacatacttgcaaatttattgccatgctattcacaatagcaaagagatggaatcaatgtaggtgacgtcaatggtggattgaataaagaaaatgtcgtacacacacaacatgaatactacatagctgtgaaaaagaattaaatcatgttctttgcagcaacatggatggagctggaggccataattctaagtgaattaatataggagcagaaaaccaaataccacatgttctcacttataacagagagctaaacattcagcactcatggacataaacatgggaacaatagacactgtggactacaggaaagtggaggaagaagtgggagatgggttgaaaaactacctacttggtactttgctcactacctgaggtcgatatacccatgtaactaacctgcacatgtaccacctatatctaaaataaaagttgaaaaaaaaccacagctatgcacagagttgaaaaaaaattttgtgtcaaaattaacttgtactaacttataacactgaacagaatctagtttgaggtactaagaaagataagacatgagtttgaaaagagctcctatcagaacagcatgacttcttcgaaaattgaagaaagaacaaacaccagacttattgtgaagcttgggtggaagaaagaatggtaaaatcattgatcctttatgaaaagtttatggggataataccccaaagaaatcagcagtttataaatggataactcattttaaaaagggatgagatgatgttgaagatgaagctcacaatgtcagaccatccacataaagtttccaggaaaaaattaatcttgtttgtgccctaattgaagaggattgatgattaacagcagaaaaaatagccaacacaatagacatctcaactggtgtggcttacacagttctgactgaaaaagttgagcaaactttccacatgatgggtagagaactgttccacccagaccagctgcagacaagagcagagctttcaatggaacttttaaataagtgggatcaatttcctacagcactggttccaagaattgtaacaagagatgaaacatggctttaccagcacaatcctgaagctaaagcacaaccagagcaatgactatcaaacgttagaggtggtccagtcaaagccagagcagatcaatcaagagcaaaggtcatgacaacagttttttgagatgctcaaggcattttgcttgttgaccttctggaggaccaacgaatgataacttctgcatattatgagagtgttttgggaaagtgatcccaagcttcagcagaaaaacccccaggaaagcttcactggagtctttctctaccgcgacaatactcctgctccttcctctcatcaaacaaaggaaattttgcaagaattttgatggaaaatcataaggtatccaccttacagtttttatttgatgctttcttacttattttgtttcctaatcttaaaaaaaactttaaagggaaccaatttttcttcagtttataatgtaaaaagtcttcattgccatggctaaattctcaggaccttcagttcttcagggatggactaaatggctgatatcgcttataaaagtgtcttaaacttgatggaacttatgttgagaaataaagcttatagttttaatttttatcttctaattctattattctataacctttttgaagttccttgtatttggagtactagaagtgcttcatgatgcctgtagcattcgttgcatgtgtatgtggatgagggcgcatacacacacacacacacgagctgaaggtgaatccatacatgtatatgtgcatgagggtacacacacacacacacacacacacacacacacgagctgaaagtgcatccatgcatgtatatgtgcatgagagtgcacacacacacacacaagctgaaagtgcatccatgcatgtatatgtgcatgagggtgtacacacactgacacacaaacacaaacacaagctgaaaatgcttggagttgtatgtcctccaggaagtcatgggctttcatagccttatgtgatgagggctttgaaagtcgagctcccttaccttcagctgagacaaactttataccccagagctgccctgagaatctggcaaagcctgggacttggcttgtcctcttcccctttcctgtcctgcttcctcattcttttcctggtttctctgggagcagtttcttaataaatcactagcacagaaatctccctctcatgtttacttttggggaatctgattaagagagctgggtatattggagcttaccctgagtcaatgaacagtagcacaagacagtacatctgaatgagtctgaactacaatttcaggttttcttctttgtggttttatttggagtatcacagaaaatttgtgaaatgtgccagacatagttgtgctcccaactcacagatgggaaacaaagggccaaatgacttgctccagcttgtggagcaatcacggcccgggatgcctgttcttcaatgtttcatcttgtgctcgctccgcttcactgttcagcttcttcaagttagagcttttgttctctcccagcgcccccatgaggcactgaaagaaaactaggtcccttttagcttctcgaccctgtactgtccaaaataacagcccctaaccccatgtggttatttaaatgtaaataaagttaaaaactcagttcctcagtcagactagccacatttcaagtgatgaatactcacaaccttgcagaaagttctttggatagtgctgtcttagaccctttactcttcagaagtttcaagtatttttctctttgcgtgtatctgctaacttgatatgtttttctttttttaaaacaatcttgggaccaacatcagggtgattgctaccttgaattcaccattacaggcatctgaatctgcataaacacatgctagatgggctttgggtaaaagagaaggggagtggccacaaatacacatgtaattaggaaagaaaatttcataaggactccatttttctctccctgaaatactagtgaaataattcctgcttttgcctaccacacagatgtagaattgaggtgaaattatagaaataaattagagcaccgagaatgaattagaacaattctaaaacttatctttgagcttatttatgtaggcataatgtaagtatatgggatcattagattttaattaaatgttatatgttaattaacagaagactgctattttctacaaaatgaagaatacattttttaaacagtaataaaaagatttagaaaaaaatgacaaacttatgattttaatctttgaatatgtattatcaacgaagacagtcaatttttttgtgctctggagtagagtgaaaaaaacaacagcatcaaacaatggtaaagaagtgaaatgatagggatcataaaattcggcaggatggtgacgcttgctgtgagaatttgaaggctgccatataccaccggaggctgaggaggctttgtgaggtgatgggaagaattagagaagctgcaagtggtaggcatttttggaaatggaattaaatttagaaaccagtgtttttacaatttaaggctagaatgaaaataaattgtttatgcaaaatttaaatagaagttctttctttcctctttataagtacttttaaagcaagagacactcgaattgatagcaatagaacagaaagaaaacattacatattttggaaaaaaattaaagatttgttttcagaaagcccacattacctgccaaaatttccaatatgtaatttcaactatagagatagagatttatcttttgggcaaattacttttttctaaggcttggcaaatattgcacaataagtcacaaaatgctaagatgaatgaaggtaattgaaatcacatttctcagtataatcacatactcagttgagtataatgctggataatgaggacacacacacaaaatatgtatatgatgaaaaaaatcttcatgtttgttaacattttagtttcaatgagatggactcacttgtttatttacttttaaatttgatttaatgaggttttaaaaaggattgatttaatgagattactcaactattccatctaagtaaatttgagacctaaaagtgctaatgacaccagatgtcactctcaattttaaaaagtaagatcaagacttccgtaggtaaaagaaaaatagttactggggaattattttatattatttaaaagaaagggcgctattaagagaaagcgtagctatgtctactgaaaggaataagagaacatgagaaagctaaattgttctgcataaaaaggccaagggggctggggggatggggaaagaggagaggcattacctctgatgattcaggaggtaggaaaggtgcctctaagccatatagagaaaggatgaagaggtaggtggcagctagagaggagaattggagatgggaggtgttccgtcattcagtgttgcatacaaattacccccaaacttagtgacataaaatgaaaatgtactatattcacagattctgtgagtcaggagttcttagatttgtttgggcagtctctcatgtagttgcagtcatatgctggttggggcttcacacacccgaaaatttgatgagggtgctggagaactcactagcatagctggtaagttagtactggctgttgactcgaggcctcagttctccacgtgggccgctgcatggagctgcttgagtgtccacataacacaataactggcttttcccaaagcaagcaatccaagagggcaagttggaagccatgcttccactatatactcttgatcactcagagccagtgctgattcagtataggaggagattactcaaggtcataaaaatcaggaaacatggatcagtggggtccatcctggaggctagccacgacagagcaaggccacagatatatttattagaaatttgaaaagtatttttacacataatgtgccattaaccattcctcagcctcctcactcaattttcagtaaatctaatacactcattaatgttttgtggagttggatttgctcctgaggtctgctttaagtgggcttgagacaagaggagaggacatctacagttttggacacatctgagttaagtacatattttgacatttttcccaaatgaagcagggagtctctgaattacgttataaaaactcctgtaaaagtgataggaatatctaaggtttctttttctattcttcttgcaagtgacagattactctcattttgtcaccacaattacagtgagaacatctaattattttccttcccctaggcaatgtatacctcagggtgaagagaatagctttcttctatatttgaccttttatattggcttgagaccaaaaaagttcatgtgggagattccacctagtccgatttttgccatatacacatcctcagagggtcacttaaaactctttccttccatgcaagagcactttccctcccacctctcttttcctgataccttgacaaggagaaacaagagccatgaggatccagaatgagaaataggaagacttagggaggaaatgtcctaatccacagtcttctgggaagtcagaacttctcttttcagttcagctcatcttctgtttcacagggagaatgattagtcctgaagaattaactgttcatcaaaaataaaatcaagtaaaaacgaaggtaaaggaaattgactctttaccattgtggaaagggctgaagatctgtcattcctatttcagatttagtcagagagaatttgggtaagcattggctttcataaatgcacttcatggcacacagctccatgaatgttctctcacaaatcgtcagtgtgaatcaatgtaatactcaataacatttccctttggaacctgttttaaaagagctattattgtgatggcaagaatatgctaagcacacagactattatccatttgattttctgctgaagagaattactgcaaaggtaccaaagcagtttgattatcacagggagagtttttattttcagctttttcaagctgtgtattgagttgctttgctttcatttaaacattacattctataattaatttacaatacactcagggaaaagactccttggtgtaaagcaaaaagctacaaaaaagtagaagatttaattccctcaaaggcttcaaattaaatttcaattcaatgcaattaacatttattgaatgtctgcagggatcatagcactgtgtgggtactagaattcaaactatgcagaagttcaagagggtttcaaagttaattttataaatataggtagagaaaaatcagaatcatttaaactatattctttttgaagtctagatttcctttgacagattctcaaaatggtgtgtaatctgattgggagttcccttggaatacggcaaagagcacaaaaaacattctttcttgagtcttaaatttggagtaaataaatttttattactacctcaagaaatggcttaaatgatagaagaaactagtttaaaatattttaactaaaattagtgaatgatagtgttgctttcagaaagataccataaaataaaaagactcctgttatacatggaatttaacatttcagatttggaacgtatttactctttaagtgtcattcaaaaaataacaagtagtagtctggttatcaccaggaactaggaataatttggaaagagagtagagatacttttagaactgctggaatttttcaaaagacctaccaaaatctagcaaaagaagtacatcaaaatttctccagagccctccttacctaagaatgtttcatatatctgccagcccttttcctgcaaaagtcaaagatgggtctagatacaaagcagatgcaatgagttcctttcttaggatcaaaaaccacacctcatctgcagacgagatcctgaacacaaaaacactgtttctttgtctatgttttattatcaatttgtcctgtttatcctgtgagattctttcttaaaattttgttaatgtgattctatgcagccataaaaaagaatgagatcatgtattttgcagggacaggaatggagctggaggcctttactcttagcagactaatgcaggaacagaaaaccaaataccacatgttctcacttataagtggcagctaaccgatgagaccctgtggacacaaagaggggaataacgcacattggggcctattggaggagggagggtgggagaagggagaggatcaggaaaaataactagtgggtgctaggcttaatacctgggtgatgaagtaatctgtacaacaaactctcatgacacaagtttacctatgtaacaaacccacacatgtacccttaaacttaaactaaaagttaaaaaaaattaatttaattctgagtcagtactgtttactgaaaagtacttcctttccccctgccctatggtggaaactgccaccactttcgttgtatattagccaactgtatatttgtgagtctgtttctgcactctattttgtgtcatttttctatttgtctatccttgcatccattccattttaactgttatttgttgacccttgcaatctgaaaatcctctaactttatttttcttttaagtttgttttgggtattcttaagagtttttatgtccatacaagttttagttcaacatcagcttgttaatatcaacaattgaaaacaatagcaacaacaataacaacaacaacaaccaaagccaaaaaccaaccaaccagacaaataaacctcttgggattttatttgaaattgcatttaatctatggagcaatttgaggagatctgaagctttacagtattgagttttctagtatgcaggcgtggtgcattttatcatttatatgggtagctttaatttctcttataaatgctttccagatagaagtcttgtgtaagttgcattagatttattcctgtatttgactgatagttttgaagctattataaagggtagaagtaaaaaaaaatccagttgtttgttgctagcgtgtagaaatacagttgattttgtatattgattttgtatctagagacatttaaaaatcacttatttgttctaatatttcacctgtagactctgctggattttctaagtacaaaactaggttgtgtgcaaataatggtagtcatggtttttcccttaaaatctttatagtgtttctttcatttgcattactgtactagctaggatatacagatcaaaatcgaatagatgaggtaaaagcaaacatctctgtatcgttcttgatttccgggagaatgattttaatgctttaccattaagtatggtatttgctataagggtttttgtagataaggattgatttttattatatctattttagttgttaataattgttaatcgttgtttcatttctttttctttagcctactttctttcagcctgagactgagtcctcctacaccctccaacagctttgtaaacagttttgtaaaatgcctcttgattttccacactgtcaaatctgccagttaatcagatccattcctttttttccttttctggagacatgtagattgtttgcactccacctgggtgcttctaggactccctttgccatcattctgggaattccagttgcctttttctgatttccaggggctgttcttggttccttaattttctttcttcttggcttcttcccatgtttccgtggtaaacaactttagccatttcctttgggcacccgagctcacagtgcagcatggagcatcagggtaggtctgtgggagactgatttgagaaaactcaaatgagcagaggggctttaggacagaaagtgaggaggggaaaatgggaagaaacagctgctatgcttcaatccatgacaataatgaggccattttgagtaacacaaaatttggtcaataccatatctaagaatgtattttccataccatttatcaaaatggctaaagcacattaaaaaaattcaagtaaaatattcacagaattcctgaaaaccactaagatttattaaaatttgaaattaattaccaaagattccaatgaacttttctgtaaataattaatattcattcaataaatattaaaaaatattcaatatttttatatgctcctagatgtttgaaatgcataattgaacaaaatagacaaatctctgctttcatgggggaagataggcaataaacatagtaagttactttgtagcataatagaaagtgataagagatgtagaaaggatatggatgactaggagtcctgggcaggatgaaaagtgcaattttaaataaggttgtcagagtaggcttcatggagaaggtggtatttgagcagagatttgaagaggagcactgcaggcagagaaaatagccaatgcaaaggcccaaaggtgggcacatatctggcatgttcagcaacatggggggccagtgtggctgaagtagagtgaatgagagagagcataacaagaggttaggtcagagagatgatgagggctaagccatgttgaaccacactggccatcatagtacttgggcactcactcagaatgaatataggagccctcagtagcatagatttggagcagagtgacatgatctggcttgtattttgaagcaatcacttaggggtggtgttgagaagaggctgtaggggccaaggacaggaggaggaaggccaggcagaagctactgaagtgattctggctggtggctccaatcaaaatggcagcagtgcaagtggcagtgcaggtagtgagaagtgaacatcatcactgctgggtaacactgccctaaaaccaaagtggcttaaaataatttattatcctcattctgtgggctggccaagtggttcttctgatggtttcttctggactcattcatgtggctgcatctgcggcaaggctggctccctcacatggccaggggaccttggttctccttcatccagcctccagcctttcatcccccagtgctaggccagcctccttatgtggtggccttagggagtattccaagagagggagtggggatgctacaaagtacctaccttgaagtcacataatatcatttctgccacattctacgtttttaaaccaagtcacaagggcagtttagatataagtggtgagggaaatagactccatgtcatgatgggaggaatagcaaagttaattgcaaaggaacctgcatcctggggtaggaggagtttgtatccaattttttaatccaccaaagaagtacttagcatgctctttttttttgttttttttttttttttttttttttttttttttttttagacagggtcttactctgtcactcaggcacaatcatagctcactggagcctcaaacatcagggctcatgttgttttcctgcctcaggggctcctgagtagctgggactataggcatgtaccaccatgcccagctaatcagttaatttgtcagttttttgtttttttaaagaaggggtatttttatattgcctagggtgatcttgaacccctgggctcaagggatcctcctgcctcagcctcccaaagtgttgggattatactttgtaagcccaaagtgtgagccatcatgtccagccaaaaagtattcagtattttgagagtataagttggatatgtgatgtgagagaaagagaggaatcagggatgactttgagatttctggcttaagcaactggcaagtaggagtttttaatcaactgaggtggggaagactgtgggtagactaagttttgggtgagaagagcaggattcagtcaggggaacggaagggcaggctctctgtaccagcactcagtatgcagtttcatatcaagtcaaaggctgtctgagaccaacactggtctttgagagtgggaagttcaagcaagcagaagatgacaagtaggtgtcgctggctctaatggaagatgggcaagagaaggcctctacattctagaaagtgaacttgctatgtggtttgcctggcaacggacagggtgaggtaaataatgccacagaagttccaggatgaaggattacaagaggtttgtaagaaaactccaggggtacagtggttcagaaatggacataacagcctagaggaagacctgggagaagcccttgaataaccattggtccattgtgcatctagggtccttaacaaaaagataaaagacaagtgtataatatgttggaaaaaaaatttcccattcccacacaggtaagtgtctacagcaaagctatccctgggtcttgtaaatgtggaatatggcccacaatttaaagtcagcttctttttttttgagtgaggaaaaatctcataaggaaatgcctgatccttctttaggcataaaaagagcatgattcacacccaaggaagagaatgttggggggagtgcacccacgctgtgtgaaacttcattgtcatgcctctgtgtgagggtgtgtggatacagtgtctgggtgtatttgcacacacatttatttcggcaaatattggtaactgcctgattgacctttctttagggcaaggactcagatggttaggagggagaaacaggttgctcctcaggctggtgcacattcttggctacattttacaaataagctgtaaaagatggaatatatttgctggctggtttgacagtctacccagaggtaggaggatggactctatgacctttgaaagtcaattttcatcccaagatttcatgttccaattatggctgatagactatttaaataaatgatggtttttctattaggaaagaaaattgactggaattcattctatttgagccacaaaaatttgaaaataggtcaactcttaattacccagggtgatataatagggaacatcttggatggattatcccaaaccacaggtaattaacaaaatgtgcaaattaggcactgattcatagcattcattaaaatttacatttaaactactacttaagcagcatagatttatagatgagcaactcaacatggtaaaaataattttaagatgaatatacgcattttaaataaaatgtagagttgaagatattgccaaaagactggacaatctgaaatattttcatactctaaaattcagaacatttacctagtgctgcataagacatttggcagatttaaaaaaatctcatttttataaaaggcaagggagagatcaacagaggtttttcaccccctggaaactcctgtgcccgcccaatgctggacccttccctttgtgctggtgttcaggcccacaaagccacctctttctctccccgacacacttctgtgaaaaatgttgacagaagaacaaagactagggtgagtcaggaagtgagaaaaagaaactagagacaggaataattatagcacaatccttaaccgattatggaaaccaaaattttagtgccatttctatcttacccaaggaaaacaatgaaatgaactttactaaaatttaatatgggttagcacataacacatacatttatatataaatttacatacattggctgcggatattaaaccctggctcacataatcttggtcttcctttgtactctattgtatggcatccagtcgtgcacaggtgtgatctgtcagcctcaagcttcagctcctccatatctctatcatctattattctttctctacctctgtccagccatgctcaagcatgcacaaatatggaagtgtgagaaacttgactcaatgggagctgagagccaatggataaatacttaacctttcccatgtcctggatgaacaattctaaagtgcattctacatggttcttcagagggacctcattggcccttattggcccttaatagtaaccagcccaattatgtcccctttgaattggcctctgcccttccctgttttcccttttccagcccctactatcctgttctccttggtaggattattcctgcaaataaactccctttatggaagccattgtcttagactctttttgagtcttagactctgtttttttgaggaagaaaccaggctatgcaagatttatactaaaacatctttatgaaagggtataagacaaatatttttgagactactaatctaaagcattgattgtcaatgtatttgtaaaaaataagcccacaatatactaatatttgtatatgtggcaagctatgtgccacacatgtgctgtttttatgagcacattaggtatacctctacccccttttctcccaccccatgcagcatattgacacaaatcagaaagagtacttctattatggggatgttcttacatttactcaaagttataaataaagctaatcaagtgtaggctgtagtactttattattaataccaaatttctttgaaggcctggtaactaattgtgattcagaatgttttaggtgggatgctttggttgaaatctctaaagcaaacagattcaggtttagaaagtggaactcgatgctaacaactatttttcatacttaagcaacttctcaagttatttacttataagctatacatataactttacatctttatgtaagagattacatacaactttttgccatcttagtccttgctcaaaaacagctcagaggtttccttcatatatgccaagaaaattaaaaaattaagagtaagttaagaaaacagctcaggggtgttatgagaagggtactttacctctttagcatttttcatcaaaatttgtaacttcagtctaatgagaaaatatcagacaatccaaattgaggagcattctacaaaatgtccagtactcttcaaaagtgtcaagatcccccaaaacaagacaagactaaacaagacaagactaaaaaactgtcatagatcagagaagaatggagagacctggtgactaaatgctttgggctatcctggattggattctagaatagcaaataagcaactttcagtaaatacttttgtaattgcccatgagttgtcaagcactcatgagatgaagttccaactctacagatgaaagccctgtttttgaatcaagcacttcatgagtaaggatttcacaaagctgcaaaatctgctcttgagaacccctgacaactaaatattccatggcttccactgataatcatgctgtcagttaagtattttgctttttttaaacagctgggtatatttttttctctatgaaattctgtgaagagagtttgatgtagcaaatttttttttttaaaaggcttgtcatataccaggaggtatcaacaatcaccaagctctcgtgcattaactacctgtttcacctccattgaggatatgtctcaggtcaataattggatctatggtgagttataccagctgcatttttggattcatttttatatttaacccaaatatatgcttaaacatttttggtcatttttaacaatcataaaaagcaacattctgaatcataaagttatctttaatcaaaaactaaacttggttcaaataaaatgtatttccattttaatccttttcttagaaacctggctgtgataaataccaaggaattctatgccagttcacagcagtaagagtgcagaagtgccaggttagtacaacatgatcattatgttatatgactagatgtgtgtaaacagatccatcaaaatctgtctgtcctttggtaggtgacaaaattagatcaggagacctggcatctatcccagatgatttccttttctttctctatcataaacttgatattgaagcttgaatggatcttgattttggacaattaaaaaatgaaattgtggggagaaggaaaatctttcaactttgaattcagacagatccaacagtgaaccaaaaaaacacttacaattttgcctattataacttgcatttttaacatctaatgggcacttaaaattcatgaatttaaatttgtcattttgactaatggaaggccagagcagaactgctgtttttgagtacatcacatgagtggcaacctagatttgcacaacacaatgctactgccccaaagctcacgtctctcacattttatcaatgtgttgagggataccttggagtcatgggtttttaggatggtatgcaagttgacacccttttggctggtgaatatgccatgcttgccacccagcaactacatctcaattgacttgttatatatgcagacaatatattcgtagattataaaagtaaatctacagagaaatctgaatctgattatagtagtgatggaagagaagataaagttaataagctggaggaaaaaaatgtaaaaatcaatttttcaggtgtgtgaaaatctcagttttatgcctgtcaaatgtcaggaacttcagaacataaaattgcagcatgtcattccctttattatctaagaaggtaatcagtccattagtaaacatatcttcaacaactattttttgttttagcatgattcttgaggcttaagacaagtgaaagaatgaccagagatgatatcaatcatcagttcttcaaacctttttgagaagacaaaaggagcctagaggagacaggaacagtaacagtgttgttataaaagcctgtctagaaaaaaaagagcactgattgggagtcaggagaagcaaatttaagttccagctcttacaataatttttctccactaccttccagaagctgatgtgcccaagaactgagcccaagtcttagcacaagatctccatccatcaaataactgtaatttatcacccagactgagacatttctgagagtgaaagggagcttcatgagtaattattccagaacaactggagtatattgggactgtcttagacaaactaaaaggcaaagtcattctactgccattctactcccaaacttctagactctggctgattctctccacagacctcttcccggtgaaaatatcctcctctttgtagcatatttgtacttctactgaatgataaatgattatatgcattccttgtttttatgtaagaaaatacagtttcctgatattgtttgagaattttagaaattatgtcctcattttggtattttaatccattaatgggaaatttcagactggaagaaagaaaaccagtaaccctagggagatatttttatctataccagtacttttggtcactttcaagtctcctgcctaggcagctgtctgatcagcccatttaaaacaatcactgagataagtactaataaaatgaattcaagaaaattgctttttagatgttaagttgataagaatatatgcctattaataagtacctctgtgcttactctgcacagggttatggtatgtacaatttgtgcacatggcatatatatgatcaatgaaaacatgaaacttgttttaacaaaatcagtaacagggagtaacatacgccaaatgtgtgttggagaaaacaagaaccacgggacccagaaaaggagagaaattgaatttgacatgtaccaggaaggtggatggagcttatacgggtggtgtgtatgtagggcagctggcgggtggcgggtggggggtaggttcggagcatgctggcgggaggacaaccagattgtcttttagtctgccaatggtgacataaaaaaattctgctctttaaatttggctgaccaaattctataagatttgaatcacattttcccatcagaaactaattcacatcacaccgaactgtgaaagttcaatctgcaagacagatttgatttaacagtccatgcattccacttgtgtgtgtgtgacgttattgaagtaggtgtgctctaaaggcattttgtagaaatgcctttgtctaaacggtgcttaggcacaacacgagtggccttgatgatgtactttacgctaaggtaaatgtgtagagaagcctcacgtgtgaatgcgtcgtagtaaatccacagcagactgcagatttatggatatcgttattccgttgtacagacggcacctccattgaatttaatgagctgaactaggtgaaaagttcattctaatctcctggtgcctggaactcaagcactccctgaaatcacagaacatatgccttctcttgttttaaaaactgaaggtgactttctgataaacaagtctctcttgagggtaatgacataggaagttattttgaagacgtttccttcagtgtcttgactgaatattaacctacaacagctacctgttgcaaagctgagaggtgatttgtcaaatttaagatcgatggcagatttgctttaattgatttttgttccctagagtgagtttactactttgagaatggcttagattctctcacctatgtttcctttgctattcagaataagcattagcaagtgatttctcttctgcagtcttttacatggtaattctgaactaattctaacatgtttatcgtaattaggttaaatgtttatgaaagacgtctacaaaactaacctgatgttccctccatatttaaaaaacactcaacaatgaatttaggtaaagaagacttttttgagacagtctcgctctgtcacccaggctggagtgcagtggcgggatctcggctcactgcaagctccgcctcccgggttcacgccattctcctgcctcagcctcccaagtagctgggactacaggcgcccgccaccacacccggctaatttttttgtattttttggtagagatggggtttcaccgtgttagccaggatggtctctatctcctgacctcatgatccgcccgcctcggcctcccaaaatgctgggattacaggcgtgagtcaccgcacccggccttttttttgacagtctttcgctctgtcacccaggctggagtgcatgatctcggctcactgcaacctccgcctcttgggttcaagcgattctcctgcctcaggctccgaagtaattgggattacaggcaccagccaccatgcccagctaatttttgtatttttagtagagacagagtttctccatgttggccaggctggtctcgaactcctgacctcgggtgatctgcccaccttggcctcccaaagtgctgggattacaggcgtgaactaccatgcctgatcagagaatacttttgttgttgttattgtttgttcttgttttttccactatcctccgctagaatagaacttttaaggtctctgatggaagctttgaattctcacagtgctgcattcacacatgggaagcacatcagtgaagtgaaacaatgggtatatctcaatggggaggctcctggcattttgtgggtgtgggggacattttgtgtgtatgtgcaagtctgtctaccttattaaaggacttttacaatcactggaccctacactgtaaatgccaggatcacactccagttactgcaaccaccaaaaacatcccaacacagctatctagcaactcttaaggtataactcattgcagatggtaaaagggcagctgctacctagatgtaagtaatttctaacttgaacagtttatgttttcaaagatgactttgttaagtcgaaatgtagaacacatcactctatatgtaacgcagaatataaatggcgactatgtctccaggctggtgacacctgcctggcttccatgacccctattcacaatccctacttcaagttctcagactaagacaacttaattccaatctttcaatctctttccctcttcctaaaataggctcttcttaaagtctctttgatccaggagaatttacggtgccatatttcaggagtatattgatttcagatcagagttttgcttgatcagaacttgttgtggctctcaccgtatccccagtgagctggttcttttcttacatcccagttactgatgtagtctctatctgggtctcatttgctttatgtcctgctttacttctctctttgctgccactgccagactccctgatggttgttcttcatgtcccacggcgccacttgtttgccgcttttgtggagcctttttgttatcaacacctaatggggcatctgattattccttccttccaggctgaagaggccatgtccatctgcttattgcaatttcttcctgaagattgtttttgggtgctttatcaattgtccacattgttctgggaggtaggtctctagctcctgactctttcctaggaagggcttgcctgagcaccaagcgttaacagctatctcactctactgcagacatgacccagcccaaatcaggaaactggataaaaaacatggaaacaatgctgttgcagtatggaaattaaacgaaactggaaacaaatcgaataagagtttctaaatctttaaatctgatgcataaagtagtcttaattaaagtaaaagaggagataaatgagaatttactttaaaaatctgaattttctgagcctttaaggcaaggtctttagaaactggtggcaatgactttttattatggttaatttcccttcagaacttgtgaatttactgttccttcatatggaaattttaacactactcttaggcagatcagacataattaggataattttttgccacacaagtgaaatgaaaagatagatttccctatccttcctacaagataattgggtaaaaaatgaaatagtgagctaaatgaagaaaagttttaaaaataaatgggtgtgggtaagcaaaatgaacagcttgatggggagatggaaatagcagataaggcaccttaatgcaccttattattattttgtgggtaaaataattttgtcttatttgttaaataagtctgtatttgcgaaatcaaaagagacaaaaagataactactgaaaaaagtgaatcttcctcatacctctttaatcctgctgacccagttgctttccctaggagaagagtgtacattgtggatttattatgtatctttccagagatactattagtttgtttttatttcaatagcttttggggtacaagtgtttttcagttatatggatgaattgtacagtggtaaaggctgatatttcagtgtaccagagatattctatgaataggcaagtgtttgtatgtatacatgcattaacacacacatacatatctaaaaatctgaattacttggatagatttatgtgcaattggcactgaagttgtggaggacccgaaggctcttgtcaagaagttcagtaagatggttatgtcaggctttattaaaaacctttattattagaaacatattttctcttttttttttttgagatggaggttcactctatcgcccaggttcgagtgtagtggcgtaatctcagctcactgcaacctccacctcccaggttcaagcagctctcccgcttcaacctcacaagtagctgggaccacaggtgcccaccaccacgcctggctaatttttgtatttttggtagagagggggtttcaccatgttggccagactggtctcaaggtcctgacctcaagtgatccacctgcctcggcttcccaaagtgctgggattacaggtgtgagccactacacccagctgaaacatatttctttatagtctcatctttcagttgcagccatatgccatctttagtgtggataacatcaataaaatggtggtttggttgaccttatccacgtctacttgttccctctgaatggatggatggctatgatatggtgccttgtgctgtccttgggcacaaattttctaatatgtcctgatctaaaacagtttccatctatcttggaatgcagtggttaacctggattcttccttccccattaccctggacattctcttcactgttctgtttggttgaaggcattttttcttacattttatattttcttctttcttagtttgcttcctcattttgttggaacacataactaccagttacgttttgagaaagggtatgtgacaaataaatttgagatgttgtacatcagtaaatatcgttagtttacttttccacctgattgatagtttgacatgtatagaattctatgtcggaagtaatttcctttcagaattttgcaggtatttcttcacaacccttcagcttccagattgctggtaagtcagaagccattctgatgctgcattttggttttgcagtatattatctgttttttgtttttttaattcccaggagctttcagtatcttctccatgtcctcaatgttttgaaaagttcccacctattgtgttgagcagttggtggctcctttcaacctggaaaatcaggtctattagtcctgggaaattttcttaaattattttatttatgatatcctcccacctgttattttgcattctggaactcttattcaaattaacctaatatttgaacatgatactttttgct

SEQ ID NO: 2714 - DNA, 3254 bp, Homo sapiens
gaccaaagggcaggtgcattttgagtgcgccaagctgctggtttgacggcagcgtacaggcaggaagagagagggagcgcaccttgaaatggaggaagggccatggggcagggtgagaaggggcagaggggactaacccatctctgtttttatagctgtctagagtttgttagtgcctatgtctacacagaaatatatgttatttttataatacagtgagatcatatatattaccgcgtaccctgttttctcctgactgcgtcattaggattttccatagggataaatttaaaagtagtaaacttagaaattttcacattgataactttaataatttaatgcatgctaataaaaatatggatataaattaattttgactgtttttgaattttatgaaattattcagtcatttttattatggaacatgcattcttttgctgggcttctctcaccaaattttaggattttgagattttctatgttattgcatgtgcctataatatatgtttattgcaatatagattctattgacagataaatcttttcacatatcaatgattatttgctcagcacaaatttgaagaagtagaattgataggccaaatagagaaacatttgatagatatatgtagttactctcccaaaaggatacactaatttactcttccactaatggtgcaggagtgtgtctaatactcacccacggcctgcagtgagtatgaactttatttttgcacctgtgccaatctgagagacaactaaaacatttattgttttataactcctcttagaacattttgttagtaatttgcacaaatgcataaaacatttataaatcttttactattaacatttttctttgtctctaaatccacaactgtgtcaccattttaaattaatgcatcataatctataatatggatatgccaaaatttactttctgagaggtcactgtataaaagacattgcttttttttagtgaactcactgtcataatttcccttaatcctcaagaaaatcccatgaactgtggtctctgaatatatgcattttaacaacaaggaaattgaggcacagaaagattggagaacctgacgagagaggcttacactgaagagcatcttggctttgcggcccttgccatacccttgcacttggaatccaggtttgtgtctctctccaacaagaggcctgtgacgctcgccctgcttgttctgttgaatgttactttgcgagcgcgtttacacaactgtcacttgaggtttgtttttagctggaattgtcctctctcctgaattcctctcacatcgctcccccacttatctcccggtaaactaaagccaccgagctgggtgggaagacggttcacatgctgacatttttttgtgtttagaggctggtcttcaaaaatcctcacatgtacaacaaggccccagatttgaggaggaaaataactctgcagccccgagtcagccgttccccagccacctgtcccactcgcttctggtaggtgtgtggctgtgagggcccggtatggagctccaggctaaataaagctgcaggaacagagataaacaagtgctcccaactcaaatgcctgcacacaatatcctttatctgggcaaggagagtggccaagcgccccccatagacggacccacaggcgccccccgaattaattgggacatattgttaaagggctaaggcccctcagaatagatgccaaactccaaggacaccaatgtcaaattccagaaggacagcggcatgggccaatgggaataaaccccagccgttccgcgctgaatcggatcccatagagcccgcctgcttcacatgctaacgtgatgatgaacgtatccaagtatcagcatcaaatccttgaggactatatttgcaatgtcatgtaaaccgtttcagggagcaaactgtcctgctgtgactttatattaatctctggcttctggctggtcacagggtgtcacatgtactataattagattttggaagtgtgtacagggaggaggaaatggtgtaattaaggtaacctatcagatgcccaactgcatccttcagaaaggaggctgaaacgcccgccctcccagctttcacactgcccttcaagggcagaggcaccaggtgcaggaattgcaggcactccagagccaccaccgcagagctcctctttaaagaaacctattctccacaccagaatcaatccggtgaggttgttagctcgtggtgcatatccggacaacttaagaggaaagccgggcagggcacttagaaactttgactttgcatttgggctacaaagtcccatcttcaggatgggggactataagggagtttatggggatgcggggatctcacttaaatagtcaatccaacaagtggcacgggggctctagaagctgatttggccaaggtgagctacagcgaagcaacaccctgcacctttctgcatcttccactcaaggattggcgcttcacaccaggcagctagctcctaacacccacctctaagagcaagaagagaaggaactgagtctggcaacagaaagtctaacccaagctgtccaagtccaacccccgggtattgagctctgcccacctaggacttgagtgatcaggcctcagtggtcaaaggaagcatgtgggttcgaatcccagttcctcctcacctgggctgggttacttcagtcaagttactcaacctccctgttgtaggccacccgccctgcctccctttcttcacctccctgactacctccccttcccactgcctctggtgttggctagaggatcactttggccactgggatgatgaggagtgacatggctgagatctggggagtacctgctcaccgccatgtgctcccctggtaaccctctcaccatatttggaggagccaaggccaccaggctggaggaagcaggaaaaggcccagtggccctgtcatccaccgagctctacacccccgcaggagccattctggcctgaccctgaagcctgaatcagcccagcctcacccgggcaaaatcaacagtggttgtttgaagccactgaattttgggaaggtggttatacagcaattgaagactgacatagttcctaagcctccatttcctcatttccagaatgaggacaatgaaagtcattccctgaagggcagtcgccaggacaagggaggtggcaccccagccctgagcctgggcaaaccccagcccctgccagccccatcacagaggtg

SEQ ID NO: 2715 - DNA, 3922 bp, Homo sapiens
cttgtaagttattctgtttgaagaagcaaaaataaattagaggcatagatacagacataactcattttggtgtggcagaaatgaaatgagttttgttaaaatattcaggagggataaaaggagggaatagtcaaaaccaggctggtaaaatgttcattgttgcaggtggttgataggtacataggggttcattatattatcctatttatcggtgtgtgtttaaaatttgtattaaaaattgaaggaaaagagagaaaagagaacaacaaacagatgtgtgaaaaaaagacacgaagtacaaaacggatgtattaatggcaaatgtgagtattcctagatttgagtaattttcctgccaaagcatttaggtcagaacaagaagggatgagactgtgttttttaattcaaaatattctgatattccaacctcctccttggaacctccaattattctatgtaataataatttgtatctaatgaaaattaagatatgatatttaaaaagccaacctaatgcagctcagtgctagacatggtagatgggtgcttacccaggagccattcaataccctctcttcccttactttttctactttagaagttcaaaagcaaaaccttttttcctattgtccctcacacctggagatgacaaggcaacataatattgtccaaacagatgtcaataggcctgggtgggacttcaggaaagctcatatttgttaaaaaaaggctcagcttttgcccctctcttccacctttttccttcccagagagtaaacttgaagcctgaaattgcagcagagtgggcaaacagaaggacaaaggcctacaaggtaaggtaaatggagcagatggaaagaactgcagttcttgccagtattattgagtcactacagcgagaaaaataaaacgataattaatacaaaaagtagattctacattatgaacccagaaaccaaaaagctctgctctggatctgactctgttacttactacctgagtgacattgatcatgtcatagagttctattccctcctctgttactcaagagaacacttgacttctttagcctagagttatcctatgaaataatgcatgttatatatcttcatacatggtaagagagtacatcaatggaagatgttgcttatttaacatgccaggtggttgatacataggacacgcagtgactccacagttaaatataacagtgcccaggagtctgctttccgttcaaagaagaatttgcagacacttactttgactggcttaatttcagacttcttgggaattctgttctgaagttaggaacttccaaggtagaggacgtttgtgtttgtgtattccaaaatgtatttgcccatgttgggtcagtcagattgagttggcatgttcttggtgaggtatacagtggaagtgggccagtttcctgcttcacctaggctaggctttcctttttcctagaaaaatgaaaggctcaggaaagcagccatgctaactactataccaccatcaccaccaggaaggctcaggacactcattcccaactctggaggatgctgtggggttcatgagcaggaagagatctcctgataaagaggttaaagacctatcatatctccaaagaaagaggttaaatgattttctgtgagcttcgtaaatgtggaagtcaggatttaatgtattgacattgatttgcttaactctgtggggaaggatgtagtcatcttggcattctattttgccgtggcttagaggatgattctttcaatgaaatagactccacctcctcctagaagtatgtacaccactgtacatgcaatccacctttgcctgctggaagaacatatcctcagtcttttaagattcagctcagtgtctcttctttcctgaaatctttactgacctcaccatcatgtattctgaagtatatacagcatattgttgtacattcaccccgtctcctctttgcatttggccattagactgtgagtgccaaaggacaggggctctgtattatttgcttttgtatcatcagcatccattatagtgtctgtcctatagaaaacaaaccttaacataagactgttgaagaactaaattcattgctaagtgattgaaaaatgtgattgaaaaatgggtaactggttgtatctctcaactagtgaccattagcctggcagctttccctgttgcataaggcttaagaatctcaagtaccccactgccctgtgggtaaaaactgtcaactaaaaggagacagaaaacagagtgtgacaaaatattaatatcattccaatttaactgagcagattatctaaggtttccagttatccaaggcagaggaccattatattaggacagatcatttacagtggatatcagactcagatttttagtatgaaagagaggggcaagtattgtactcttttaaaagattacaaatattcaatccttggcaatttaatatttgtcttcctttgtctaagaatacgaggggaatctttgatgaaagacttgttgaggcatatggcaagttttgaaagaatttgaaggtgaataagtaatgaaatatctattccctcttttaacattaaaaacaattgtatttaaccaataaggaaaaaaattcaggtaaaaaaattccatgcatatttttcttttttaatttaatttctactaatattatgactcagaggctgaatccaggataaaggtaatctatcatcagggctctctttcagggcagaaagagaacatataaagactagaaatgaaaaaaagagattaaacaaggcttccacttcatctctggattctatcacttagcatagtgttttcaaagttcattcatttgtatcatgcatcagtacttcattcctctttgtggctgaatataaaatctcgttgtacagatgtaccttgtattgtttgtccattcatctgttaatgaatatctgagtagcttctgcctattgactgctatgactagtgctgttaaaaacatccatgtacaagtttttgtgtggacatatatttttatttctttgggtatatacctaggagtggaaatgttgagttatatggaaactctatgtttaatcatttgagaaactgtcagattattttccaaagcagctgcaccattttatactcacatcagcagtgtaggagggttcaatttctccacatactcaccaacactttgttatctttttgatacttgctatcctagtgcctttgaagtggcatctgattgtggttttgatttgcatttctttaatgactaataatgttaagtagcttttttttatggctcattggccatgtgtacgtctttcttagtgaagtggctattaagatccttagctgatttttaatcaggttatttgtcttttatgattgagtcatgtctttatatagtcttgatacaagacccttatcagatatgtgatttacaaatacttttttccactctgtggtttttcactttcctgatgctggtctttgaagaacaaaagtttttcaattttggtgaaatccaatttatctattatttatttcttttgctcatgcttatccaataattataatccaacagattattatccaataatctgttgccaaagctaaggaaggtcatgaatatttactcctatgttttcttctaagagttttgtgattttagctcttacaattaggtctctaatccatttggggttagtttttgtgtatgatatgagataggaatccaacttcattcttctgcacatgaatatctagttgtcccaatgccattagttgaagactattcgtttctgcatttaataaacttgctatccttgttgaaaatcaattgaacacagatgtatgggcttatttctagatgttgaatttatttctggatgtttatttctggaat

SEQ ID NO: 2716 - DNA, 2093 bp, Homo sapiens
cagcacaccaagctaatttatgaggtctccaagggaccagatggagaacagatgcaaccacactgaagtcagaatcgcagcttgcctccgacacctgacgcttcactgttggcgaggcccactatgcctcgctctccccctgtaatgagttctatcccagaggctcctataccctttagaaataaactgctcaggcagcccaaccagttcatccaagaggcctggaaccacagcagcgtcgacagctgagatgagagttggtccctgatctgatacagagcctgggtttagctttgatttctctcttcctaggcaagatctttagagaataactttttgtgcctggccatctcctgctcttttctcaacccaaaagggctatgttcacctaaagaggaaaagcaagaaggcttcctgggctcgggaggtcagggctggaaagaactgctcaccatttctgagccgatgaggactcacctgggctcctcactggtcagggaactgtggcccagccgcagagtgattgctttgtcaagaagggaaacatttacctttccttcttccctctgctctctcctaattaacaattaaatggaaggagttgaaaagacatgtcagagacttcaatctcctcccggcctgaggatgaagggggctcgaacctgaatgttctcttcgctgtggccagaacctagggggctggggttgctgccagctcgactggaggcctgcttccagccccaggctgtggtgaggggcctcacagatttcacaaacaggagggcggctgaccaagcgccaaactatttagacaaacacacaccctcccttcccgccagagtttgggctgatttctcccaatgctaatgaacagctcataagtattaatagactccttggcacctaggagtcaggcagagtaacttccagtgtgaattttggccaaggaccctgatgcagcctcaggatcttccaagcccctgttgagtccagggggcatgagacacacagggaggctggggctgctcccaggaagcaggctcacaagagccagacaggctcccacagacagcttttaggtcacagaaacctctgcctgccaggtaggcatgaacacagaaaccctcccaaatcctcagactgtggagcacactccaggtgagccaggatcaatccctggtctcagagaacacttagatgggggtgaaaagcaggaactgagagcttcccacccagcacctgtccctgctaccagctaaacctgtgtcggtcagtgcaggaattgtacaggtgatgctctgagcctgtgctgaggccatgtatggactgaggaaacctcactgtgtgtatgtaaagttaattcaaacctatttccctgagtgcttacatattttcataaggaaagttctgttaggagagctgcctgaaacaacacctctgcctgtgctcccactttctcccgctggtgtggggaggagaggctgacatcgctgggtccacgttcctctgccctgggtggggtattaatgctgccattcccacgctgcctgctgtttcccctcatcctcaggagggctggtctctgtgctgcaggcagctccaccaggcctgggagcatgacaccgtctgccaatgccttgcccaggtccactggcctcacccttccgcaggcctgcgccttctgtgactctctgcctcagcaatttctctggatttctttgtcctcaggaatgtgctggggccacaggcaggtcaggccaggctttctggggagtgaatgctctctgccagtggcggatggaactggtagacacgtcccccggattcctcgcctgcaagtgggatggtgccaggaaagttctacaccatccttcccaggtcccaggaggacaagcacagttgtccacaaggtaaccaacctgctcattcaacacactgtgtatttgcttccctccctcatcagcccctttaaaccccacagtaggtaggaaatgacagaaaacaagagaaaatgctagagataaaggaacttctttaggattccgtcaagactacatccctgagaaaagcagactctggtgaatcatttaggc

SEQ ID NO: 2717 - DNA, 3997 bp, Homo sapiens
ttttttttttgagacagggtctcactctgtcgcccaggctggagtgcagtgacgcgaccttggcttactgcaacctccgcctcccaggttcaagcaattctcctgccttaacctccctagtagctgggattacaggtgcccaccaccgtgcctggctaatttttgtgtttttagtagagacggggtttcgtcatgttggccaggctggccttgaaatcctgacttcaagtgatctgcccgcctcggcctcccaaagtgctgggattacaggcatgaaccaccgcacctggcctcaatacatattttttgaatggaagaatgattacagtagcaaagtaaggaaggacaattcctgttcttgacctttgttaagcacatcttgttaacaagatgttaaaaaggattcatttgaactccacttgggtcccaatgctgataaagactaggtgtagctatatgcagaaccagacctaagtcagtttctccatcactagtgcattgcccactgacttgtaagctataatacaagaaagagctaagagtactggagcagttttcagctaagggcaaggacattttggcagcgcttgtttgaagacagtgatttgaaaagaataaagctattgtataattttgcctctttgtctcttcccacagtcagaattattgagaaagtaatgaagttttagctccagaacctcttctcaggccctggaaggagacctagcaatgtgttcccaggtcatacgttttgcaaattttgaaaaagatatttttaaattctttttctttcttttttttttggtggatcttactctgtcgcccaggctggagtgcagtggcacgatctcagctcactgcagcccccacctccctagtagctgggaatgcaggcacatgcctccacacccagctaatctttgtatatttagtagagatgggggtttcatcatgttggtcaggttggtctcgaacccctaaccttgggtgatccacccgcctcggcctcccaaagtgctgggattacaggcatgagccacggtgcccggcctaaaattctttttcttaaagagagccccccaaaactgtgtaagtttcaagccccaaaacttggatccatcccggccccctcccaagtccaagctgcttaagtaaccagtgatccatgtttagttcattgaacccttgaaacaattctataatataaatactattgtcattccaatttacagatgaggaaactgaggcttagggaatagtcattgcccaagttctcacagttagtaagtggtagagctgggatttaaattcagtagcctgtctccagagaccagacccttcactcccttcactagagtgcttgataatggtgtctatttgttttcttgtccatttttccccactaactaggaagtccccaaggacacaaagacaaatcatttctttttcttttttcttttcttttctttttttttttgagatggagtctcactctgttgccaagctggagtgcagtggcaagatttcagctcattgcaatctctgcctcacaggttcaagtgattctcttgccttggcctcctgagattacaggcgcacgccaccatacctagctaatttttgtatttttggtagagatgggatttcaccatgttgtccaggatggtcttgatttcctgacctcgtgatctgcccacctcggcctcccaaagtgctggggttacaggcgtgagccaccgcgcccggccaagacaaatcatttctacatgccaagcatacagcccagaagagacgtcaccatatgttgggatgtaagaaagaggaaagtagcccccaaagtccagaggccagcctgacactcacagccaggacttggccttgtcctgttgaacataaacaacttcatagaacatcaacagcagacaaggccactctgtgactgtaatggatcaaaacacaaataggaccactctgtcatcatgtctgaacacaaacaaaaaatggatattgtccaaaccatgaaaaagaccaaccccccgtccgtgctaaaatgagagactgctgcttcttacctatgacagctttagccttggtctagcctcccctccttctagatacattttatcaagacccccagtcatagaattacccttgctcttgacagcatccaatccaaagccaagccctgcttccttaaactctccccagattgtctaacaaaagcccaaattctgtaaattctttcttccaccttcctacagaaatgcaccccctttgcccttatttccccattgcctgccttctctcttgctgcaatgaataattaatacaacttctttaatacaggtgtgtttccggtggtctttgactggaatggcatcgacacaagtatcagctatcagtgagcataaaatggaagaatctgattgtgcccaaggaagagcttcctaactgtgacaaaggaggaagcaaagtgtgcagaagacacaaaacaaactccaacctcctcccacctccttgagaataaagcgaagcggggaccatttctaggcacgcctgaggactatttgaggagggtgaggcggagggttacgcacgggactaaggcaaaaccctccgctcgagagcagaaatcgcggcggcacctcttcaggccaccagggggaggaatcacaccgcatcccaggccttgggcggtttcgcacgaccacgcggggctggacggtcgcgtagaactctgggaggtgtagttttagagttgtaatgcgcaatctcgcgcactgtacatcgggaattgtagttctagattgaggaacgagaagtgcttccaagcgtccattttgagccttggaaactacgacgaccaaagggccacgggttcatgggtcgtttctcatttccgtcgagttaaacgtctggggctgcttctgaggaatcagcttgactgggtaagtttgattggagaaaacacctatatctcaattgagcttcctgcagacttttgtattctggcccggtttggggcctcggcgtctctcagtcataggaattgcacattaatcttcgtcctttacgtttcctattcagacacctgtagccacccgctcccttgaccctcccacggtcgcctcgcacttttaacggccagtgcccctggaatccccactgagctcccgtcccaggacccagcccccgcagccccaccttggaccccacagccctaccctgattcctcggccctaccttcaccctgcagcctcacatccctgaaccccgggcttctttatgctcctccaccctttgtgtactttactcttactctcagttttctgtttttcatggcggtggaagaagggtccccattccttctttccgatccgcgattaccctggactcgaagtcagcagacccggttctaggccagctctgcctctcaccctctgtgaccttgggcaaatcatacaactctgggactcagtttcttcctctctaaaacggagatgactgttgctccatcagtctcaggtgaggagtgttgaggagccaacaagctagtatgtgtgaagatgccttgtaaactgtaagaccttcacaagagacagagattatttttatcacaattattaatgctctggaacactcttatcaggcctcttctctagctctgccaccttgttgctcaatctcatccctcgagtgcttggtgtcttcattgtctacgagctggatgatatttcctcacttcctccagagaccaaaggtcaggccaatgagcttttagtcttcagagagctttgtctgaaaggaagcacaagagaagtgcttatcttggactgtatcttgaaatagccagtgatgaaagtgtcacacagctggcagagcagcagtcctctgctcaccagaaacagggtcccagcaggagaggacagctgcaacctaagccccatccattccctctgggctcctctgggcctgttcagtagacactggctttggt

SEQ ID NO: 2718 - DNA, 3888 bp, Homo sapiens
atggcatgaagttaggcatctgaaaacgtgtgtgctccaaaacagaggtcagttaatggaaaattttagaagagaaagttgggttagagccagcacagcaagctgaaatctgctcttacctaactggcaaagtcagaccagaaatacaagcaagaataagaaagacacaaatattttagaactaaatgagagagacctgtgtggttcgatgcattctctgacgttattctgagaagaaacaattaaatgcatactggaagacattttgctcttctacatgttggaaattcggtgtcaccaatgcacagctgcagaatgcacagttctattgttttctttctcatcacagatctgacccctcaccatcttcccccgcccttgagcctgatccttttctgactttgagcctggcaccttgctggtgccggcaggcatcatgaaggcatgggctgggagccagactcagccttgcaaaggaggctcagggaagccgactgacatgggctcaataattagttcaatgccggacacaatgctcaataaggagctgctgggttaatggatgtgtgtgctagctagctgtagtaaacaattcaagttgataacatggggctgattgtctgaacagtacaaaagaaaatggaggactgaccagctctttggtcctccaaggtcaatacaacatttaaagccttcttatagagatatacaagttttgttcatttttaatattcatgtcaataatttaagcaatgtgaaaacttaaacattctcaagcatttatttattttttttggtagagaccaggtctcactctgcttcccagcctgtagggcagtggcatgatcctagctcactataaccttgaactcctgggctcaaacaatccctgctgtctcagcctcctgaacagcttggactataggtgcacgacaccatgcccggctaatttttttatttttattattgtagagatagggtcttgttatgtttcccaggcttgtcattttatgtattgtcttgaataataaaagaaacttggacagagaatagcaggtagcaaattttcagatgtagatttaggataatacaaaattttataatgtgaagtacctcagtaccaaaatcttagctatttataatatgatagcccttgatgtagagctaacttaaattcaacatttccatgactaaataatttgtgggctctaaaatattctcaaaattcctagagttagcatttcttaattgatttctttagcctttttcacattcaactatattataaatacaaaatgaatccattaacatattttataatgtgtctttcagtgtgcttcttagatttagtttgatttcagaaagctaagaaagaaaaaggaattttgcaagccacactcaatcatatctgcataggcatagctatatagacacccataaaattatgcataacccccaggttttcaaatgaacacctcccacagtctcagcaacacagggcaacctccaccctctggcatattcatgtgtccatttcactgtgaaattcttatcttcatcactgctcctcagggggcctctacaactctgcaatgttattgttctgagagaaaatggttattttgtaaaattttccttcaaaaaacctatttaatagaatcacaagtttattctcttcagcagcaagtttgctgaagtacattatttgtccaaaaatagttgaaggccacattgattgaggaagggatgaatactcatactaatgagctttctgtcccgttgttgtggaaattttctgtgaatttgctgggattttctgctgggtcatgcagaacctccttggaatgttatagcctgggaaatgtaattaccccatgacgtttcatttttctcacaatttctggtgtcagaggatggaacaatcaagtcctcactctgaaaggactctctcacatgcccatcagggcagaagggctatcattacagaaatacagcattctcctctgtttttcaagctggtttatctccatcccactacccgaaaagtggaattcagagttcccttagttctctgcttttctgtacatagaactacaacatccaacccagcaaacactcccttcctatacagatattctttaccagcagtattttatgtggaaaacattaacaagagattagtgacaaaagaaattactttgggggagtccattgatctttgccttctaaaatttataagctgctttatataattgtccatgattgccttctttaccctcatcatcaacttccacatatgaaaaagtaacaagaatggggactgagaagaaatagtaagatggttcagactgaacgaagccattcagtttttatacgtgtgtgtgattatttcactataaactctgcttccatgactaaaatcatcacaattaccaagcaatggctttatcccagagttactttagaacaaaaaagaaggcatttgtcatgcagtggcatatctcggggacagctcacccctgtgaaccatgtctgccctttcttcctccttcttttaattaacatttggaaaagaacagtgatgttagcagatagcagagctgggaagggagactcagaaagtgatgtgagctttgtcaatcttcaaccttgccaaggaggacacattaaagtgtttttcatggaaaatcaggctttgtcaacacaaattcaaagcaatgtgaccttgacggatggagatatatatatatatatatatatatatatatatatatatatatatatatatatgcatgctaagtaagaatagcacagactgaagcatctttagagaatataagtgaaccaaataaaaggaggaaaagcatcctaaaagaagatgttaaatccaggaaaaagttgtcaagtgtatttccttctacttaccttttctgctgactgggctgtaccaaaaaagatggggatgaaagctaaccaaatgatgcaggtggtatacatggtaaatccaataggtttggcttcattgaaagtctctgggacacctctcgttttaatggcataaacagtacaagtgaccatcaagaggatactgtatccaagtgaacaaatgagtgagagatcagaaatgtcacacttgagcactcccctggccttctctggatctagtgtccgctgctctccatagtcaatgatgatgtgggggggatccacaacaaaccagacaaacactccaaggagctggacggagatgaggctgaaggtgatcaccagctgagatgctggactaatgaacttgggcgctgtgacagatttcttcccctgctcaaatattcggtggatacggtttgttttggtcagaagggctgcatagctgaaacacatgccaagtcctaggaagacccgtcggaaggagcatatgattgtatctggtgctgcaatcattaaaaacgtgattgaataacagagaaaaatccccgttaggagcacgtaactaagttcgcgtcctgaagccctcacgataggtgtgtcattatagcggacaaaggtcacgatcacaaaggtggtggcgatgattcccaatattgcaacaaacacaggcaccacagcccagggagaatgccactccaatttgatgatggggataagctggcagcctgtgcggttcatgttgggtctctgatccagagggcaaagttcacaggacagctcatccacctggtagttgtaaccttcacagcgttcacagtgccagcagcaagggacccctttcaccgttttcttcctctcccctggcttacacggcaggctgcagacagacgccgggtgagtatgttctctatgagcccactgcatgtcttccacctgtgggtataaaaaattaatgagcct

SEQ ID NO: 2719 - DNA, 852 bp, Homo sapiens
gacctatctaacctctgtcactagaaagctatgtgctggcaaactggcctctacagttcaaggttggagaaccccagccaatgccccgagggtgggacagaacctaggcgccaagcagtatcctcaggctgcaatttgctggacacacagagtcctgttctgcaacctccccctacgttgtggctcattgcttaccttctgactcagctctgaaaaactagctccacatttttaacgctgccaagagctcccttctctgtggattcatctaagacaacagatattaacactaggattgtgatggcagtggagtcagtaccaactgacccaagtattcctagcctgtggaatctttagactcacttaattcattcaacatatacttattaagtgcctactgtgtcatgaacttcagggatatgaaattctgcaagatagtctctgcttttcagtaccaggagccccagatattatacttaatgtttcaaatagtggattctgggttgcttgaaagtcagtaggcagcctttttgtcattaaatttcctttattgctctgatgcattttattttatagtgactctgactacttcagattgttcacaatattttaaaacttacgttattaagattgctcaattctgctgttcaaaaactgttagtaaaatgataaggttaccttatggctttgaattttaggtgctttggtatccatgatacatacgtgtatatatagtcatgcaccatgccacgacgttgcagtcaactacagaccacatgtatgatagtgctctcatgagattataatgccatatttttatggtcctttttctatgtttagaaatatttagat

SEQ ID NO: 2720 - DNA, 6338 bp, Homo sapiens
gggatacagcagtaaacagattccatgtcagtggataaacacacactggaaacacataagtgaaacacagagggtgtcagggaggttataatcactacctagaaaattaaaggagggaaggaggccttagggagagtcacctgggaggtggagacaggtgttgaaattgttaaaaatagcatcaggaaaaggcttactgagtgacatttgagcaaagatttacatgtgagggaagagcattccaggcaagagggcacagtgagtgctatggtcttgcaggagcatgcttgggatatttgtggaacagcacaaatcctgcagtggcttgagtatgggcagtgagagggaagagtacacacgagaggaggtgaaggggaaaagggaagatcatgcatccggggccttgtggccactgtgaatactttggctttccctctggttaaacaggaagatgctggaggctgttaaattggctgtaggggcaagggtggaaggagactctgatgagatggcggtagcatggatctagatggaggtggtggaaagaggtcaggtttgagatattttgaagggagagctgatggactagatgtgggctatgtgagaaggagaaagattgggagaagaataggttatggacttgttaaatttagatccatattagggtgctcgtgtcaaaaatgtagttgggtgtatgagtctggagtcaggagagaagcctgggtgggaagggtgtctgtgagccatctgtgtacatatggtatttacatccatgagactgtggagtgactgtgtgttgggtaagaacttcagtgtcttggggttgtaggcatgagaggaaccagcgaaggagacacaggaaaggtggccagcaaggaggtggagacaaggtctgacgatgagtgactctctggacccccgtgcaggtgtgacaacatgcgtgtgtttaagctgggcctcttctcgggcctctggtggaccctggccctgttctgctggatcagtgaccgagctttctgcgagctgctgtcatccttcaacttcccctacctgcactgcatgtgcaggactatttaagaacattctaaaacgggtcccaaattgctgaagatttatcatcctgctattccagggattgttggtaatcttcatcctttcctaattagaagaggcccctgggctgcaactacagtcagcaaggtgcgtgggttagaccggaagaaggagcaggctaaactcagggcagcggagtcttcatgctcatcaggttctcacctcttgtctccctctgcaggcacatcctcatctgccttgctgcctacctgggctgtgtatgctttgcctactttgatgctgcctcagagattcctgagcaaggccctgtcatcaagttctggcccaatgagaaatgggccttcattggtgtcccctatgtgtccctcctgtgtgccaacaagaaatcatcagtcaagatcacgtgatggcaagatggtggctggcttctctgcttatcgcccctcatgcagtgggcttcctttgctaggaagacagccaagggagttcgaatagttggggtgtgggctatcttttcaaaaatctatttgctggggctcttaatttctttagtgttctttgtatgtagggatttaaactttgtcatatggtacaaatattccctgcccccctgcagtttcccatttgtctttcagtatgttaatatttttgtgccatactggttttaaactttcatgttgtcacatctgttaatcttttctttaggatttctggattttgtgtaatttttaaaaaggtcccctcctcctccctaatgtgtctgtggaccacctggattccactgtacaaggggaaaagtgtctattcctttcccaaagatggaaaatggagggcttagggacactagatgcatctttctcagcatcacttccagatgcagtgacttgttgggctgcgtccttaatggccatggcagagcagtcccttgggggatccagccctgtacaatgcatctcttcctggagaaagctggcctgctccagaccccaccattcccaggcgcccttggagtggactctactgatgacagacagaccctctgagagacaagaccctctgactctgtgatggaagatgccagagattttcctttggggtaattgtccttaaacaaaaccaaacagatgaaacacacacaggacttgtggctaaaaaggctagtttttcacttgcatttctcaactaacccaggttttacatgcatctgtgaatccttttactactacctctgtggagagatggagagacttcagataaacgtgaagctaatgagtaaaaccctctctgccaaaacctacactccactttaggcccttcttgaagatgagcacaatttttaaatactgagcacaatttttaaatactgacatcacttcctcttccccctcccaccccagctcagcagcctcaaatctacagagaagaagaattatggcatgaacattcccacagacccaccatctttaagacttgacctctgtaagtttaccaaagggctcctcacaattgtggtgggggttctggttcaaaatttggagcaaacatgaagtttttggaaacgttttctcatttgaagcctccagtatgctgtactattctggaaattaccttcaagagtctcacttcttgtttctgttgtgttttctgtgggcatcatgttcttcacgcttgcagtagaaggtgctttctcggtttcccagagtatccaacggctcacctttctcaagtgctggcagtagctatgcactcacgggctggtttgggtcgctggtgcagcagcgcaaatctgttgccttctgaatttttctcacctaatgtgacactggctacaatgaatcttctcttcatcgggctgaatgaaagattcaagaaccatcttcaaggtgcatggtgggaattatcaacctcagggatactcattttaactcaggcgtgtcctgctttgtaacattccattgttgggagagggcaggacaggtgtgttcttctgtgggcaggagtcatgtcactgtcctacatatgtaagagttgggaaggtgacgatttttgacacatccaggaactcttactctagttagaatttgtaccagatccaaggtgaaaaccccaataagcaactgaatttagagtttaaaaatgaatgactttatgctacatctgtggttatcaaattatataggttgttgagaagcagaacgctgtttgtagtaagaaatctttgtggaaccccagtgtgtgaagtaaattgtatgttattaaatttatttaaggttaaatttatggcatttacttaataatatatgaggtggtgaaaatgcaaattaacaaattggtaatttccaaggtagaaaaattaggtgttgaatgaatgtatatgttggtttattatagttttatatatatatagagagagtgttttgtttttgagtcagggtcttgctctattacccaggctggagtgcagtggtgcagtcatgactcactgtagcctctgtctcccaggctcaagtgatcctctcacctcagcctccccaggagctgggagtactggtgcgtgcctccactcccagctaatttttgtattttttcatagagatggggtttcaccattttgcccaggctggtctcaaacttctgggctcaagagattcgcccgcctcggcctcccaaagtgctgggaataggcatgagccgtcacgcctggcctaaaaaatatttttaaaatgatctttgaattaaatattcgtagaatttctaatgtatctctttgagacctaggaggttgatggaacagaactgctgttaagtcctttgggtttcaagtctagaattttttaaaggcaaatatcagctcattcttattttagattgaccttatcaggcatggattctggtctcatctactttatggtataaatgctccaaggtagggggtttggtatatattttaagcccggcttttttttttttttttttttttttttttttaatgtgagaagcagaatgtgcttctagaaactggttttaaagagatgagctgagaaagaaatgtggaatggagtatatttgaggaggacaaaacataacttcacttttgaacagaaatcactctagcttgccagcatgggatgtaaaccaagagagtagaaatatacccatcttattttaagttgggtttatggcatcgctcatatatgtaaaagcactacaaactctttaaagaaaattgggaaactacagagaagtcaaagaaaaaaaaaagtaacccatatttctattgcccaggtataatccttgttaatattttggtttggtctcctcttttttcccccaatatagttgtaaataaatgatgtctttcagagttgacatttatcctgtagcttgaatggcatgtaaatgccagttgtatattttttcatgaagtgtaggtttggaatacactagagttagctatatgcttgaatgctgatcactggattctgagactgactactgagtctacctttttaatcaagcctaacatgaatgggctccaaaaagtaatgaatgtaattgtactttttgatgtgcctctgcacttggcttggtgagtcatcataaatagctgttaaatatgtgactttacagattttgatatgttcagattgtaaaaaatgaatagtttatttcattaattgatgggcagtcaagaatctccctcccttcagtagggctgacacttaggagttaggtcatggttgtggttacttggcatggctaatcagattttgttctggtcagaatttgcccaagatcaatacccagcagaaactggagttaggctataaaaaaccattcatgtttccgagtgatcatttcagtcagcgattcatgttttacagtgtttagttgttgattattagaaaaagtaatattttcttccctttatgattacatcattataaatcaagtccttccatgaacacatttaaggtgtgtggagatgagatctctgaatccatttggggatgggctgcatttttggggaactctatgcctgtccagtgaagagtgcctaaaacattaattatagatcaaagatgttctgttgagggacaaagcttgatggtcatcaaacacaaggctttgtaaaaatacgaccacctattccacttactggatctgtcaggtgtgtaaaacttctctcgccagttcatcatgcttccatgagccctcaggactgggatttgagccttcctggctctttatcccttggggcagacatggaaccatctctgagggaccaggtggatgctgaagctcacccagtcagggcccctctcctagctccttttacactgaaattaatctgaaagctttcatagccaaggctttgcctaggtgctattattccagctggccaaagagaagtcttgggccagattgggattctcaatggattttatagacataattcccctgcaaacttaaaaaaataaataacccctactttataggactaattgtttgaattgtatctttctctgtatgttaaaccagatttaaaactattttataaccacaatatgtaatcagagcaatatagtgttttcagatatataccttgttttataccttatgtaggtgtcctacataagggtggcatgcccactggctgtggtaaaatttaatcctcattgctttgggagtgacttaaggccttttgaagtggagcttttgcactttatactttttctgtgaactatgataactatatttgatattaaagctgtaagtggcattttcagcaaatgaatatgtacatgtttgtgtctatttccaaaatgatttctgaactatctgcagtgaaaatgtatctgatggattgtagagcaaagcacattgcctaaattcatttgttaatgaattgggtaccattgttattaaaaatgcgtaaagtaattgttgttccttgttggtttcttctcagagctgtgaaattaacacatgaaaatatttccagcataaaatacctaagaacagtttatttttactaaaacttctatagtcatgtcatatagatataaatctcaaatataggcctggtgcggtggctcgtgcctgtaatcccagcactttgggaggggaaggtgggtggatcacctgaggtcaggagttcgagaccaacctggccaacatggcgaaaccccgtctctactaaaaaaaatacaaaaatcagctgggcatggtaactcgcacctgcagtcccagctagtcaggag

SEQ ID NO: 2721 - DNA, 390 bp, Homo sapiens
gttttttagaatttgatctgaaattttagcaagttgcagaatgggttgtgaagcacaacatttcatctctttgattctagacactatcctcagaaattagatttgaaaaatgagcttcattttcgaagaacatatttctttatagggggagaataattgactccattcaagtgttcgctcctgtttcaatcaactatggctgaagagtgaggagacatttggaataaatatggcttctgggggcccattcctatggatcagcagctggcttctggaggcccattcctgtgaatcgtcgatctcatagaagataatattgttagaaggcttacctcattgatgctgaacatcctaaaaagcttctgctgctttgagtcactgaaaaagacc

SEQ ID NO: 2722 - DNA, 1232 bp, Homo sapiens
cctgaccttgcagggaagcttatctgtttaccgtccgagcactttcagggattctaaaatgccgtgagtgggaaccactgccatgggccatttccatgaaaattcaatttcggggattaatttgaacaggtgtctccatgcgagaggtgtcgctgtgaagccaacggtgaggtgctatgcacagtgtcagcgtgtccccagacggagtgtgtggaccctgtgtacgagcctgatcagtgctgtcccatctgcaaaaatggtccaaactgctttgcagaaaccgcggtgatccctgctggcagagaagtgaagactgacgagtgcaccatatgccactgtacttatgaggaaggcacatggagaatcgagcggcaggccatgtgcacgagacatgaatgcaggcaaatgtagacgcttcccagaacacaaactctgactttttctagaacattttactgatgtgaacattctagatgactctgggaactatcagtcaaagaagacttttgatgaggaataatggaaaattgttggtacttttccttttcttgataacagttactacaacagaaggaaatggatatatttcaaaacatcaacaagaactttgggcataaaatccttctctaaataaatgtgctattttcacaatggagaacactgtgcttagtgttgaagataccaaagggaattcaagtgaggggaaaagaggagagcaaactgatcaaaagggaatgcccatgatgctttcaggaaaccagggtgagaacatgctggctggaggatgggtctggtttccagcagagatgataggagttaaaaggcataggtgagttgttcccatccctggcctgagccttactccatagctatagagacatagtctctagaaacaaaggccagagcatccttttaacatttatatcataagtattctcaataaacgtttgcaatttatttgctttaatgtaacttggcagtaaagactttggcctttggaggtctgattctaatcccagttctaccacttactggttatttatcaggtacacgttacctacctctctgtaactcagattgctcatcagtaacatggggagagtggtatcaaccactaagaggattaaatgagtgaatatttgtaaaacacgtagcctagaatagatatttataaagcacaagatctatgtaaagtgtttataacataatacattggaatatgagacttgaac

SEQ ID NO: 2723 - DNA, 5171 bp, Homo sapiens
gggagaggtacttcaaattaaagagtgaaggactgatcaggctgtttgaagagaaactttgccatatctcacactttatcatccttaagaggtgccagaagagatcactgactgaccctcagcttttgttaagtgcactttcctcagctgagtctgggcacagtcacttcccacctagattacatcagtagactcctaaatcctcaccctgattattcacttgtcatcctcacccaatcagactgcaaacagatgtgaaagtgatttttataaaaataagtcaaacgaagccactctctgattagaaccctgcagtgacacagggacttgtgcagcgtgatctgctggcacccattctccacccctcctgtgtggctctgccatgaatttcatgtgtgcacctccagccttctttccacatcgtcactactgtgcagcagaaaacaacagtggtcatgtctgttgttttcaaaatgccactcggccgggcgcggtggctcacacctgtaatcccagcactttaagaggccaaagcgggtggatcacctaacattcggagttcgagactagcctggccaacatggtgaaaccctgtctctactaaaaatacaaaaaacttagccaggcatgggagcaggcgcctgtggtcccagctactcgggaagctgaggcaggagaatcacttgaacctgggaggcggaggttgcagtgagccgagatcacgccaaagcactccagcctgggcaacagagagagattccgtctccaaaaaaaaaaaaaaaagactcctcaagaattataagcaaacaaagcatttaaccctacagagagagtggggaaaagtttacaaagagaactggtttgatacagtttcaatcgggagcatcttcctactggagaaagggaaacacaatcagagtaaatgactgctcggagttcctgcaccatgtagtttttagagttcaatttttcttcagctaattcatcacaaggattttgaaatttaagataaaaaatgaagaaaataagtaatgagagatttaagttaattaagtaataataataccagtcaacagttatttggtttttaccctgttatcaggctttgctgtaaatgctctgtgtgtatcagttcgtttaattctctcaccatccctgtgaggcggacttgcgctagttatttatctgcggtctctcagctttggggccatcctatactatatgtgctttgatgcgtgtcctgggaatttgtgtattactcacaccccttcacctattggctttttgtttaggttctgccagttggaggccctttattccccaaattctatggggcatacctgcttcttgaggatattaatctcacttccctttagcattattggcttattgatttttcagctttcccataactgaatgaccaatttccaatgttagatttcctaagtgaaatacccagagtggtttctgttgactgtaacctaacttttgcagtattatcctcatttccattttactgatgagaaaatttaagcacaaaagtgttaagtaaatttcccagagtcataagcatatttataatatatatatagcttttaaggaatgttagaaatagtatataattaattatatatatatatgcatatttttttctcatctgcagcaatataaaacatgtttttataagactagggaaatcagaaaataatcatgatacacattttggataaaagattcaggttacaaaacaatattcatagtggaatcaccctcttgtaaaaaataatatatcacatgttcatgcataaaaagagactatataaatagaaaactgtgcagtaattatagcttaatgattttaattttgaattatgaggtaaagaaagacagccatgtgaataacacaaatttattagctggagtggcatcattttcgattttttttttgttttgaatctagtatttgattttttgtattctctaaatttttcaatttattaaagatgtaacaggaaaaaataatatattttaacatgacttcacaagaaatttataacagaaatagaatagaatagaaatagaattttataacagagaaattctttgtgttgcttataggaatatctgagattggttaatttctaaagaaaagaggttgaatttgctcatggttctgcaggctacacaagcatgtcactgacatctgcttagcttctggggaggcctcaggaagcttccagtgatggcctaaggcaaagaggccattgctgaaaaaggaagacaaaactttatataacatatgttctcaaataggtaaaatgcatagaacattttaaagaaaatatcaaaaaatattaataaaggaatttcattatatgggaatactgtgggaagctttattgtatatttgtactgtgcattattctgggaagcaatgaaaactctgaatgactactcaatttgtaatacaacattttatagtaacacagagttttatagtaacagagttttatagtaaatcaattgtattcaaaatatcatttttaagtaatttttatttttaaataattatttcttgaagaaaatagttattttccagcaaacatattttaatgcagaaagccagaaaacatatttagttacattctttattccatggccactttgcctattttaaatacataagttttctaagttttctgctttttgccaccaccacttttaggcaccaaaaccctgttgacagtgtgcacccagttgcagaagcaccctgtgctggcccagcctcatgcagggcagtcgaagctagagagctccttcttttgccatcccaaagcccagggtgctcatggaagttgctgcccagaggtgtgttgacttcctctgtttctcctatgcattctgaggtggctcagaaataaaacgcagtcttcatagtctgtacaggcctctcctctagagaggagttctgcagtatgttcttgcagaacgtaccttgagttctgcagtacgttctgaatgaatgaatgaatgaatgaatgatggatgaacaagtagactttcagataaattttttcacttaatcaggtaggaagcataagactcctaaatgaaaaaaacaaacaaggtaacacgtctagaaagaaggaattgatgaatgttttccagccctggtagccttcctagaagcatgtctttccctgtagctcatccgcttccctggatataggaccctggctgtaacagctaccctgtccctacaggtcccatagtggcagacaatgtctttaagttgttttgccttcttcaggttacctgattactcctaataaggcaacagatgcagaagatctttttttttttttttttttttttttttgagacagagtctcactctgtcgcccaggctggagtgcagtggtacgatctctgctcactgcaacctccacctcccggattcatgccattctcctgcctcagcctcccgagtagctgggactacaggcgcccgccaccacgcccggctaattttttgtatttttagtagagacggggtttcactgtattagccaggatggtctcgatctcctgaccttgtgatccgcccacctcagcctcccagagtgctgggattacaggcttgagccatcgcacccgtcctatgcagaagatcttaaaagaaactgtaaaaattaggcaactagaaaatttgtttacatgttaaagccttttttaaaaatatgaataagagtcattataagagaccaatcaaatgcaaagatgacaggctatgcttctagaccttaacatgctgtttgtcaatttaattgcaaaactctgtcaaataactttagtctgtgttccatgactgcagggtatttctggaaagtaatgacttcatagaacatgctgtcatgttgtatgtctttcacagaagttaacaaagaagaaaaagataagtacctatataaattattgtatctcactctaagctagccagcagagaataaaatataaatcggatttttaaaacagcagagtagaatagtgtattttagagaagtccaatgcaggacttccaatgagaagtgtaataatatttctgtcaattagttacaacttgaaaccaaaacatgctccattaggttaactgtaatgttgtaaaaaaaatcttatgcttcaacattaaactaaaatacctcgaaattgatggtgactttatacaattcacagataactttaaatgtgactgggtaagctgccatctgagaaagaaaataaatcatcaaaatgttagcaaatcagttaatcttttagataatgatcaatctaattcaaattgtggtgctaattaccattataactactctctctagggagtttcctggtaattgcaaataagctccagtttgctgttaactagaaaaaatgttttcagaatcagaattataaaagtagcaaattaatataacacgcttacttggctagtgaaattttacactgatccagaaaaactggaagtgtgaagataccttataaatgtactgttatattagaattcactcatttttcagggaatgaaggaagaaatagaaagattataccaaaggttacacagccagaacctagaaaactggaataaattgtgggtctccttacccttcattctgtaactgcaaaaaaacaaattaagagtggtattacccttatgctgtcagaattgcttccaagatggttattacatttggctagagttgcatagaaatgtaaatcaaatcagatgacaaagttgtagtaatagtcagtttttagtaatagtaaaagaggttgatgatgatccctcagaatattatcccaaacaatcttcagctctcaagttttctgtctttaagaacatcaaccaggaaaacagcatttgtagggctcgtgtgtagtgagtgccttagacatttaaaatgcttgatagacatttatttttgcattgtcgatgtaaatacctgaactattttaatttgaaaatttcagaaagaaaatatatgaaaccgcaataacatagtcactcctctttttcaacaccactttattcattctatcaacaattttctgtttcatattttattgaattcaacaattgtatacatttatattttcaatcatttcattaacatctt

SEQ ID NO: 2724 - DNA, 535 bp, Homo sapiens
gagaaaacaacttggaaatatccagaatagataaatccacagtgagagaaaacagtcccagtagttatcagggactggagagagggaagaatgagaagtgactacttcatggatacaaggttttctctgggggtgatgaaaatattttgacatctgataaaggtggtggtagtacagcactgtgaatgtaccaattgccactgaattgtgcattttaaagtgattgattttatgtggaacaaatttcactttaattataaaaagtgaataaacttttagaagctaaccttggaagaaggtagagactggaagggatcacaagaaaggcttctgggatgttgaccgtgcagcataactgtctgacattggcatgccatttgtaaactgtcaaagtgatggttgggagtgtagcagtgaggacaaccagaggtcactctcatcaccatcttggtttgggtgagttttagctggcttctttactgcaaactgttttatcagcaaggtctttattacctgttcttgtgccaacctccta

SEQ ID NO: 2725 - DNA, 16898 bp, Homo sapiens
ctttcatctttgttttatttcttaaattgatcagaatctggtctgagaattaggttgatggctgcctctgacatttcaattgattaggtgatctttaagggctttctcctctatgagaggggaataaaatttactgccgattagtgagtgattactaggtatcatgcattattttgtgtaattttcacacaccttcacatcttctcttttaactcctctacaatctgatgtggttactattcttatgcttattctactgatgaggaaacatagacagaaggatttacttacttgccaaaggacatagcttgtaagtggtagagtccaacacaaattcagtgcagtcggaatttaaaggcaattcctttaaaagatatttatatcgcatttaacatgaaacatatgacaacatgtcctgactaaattaacatgtgatgtttgtattaagtgaaaaatataaaatttaaaaaaggaaataaacacaggcacccataatttaatcatcttctatctgattgactcccccaccccttttagtcttcttttcctcatcaagttaatgctgatagacttgtttgtccctccataactttcctcttgatctgacaaacataggaattcacatatatagatgacttgggcttttttatttgtatattcataaccaaaatctacaaattactataacacttcttattttttacataactgtatattatacatcaaattctaatttaaaattaatttattcatgtttattattttacatcaattagatccaccccctcttctttttatatgactgcatacagcaacctcagtgtgtacacacataatggagtaaagtctgggtgtacttaaatacttttttaaatgcttatatatttctataaaatatgtagatttataacttgagtttagataaatccacttttaagaattcagccttacaaagggtttcatttactacttctattttgtcttgcagagcatttcttattatttaaaaggatttttaaggattttctttgcttcatgaacagatgggcaacatcacatgagaaccacccacgtcaaagttttatacttaatgcattttatggcaggttttccatttgcaggctcacagtttgtaaattcataccactaaaaatattgtgcaacatgcatctcatgacattatttcttttgttgattatggtattgtaggggcagaaaaggagtgatctttttcttcttcataagagcaatggccaacacctctataacaaaagacatgttagagaaaaacttagcacatttatttgattatagttttctgtgacatgagagcctccagaatgaagacccagagatacaggggaagatatccaattttatgctttggttcaatgaagcagggacagccatgtacaagtgtgattgaacagaaaaggacaggagctagcagtgatagactcaagaattctagcagggcctgtttgttcaggttcttcttggcctctctgtacagaatttcttcctcccacgtatggggtaggactcctctgaaatgagggtcttaatttctttatggccagctgttccacagaaatgtggggaaaattcagagtaatatttttaggcttgatagctgactttagggaaaaatgattttagtttctatgacttgcctcaggcatggatgaggggtaagagacaggagacaggagggcaggagaaggtcagagagaaactgcttttgatgccttcattttggggtattattttcagagccccagtagtatcatttacattcttttcatgggtttctttggtctttattcttctgtttttttcattaactgtcacattacataaactatttatacacatacacacggatgttccatatgagtctgaaataaaaatgcataatagttacaaaacaatttaaagataagttagatggtcaaatagtagaatgattaatgaatttgtaggactattcagtttttctttttcatttcatttttaaagttgtacttgcctagcaatttatttcaaatttgttggcatatgtttatttatattatctcattatcctttaaatgcctgaataatattgatattagttatttgtaacttgtatctctgttttaaaaagtttatctatatgtcttgccacagatttattacttttatcattatgttctaagaaacagtttttgccatcttgattctctttgtttacttttttttcttaatgtttcttttttttatttttagtttttggagacagggtctcaccttgttgcccaggatggagtgcagtggcatgatctcagctccctgcaacctctgcctccctggctcaagccatcctcccacatcaagctactgagtagctgagactacagctcgactctgatttgaagagtaggatggttaaggacatcagaaagaatttcacagagaaaagggtcgaaacagagcatgcaaaaccacaaagagtctcagtcttttgccctcacccaggcaggagtgcagtggtgcaatcttggctctctgcagcctccacctcctgggctcaagcgatcctccaatctccacctcccgagtagccgggactacaggtatgcgccaccaggcccagctaattttcttgtgtgtgtgcatgtgtgtgtgtatatgtgtgtatgtgtgtgtaagtgggatttcgccatgttgcccaggctggtcttgaagtcatgggctcacgtgatccactgtctcagcctcctaatatactgggattacaggcatgagccatcgcaccgggttggaaaatttaaatttccatagcgtttacagaaacttaggaaacaagagaactctaattttctaaaatcgagagctaacttgaaagcaaagaggaaacaatttattgtttgccaaagttgtaataatgtttgactgtggtatgattaacagaattgagtaatgaattagtttatgttagatgatttgacgtaattatttaacctgctgttttattggtttgttttattttacataatatgacgattaaaactgtgatttgacagtatcttttaaaatttatgtatttggttaaccactagtttgtatcttaatctaaaaaaccctgtattgatgttttctttggtcataaattcttcttaatttattatattactaaatttgaaatattgacattaaatttcgtcagctgaaacattaaggagataatttttttctctctctcggtagcttttgaaggtggggaaattgtatgaaaccagtctctgtgatagatttattatcaacctttacttctcttgtttggatatataatagatattttcttaaaataatatgcatgtaaaatacagcacatttttaatagaaacacgtcttctaatatttacattgtgttacaaattatgttaagctgtaacatctctcttatttcttttttctttttctcttcttttttctttaggcttgctctccttttttaaattgtacatgtaatattaactgtagggggttttgaaaaagtcaggtgatattgaacaatttcactattaaaaacaagaaagaaaccctggatgcttctcagtctttggtaacagaaaaacttgcagcatttttattttttaggggaagagtcataaactctgttttgtaggtaacctggaaaagggtgtttttatcagataaatggtcaagacagggatatgaagtcactgacatcaatgcctatttgcattatttttatgaaaaaaatgttgttgataccaaaattggcacataatccaaaaaaaacaagcaattcaatattttgatgtgtgctacaaaagtgatgaataatttgggtttgtccacattaccaaaataataataaatccttcaaaaatattagtgtattagatatctttctgggttttgagattttgtttccttttagtgcactagcaatcatgtagatttattcatttacatttgtgtttacctataagacttctatatagtattgtttgtagtaaagtatatttagcccctttttttcttacaaatattgagcaacagcaaattcttttaagtgtgtgcattttttaggtataaagccatgattaatgtctttctctaacttgtctgaattttgtgcaaaatccaaatatatatctggatttcacaatagcactgcttttacctcattctgtcaggtcaaaccttgtacaaactgactcctttccttagcttcaaaatattaaaactcaaatgactctggatagtactataggtcatttactaattatatatacaaacatagtgattattttttaaagcagaacttctatgagcttctgtttctggttgagaattaaatctgtttatcatttgatattgcaaagtcagaaatgatgttatatcatttttaatttagcctatctcattagatgtaaaaatgtctttaacatttgttaatctaattatctgctttgtcaaaatatgtagtggtcagtaaacttttttgtgtagtttttggtgatgttacttcctacctccctcattgtgtttacaataaatatatggtttgtgtacagcaaaagaccatcaatatcttcctactcaacaaagtttagtctagaattgcttgctgtaaacaaagatgagaaaaggacactttgtttactcaggaatgtggtctaatgtctgaagttttgcttttatgagcttagcatgttttgttttttttttcaaatgaatttacgttttgtaaagaagctttagatattctttgtgatagctcagtgttaaggcataaatttaattttgaattcttataaatattctacatcataagtgatgtagaaaatctatctgaactacacagtagtgactgtggtagtagtggtgatagtagtgatggtaataataatttcacttatacccatacctagttttaaaagcaattttgctgtgtgagatagaatagtaagacatggcatacctactttcaggtgaaaaaacaccttcatatagcaaataatgtacaagcccaaagtgaatggtaaagggagtgccaagtaaatatcatagacatatgaggaacatagaaatttaaagaacaaggatcttgagtcaaaagcacctttgtgccagtggtgtgagttgtgttggcagcattttatatgaagtgagcaataatggaaaatcccagatacatgaatggattcagaatggtaagactctaggatttgagagacattttgtgggactgcaagaaagtgaatacagggaaaatagattaaacaagcattctgaatagtttgaactttgttctcaagcaatgggaagacaaactaccatttactggaaattagctatttttcaagttttgtgctatgcactttgtgtgtattatctctctctcttttttttttttaacaacaatccatttaggtagatagaaagatgacatgaagagaaatagaatagctttactttcacaaatttattcattgtgttagagaaataaaatggaaagcatatattctgagtgtgtatgagggttagttaaattaagttattttcatttctactttcccacattttagtcatgtatttacattgtggtgaatagactccatgttctagatactgagctgcaacttacagtggtaagtagttgaattggttgtcaaatgaagttatttgtgttccagtctctgtgccacagagcttctcagaggcagtaggtctgtcatcaaaaaaatggcactgtgaaagccctcttatgtcaccatctaagattttgtccaagagaatagaaactaagaaactgagatgctgactttgccagagtcatagagccaggaaatgatggatacttaacagctcccttccccaaaacaaccttgaatggtccaccagatggctggcatcaaggttcaagtatgtttgacattgggctgcctttctgatgctactgtgcagttctcatttttctggccttactttgttacttgatatagagacacaaactaaagcttgaaaaatccagtaaagtaaataaaaaagcattactgtttctatttccaacttcccttatatatcaaaaatattcagcttaacttctaaagccagagtagagttcattcatgtaaagccatttctcctagaggctaagatagaagagatttgcagaatggttggacaattaaagatggagttaatcattctcttttcattaggaagcacattgctacatgtccaagaaaaacaacaattttaaaagccctattttgtcaattagcataaaatatggtatttctctggtttactaagtcataagaaactcaatttttattactcttttctttgatattttttccataactatatattttttatttttgccatcattaggaatgcatatttgaaagaaatatgtacccacattaaataatcttatctgtgaaaggcaatagtaagtagcaaaattgactcagtaggcagctattatgaatgcctgcatagtacctcaggaaatatttaataattggaggctttaatattctaacacttcttttaaggtctcaagctaagaaggatcgctaaatttctgtgtcttgagcaagtgaatatgaagtagagatgatttatgaggtgaacaggtagtaaacaaagtcattttagggctcaagcaacttattgcttgtattacctggagaaagtcctagttttctcatttgttaaaaacaaatggtataaaaatatgtgttctgattcattggtttggtataggatttcattacatgttaggaaaagcaaaaggttttcgaaaactctagaacttatttcaaataaacactgttttaaaaatgtatcactcctagttattatcaatgttacttcttacccttttggtccccaacttttactgtcgtttttcagaatataacatttcaaatctgtggctcctttgtgaaaatgtggaatggggctctgaaacactgagcacatgctagcgttcagtgctcagtactctcagtgaggctgcccatcatctctcaggggaagccagagtgacagcatctcagatccacactgtccttgagcagggaagttggggcccagtcacagctcctgtacttctcagtgtgctcatcacctctctagggtttcacttccttccatggcaaaaaagaggaaggttgaaatagctgatcaataaacttctttcaattgttaaaccccatgttactatgaactacagctagagatgatgatcttgggatgctgagtaaagtattttaaaacataaatttagagaagttaaaagtagaagttttgaacaaataactaagccaagacttcattactttttgctgtagattttccattttcatactttgtattaaattagttaaagtgaaggaaacatcaacacaagtaggtgtgtagaaggccatctgaggggagattaaagtttatttatttatgtgtttattattttttgagataggaccatggtctgtcacccaggctgaaatgcagtggtgcagtcatggctcactctagcctcaacctcccatgctcaagccatcctcccacctcaaactcctgagtagctgggactacaggtgcacaccaccacacctggctagtttttgtatttttttgtagagacagggtttcaccatgtagcccaggctgatcttaaaatactggactcaagcaatctgcctgcctcggcctcccaaagtgctggccgcactacagactgtacctggccaagcctaaatttttagaaaatgtaagttaaaataccttattttaaaagactgcatatattttacaagtttctcagaacatttaatcaacatacttttttatactgatatttaagaaaataaaaaacggtgattgagagcttgaaatttggaatcagagacctgagttaaatattggctccatccagttttatcacttacagccatatggatttggccagtttttccaacttatttcagccatagtttctcatcagtaaaatgagaataatttagcacctgactcatagggtagttatgaagattaaatgagaatatgtgtaaagaacaaagtggagtagcagtgaatatgtgaatgtgctataactattcatatgactaaggataatttgactgatatattaacagtatttaaagttataaaatttagaactaacattccaaggttaaatagcttattgatgaaaaatatgataacttcctttttatgtactctattccagtcttttggattgctataccaacttgcattgatcactcttcaaaagtctctccatagcttacagaatttttattggaacttaagaccagagaatgtaccaatgtggaaagtaaagagctgttctggattagaaggaaaaaaaaagaaatttaatgtgcttttccttagttctactactgtttttgcttgctttaatgggtggaatggaactgtgactataattaagtaaaatgaatattgaaataaatattaacttcagaatataaatgggagaaaaggcactaaatacaaatttgcatctgcaagaagtgagaggttataaatatgttgttagatcacctataatgtctgctttaggcacctagttcttgcagttttacattgaaacacagagacaaatacaatataaataagtcattacaaagctcttaatccaaagagagagatacacacagaaataattaaaggatttcctaaataaaggactagataatgtgctgttggactaaagtgatggaacttctgaattctttttcagaagatggagaaaggaggcttcccaggtgttaacattaaattctagagcaaagaaaaaaaatgtgtagaattgtgtagttccttgtgtgggtacagaattttggggaaagcagctgttcaataataagtcctgatattttctatatatgttcagaaattaacatgcacttacattgttgattaatcctcacacatatttatgaattattattattattttaaataaatgatgtaactcagtgacatggcttgactctgtgtccccacccaaatctcatgtccagttgtaattcccagtgttgaaggaggggcctggtgggaggtgattgaatcgtggtggtggacttcccctttgttgttttcatgatagaattctcatgagatctggttgtttgaaagtgtgtagcaccttccttatccctttactctctcctgctagccatgcgaagatgtacctgcttctgcttcatcttctgccctgattgtaagtttcctgaggcctctccagaagcagaaatctggaaagtctgcagaactgtgagcagattaaaccatttttctttataaattacccagtctcaggtatgtctttatagcaatgtgagaactaatacactcagactgagaaaagttagtgacttatctaacaatatataatacctctcaattcagttttcttattattctgaggaaatgttttaaacacatgtgagtttgaaagtaaagtaaattatagtaaatttaggcacattattataataagaaaaagtactcaaaaggtaattgcaatagtttatgaatattaacatagtctaaaatgtgtaccacacattcactttctctaaacctattaaatggaatcaagattctgaaaaaaactgcaagaaaacaattatttatgtccagtgttgtcttaaaatgtcattgtaaattgcaagattatttattcctttttttgttttttatttcgtgtttagttgaccagatgttatccacagataacttcccataagaattaaatatagagccaaaagtattgcattaaaaatattgtcagtgagatagaaatccaggaactgtatgtgagaaaccttaatccttctctttatttcacaagttgggaacaagttccagtagtaagtaggcaggtggtgtaatgaatattttactatataagaaaatccagaagttactttcagctctaggtctgccatgtaaaagctttgggactatgaataaattatttaatttttaaatcacactgtcctcatctgcaaaataaaatatactagcctaaaataaaaataatctagtctaaatgcactttaagatcctttttagctttaactttacttttgtagaaagcttcagagggattttgacatgcattaagggataatgggataatttcactaaatgtgttagaatgaggaaaataaaattcgttattagtgcatcaggaacataaagaaatgttgaatggattttccatgggagacaacaatggctccatccaaggttataggaaaaaaaataaagtgatagaatatatcttcgaaagtagcttttaacatatgtgcagagaattgacacggcactaagatatttatattttaatctattattctggtaatattgcacaatatggggcttgaatcacatgacattcaaaaataggtttggtaaatcattttgaacttcattttgaacatgtctgcatggacataggaaatggaatgttgagtctgtttaagaggtttaagagagaagaagaaacaagttagggagagattctagggaaaggggacgcaggcaagaggggtatgtattcacaacattgtattactcccttataacagggactcttgcagactgagattacattttggaagagagagagttgaaattaatgttgacttctggaaatcaagccttatattaggtcacaaatgtaccaaagaggtacaaatgaagaaataataaatgaaataatttataagacaggttatatgtgtggagggaaactctctgcatgctgcataagtaggagttctggaaaatgccaactcttttctcatgtgttactttagacatcattcctccattaagccattctgaacctatctaagtctggattttgtgccctctgatagaccgggacaaatgtagcccataagaacttgtatcagtcacgattgtctttatgcttgccttttcccccactcagaaggtgcacaggcaggttttatcttaagcattgttgggcattgcacttagctccatttttgccatgtagtaggctgacacaatgaactaatggtctgtggtggcagaaattaagcttgtttgcaaagaaacacaatataacaataacaataaatacatcaaaaaatagatgtgaaaacagaagtgaagtggttaaaagctagggttctgatgaggaggagtgtttcttatataagatgaacctattactgtgtcatcaagaatcagtatcttcatgattttcagccttagtttccaaatttgtaaaacggagacaacaacaatgtctatctcataggggattttagaagttgaaatgaaataatacatgctcatgtataacctatgtatatgtaatacaagactaagtgctcaaaaatgtttaccatttttattaaccataacttctcctataaatgtcattagaatacagaaaaacaaggaaggattttctcacaacaattaagtgtgttaaaagtaatatagattattttgtatcaggaagaaatttcatccagcgtaaacacttttcatttcaaaaagtatgagattagaaattgtattctttcaaaactgtagtcagactgtatatttccagtgcctggcacatatctgtcaaatatgcaaagccatttcgtttcattttttttttattattatgctttaacttctgggatacatgtacagaatgtgcaggtttgttacataggtatacatgtgctgtggtggtttgctgcacccatcaacccgtcatctacattaggtatttctcctaatgctatccctccccctagcctccaacccctgacaggccctggtgtgtgatgttctgctccccgtatccatgtgttctcattgttcatctcccacttatgagtgaaaacatagtgtttggttttctgtttctgtgttagtttgctgagaataatggtttccagcttcatccatgtccctgcaaaggacatgaacttatccttttttatggcttcatagtattccatggtgtatatgtgccacattttctttatccagtctatcattgatgggcatttgttcccatcaatgggaacaagtctttgctattgtaagtagtgctgcagtaaacatatgtgtgcatgtgtctttatagtagaatgatttataatcctttgggtatatacccagtaatggaattgctgggtcaaatggtatttctggttctagatacttgaggaatcaccacactgtcttccacaatggttgaactaatttaccctcccaccaacagtataaaagcattcctatttctccacatcctctccagcatctgttgtttcctgactttttaatgattgccattctaactggcgtgagttggcatctcattgtggttttgatttgcatttctctaatgaccagtgatgatgagttttttttttcatatgtttgttggctgcctaaatgtcttcttttgagaagtgtctgttcatgtccttcacccacttttcgatgggattgtttttttcttgtaaatttgtttaagttccttgtagattctggatattagccctttgtcagatggatagattgcaaaaattttctcccattctgtacttcatttctatataacaacttggaatatcacagttctatgcactagaaaggagatttccatttttttcttaaccaatgaaacttcatatcctctttgggaagtaggtcatttaatgagtcattggtggaaagaaaatctactttaaaaacacaatactttctcttttgtttcacagatacaagtttctacaagatgcatttccctttacagttatgatagttctctttagaatctaaaggttaactctagcttgtgtgtgtatggtgcatgtgctgtgaatgttgtaagaaagccaattcaaagagattatgtaatttagaagatagatgctttgatttttttttcttttctaagaaccagcgtgctgccttttctaatacaaggttgggaaatagttctgtagctagatggggatatattaatatatactcacagggcacataatgacagtgcaaaaatatgctttcatcaagaacataaaagatggaacagaagtaatatttaacaacaggtagagattggttaccatggcatctattacagtgaaagtgtctaaaaagcacaatctgttgctctatttaatatagtaagtatatatttttgcgtttgtaaagttttgagatctagtctaatgcttttaatatatgtgatgcttctatatgccttaggaatgactactatttcaaaaagaaaaggttccatctagaacaataactcaaatataatgaataagttaatgcgtatatagtatggaaaaccattccaaatgattctgattgccactcccaggggattatgacttcctctcactccctttaaaattcaatatgttttttggcaatatttctagttgttcatacagcaacgagcctcccgcttttcttccatatgtgaattccatctaaagtattacattttaaaaaaatcttttatagttacacatggccatataatacatatatttagtgaatgacatttatcaaagtctggtaggtatttttgagaaagttttgctttcttgaatttggtcccatacttctttcttcttctcttgtctggaattcaatatgaggctgaaatgggaattatcatcttataaccattgagacaaaagtcacatggtaagagtaacttctgtgaggccaggagtctggttcttcagatttcctcaagtgcccagatctgtgtgggaatgccctacctggtgatttcttattactcaaaagacataaattggtttctgaccacagtagaggatttcaaattcatatagatgaacatcaacttaaccattacataattaactgctgtgtatggatagttatggagacttagtcctgaagtgttttttattaggattatatgatctatatactaatgactcctgtatttatatctccatcttgaaacttctgcctatttgtcttggtcatgtaattgtctggagtactacaaaattaacaagcccaacacagaacctcaaagtaccacttactcaccagcagaagctgctcatctagcagaattcctcatttctagctacagactcttctgttcaggttgtttcccaggcccaaaaccttgggatcatcctcatttactcaaaactcatatgtatcaactcaaaagcaactgattttgtttctaaaatgtattatggtataaccatttttcactagttttattgctattaaattaattcaaaccactgttgcatgtttcatgagttctcctaactggtcttcctactttcaatctgtctctccttccatgtattgcaacagaacatcaaaaggaatcctattaaagagtgagtcaagtagtgtcatttgtctgctcaaaaccatctcattcacaaagtcaaaaatatatgctcacaaagcgtgcacaatttgtcctccagtcatctctcctaatactctccacctctctcactctattacagagattttttggtgtgtacttttaaatgattaaagaattctgtcactcatactctcttgaattttcaagtgtatcctcatttcaattatctcagtctttctcagtcaaggtagtaattttgtaggccctaaaattaactaatattatactatgacaaacgttttgataatcagatttccttttgttttcatcaatctcagcttcatactatgaggcttaggagaccttttcagcatgtttattgacttcttatctgtgcccttagggacatccattctcaacttcaggttattcaccactgcctgctacaagttgctaccttatcttgtggtcctttgattccaaatattcaatttttcactattgtgctttgtcctattaattttcattctagaaaataaatgaaacaatgaaacattctttcacttgcactagaacagataattgcaaatatggcacatttttctcagtctgttgcctatatcccattattttacactcatttctgattcatttaaggttatttggttgcatttttaagctgactttggctaacattttgggaaaaaaagggaagatatttgaattctatttgaattctaaaaaaattaatcaataaccataaaaccagaggcaagaacaaaaactaagtggagagaacaatagaaaattcaaaaaatcctgtgatacaaacccacagccaatattatattaaatgggcaaaagttggaagcattcccgttgaaaccctacaaaaggcaaggatgccctctctcaccattcctattcaacatagtattgcaagtcctagccagagcaaacaggcaagagaaagaaataaagggcaaataggaagagaggaagtcaaaatatctttgtttgcagaaaagaagattctatatatattaatagaaaaccacatagtcttggcccttcagctccatcagctgataaacaacctcagcaaggtttcaggatacaatatcaatgtacaaaaatcactagcattcctatacaccagcaacagccaagccaagagccaaatcagaaaggcaatcccattcacaattgccacacacaaaaaaataaaatacctaggaatattgctaaccagggagatgaaagatgtctacaatgaaaattacaaaacactgctcaaagaaatcatggaagaaacaaacaaatcgaaaaacattccatgctcatggataggaagaatcaaaatcattaaaatggacatactgcccaaagcattttacagatttagtgctactactatcaaactgctaatgacattgttcacagaactagaaaaaatactattttaagatgcatatggaaccaaaaaagagcctgaatagcccaggcaatcctaagcaaaaagaacaaagctagaggctttgttacctgtagaaggaaacaacagacactggggcatacttgagggtggagggtggtaggagggaggagcaaaaaagataactattgggtactgggcttaattcctgggtgatgaaataatctgtacaacaaatccccatgacgcaagtttaccttcacatttaccctcaaccttaaaataaaagttaaaaacaaacaaacaaacaaaaaccagcaaaattttgtcatagtagaaacaagcttgttagggctccaaccttatgaaaagaaatctaaacattagttagtatgtgaattgcttaatattcaaagacctgagagagcatttaattggctgacactagctatctgattgacttctggctctgttctaagtgaaagaaaagatctatctggttctttggcatctatagtggaaaaatttaccatcccatacaaatggaggtgaggattacaccaaaggaaatccacctgctctttagatggggtagaatgaaaaatgagcgaccaagaaatatcaaagatctaacacagagatcctatccaatatttgtttcccaaatggcagatgtctactatgaaaaattattattttaatcttgctggttgagagtttccttgtcaatgttttttttaaattatactttaagttttagggtacatgtgcacattgtgcaggttagttacatatgtatacatgtgccatgctggtgcactgcacccactaactcgtcgtctagcattaggtatatctcccgatgctatccctcccccctccccccaccccacaacagtccccagagtgtgatattccccttcctgtgtccatgtgttctcattgttcaattcccacctatgagtgagaatatgcggt

SEQ ID NO: 2726 - DNA, 5517 bp, Homo sapiens
cacagactgtctttcaagtttatttagagcaccagaacactttagcccgtgggtgaaaaggcttgccagaactcaagttctaacatctggcatggatgattcccttctagttagggctgatttaaatactcccttcattgcggtatggggtgacagggctgctgctgggggatggggaagagatggcattggtgattcaagactctttgctatcctcttcaatgcctctttcagtgtaggaagttaaaatcagttatgtaatggaattgaatgaagcaagtgtcagatctacatctctacaaacactcactttatcagttcagagaataaagagatgaatttaataatgccactggacacttatactctatcggatcctaataatttctcacactaatgaattcttctatcaacttcatgttaatcaagaggagacagagccaagaagtgagtaattgcttactgaattgtgaaagctgggatgatttaactacagcctccctagaatgtgacagtccacagaaatatctgatttcaaagagatgcttgcattctgtactgatgccatctagaattgtaaatgaccagtgtcacactgctaagtggagaaagcgtgaaagaagaatcccatcagtacattcacgatagaggaaataagaaacaatgaaagccacaagtttactcgaaggcagcaaaattggccctactcccaaccctgcaacatgcaccatttccataaacaatctacagagatggctgagaaaaagaaaaaggggtactctcctttaccccttctccaaagcccgatgaagtaaagagtagaaatcaagagtgtctacaagaattggggattggcattgattctccactgtgtgattactcatgctttatggcaatgtgcctatttaaagggcaggtaatgacttagcaagaaggaaggagagagaatgtcaaactcacctgaagtcttaccaattggtgtggcaggtatgtggctgtttcccatgagtgaatacactataagattattaggctctagctgttttgcttgtatctaatccaggtgacaccagcatttagagactatgaggtgtactgggagctgagataatgaaagaggtagcattaaagtaatatcccccaaattatggcagatctatggttagaagcctaagaataacatgtgaaaacctcatgtcagagcctgacaatataccagaatttggatacctgccatacagaaggtaccagccgccaaggggtaactgtcagaaaagtgacaacaatcacaagttgggaaaaggacttgtctctttgcccctcactcctctctgtgcccaataatttggatgagctattgcctacagaatgaaaggagagttgtagggctatgaatcaaatatgagacaagttttaaatgagaagaaagtaacatttaataagcaaaaatgcccagagaactatggaatcatcccaagaaaggattaataaacaaaaattggattcaatagaaaacacatcagagaaaaaagttaatatttttataccatagatgtgagagtccttaatgcactagttacagcatattagtgcattatgtacattccatgtgactctcttattaccactatacccacaatgcttagaactgggtcctcaataatcgagtatgggtggctaaaggacttttcattttatgtggcagaggataataataaaaaaagaaataatagaggaagaaactggctttggtgttctagacatattagggctgaaacccaaatattcagttacctgttttgcttggcctacatccattttcagcagtgcactcaaagtctccaaagaaatttgcagagaatttcttccagtagccccaagagttctcagcataagtactggaaaaactcactagcatggaggatgcttctctccagtggaatcaacagtggcctctgctgattcagagacttcagtgttccacagtgaaactagattgtgatgagagcaaatatggctggaaggcaacactgctcaggtggttagagcgtgagttctgtagtatcaaggagcttttttctcagtgtgtctgtcagtggagaatttgggggaaagatcaaatcaaattgctaaataaaacataaagccccacagagatggaagccagcaatatgtgtatgctgtggtttgggtgccccctttaccttccagaatgtctttgaactgcatgttgagctggtttcacctgggtgaaaacatgagggaaaaggaagtaagggaaggatggacagatagtggtagagactgatgaccacttcaagtaagtgtgctatcaggagaataactctcccatgtcttcataggagtcagtgaacagtcacctgttgtatagaatcacccatgggcagtcactggttaccagcagcagcaccaaccaaccacctgagaattacaccaatggtcagttaggcaaagagacatctgcctccctctcctcttccccaacacttagattttacttatcactgattcttgcatagaaatggttctgactggtgaaaacaaagagaaaaatatgttgaaggaagtacctatgaacctaattattattttactcatttttttctccaaagtctattgataaataatgttttcagtgtcaactttgactttattttcaatatacaaagtcaaactaaaaactttcgtatttcaggttgaaatttatagtgtaactctttacttttaatggcttccagttgttctattttggtttctggcagaaatccttttggtatgttacatagaaatatagatagataaaggaaagccaattatcttttctttacagagaaatatcctgaatgctgtaagttgaggggaatggcagggtatgtactggtatgactggccaatacagaatctagtctagctgagatatggcttttagtaggaagcctcatagggaacatgatggaggaaaatcctttcatttatggtatcaagagattttcattttaatcccagctatattttacatcaatgttgtcatgcattctatcttctctgggcttgagatatacaagatgaggatgctgatttagcagaagttcaagcatcctttccaaggtgaacatctatgaccactcagtgttgagaattacttcagactattattaacactattattaaccaaaggaaggacccccctgattactgatcagttctccagtccattgggaaatccttctaaaggccatttcatttcagactgaaatgtacaaatgtataaagagtggaaaagacatcaaaactaaaaatactatgttaaactttgttccatataggacaatacatcaaagattaaagttaggttgaaagcaaagttctatgaggataagaacggagtctgtcttatttattgttttattgtcagtgctcagctcagaatgacatttaagaagtgtttaaatgactattggctgaattattaaatgcagataattggttacagtgaaaaaaaaaaagtttgtgggaaaaaaaactgcgtagctggattcctgtgatcccacatcatcccaaccctgtaagttcagggtccaggccaatataaacatgagacagaatataataatgcagtatctgcctcagaatctaggcagcaagacccacagcactttgccccttgagtgaccactgcattacttcattggatccccagtccttcttgataccagagtgagtaggagttatttaattccagtgctgactactagccttctctagtcaaagctgaccctctgttgcagacaattcacctctaatccctcatttcagagtcttctctctccctattgttatgagtgccacttacagtcaggtttctgctttaatcactgctttatattctgacttaagtcagttgccagcttctaccgtatcccagtggtgattgtacacttaagtagatttcttagagtcccataattatgtaaagacgcccctcacctaaatcccaatccaaaggccaaggccccattatccatcatcagcagtttcatccacacaattttatcttattacctagaattctgaatttgcacatcggctttcccatcctgttgctctttttggagctgctttctatgcagaattcttgctgtcttgctcttctgatggaatctccacctatggacagggctgatgggcacagtaacctaaatcttccttagcttggtataaataaattattacatttgccaggttgtcctgagttgtaataataagtcattcattgcacctatacgagcaactaacatcgcttttcatttttaatctatgtgaacatgatctgacaagaatattaaatattcagaccctaaattttcaaatgataaaccagtgggaaagttgttactagaatttctaattttaaaaggaatgttccatcatattatttttgaaatatgtaagtaaaaaaaactaaaatgcactcattatcatagtctttaaaatgatgtgtaaagaactgaaagtctcccttttactaattctattgtttagagaaaattattgttagtatttattgagccctaccatgttccagaaactgttctaggccctgaggctagagaatgaccagaaaaaattaggtgccttcacagaccttatattttgatgaggaatacatacaagcaaagggaaattaagaaaaataaaagataaatgataaggagaaaaataacattaggttagatacaggagctgttgggggagaacatactgaaatattggattcagtggccagggaaaatgtcacagaagaatcgatcagaccatccatgcaaatctctggcagagaaaattccaagcaaatggaatggtaagagcaaaactctgagttggaagtctgattagcatatatgaggacagcaaggagacttgtgtggataaaataaagggaaaggaaagaaaagaaagtgacagaattgctcggtgggtatggggtggaggagaaccaaggatccatatcataataagtacagccactcattgcttaagaacagtgatatattctaaatgtgtcgttaggcaatgatgtcgttatgcaattactattatattcttgtgaaatcatagagtgtacttacacaaatatactatagcctattcctcttaggctacaaacctgtacagcatgttactgcacttaatactgtagacaattgtaacacaatagtatttgtggatccaaacttatctaaataaaacaaggtacagtaaaaatatggcataaaagataaaatatgttacatctgtatgggacacttaccatgaatgaagcttgcaggactgaaagttgccctgggtgagtcagtgagtaactgattagtaaatatgaaggcctggacattactgtactatacactactgcagaatttagaaacatggtacacttaggctacactaaatttataaaaagttattttctttcttcagtaacaaattacccttagc

SEQ ID NO: 2727 - DNA, 3224 bp, Homo sapiens
gtacgtgtcccgcccctcgctgcccggagcccggatgaagagtaacgccattaccgccggagccgccgagagccttagccgacggaaactggacactggaccggcagcgccatgagactcctcccccgcttgctgctgcttctcttactcgtgttccctgccactgtcttgttccgaggcggccccagaggcttgttagcagtggcacaagatcttacagaggatgaagaaacagtagaagattccataattgaggatgaagatgatgaagccgaggtagaagaagatgaacccacagatttgaagataaagaggaagaagatgtgtctggtgaacctgaagcttcaccgagtgcagatacaactatactgtttgtaaaaggagaagattttccagcaaataacattgtgaagttcctggtaggctttaccaacaagggtacagaagattttattgttgaatccttagatgcctcattccgttatcctcaggactaccagttttatatccagaatttcacagctcttcctctgaacactgtagtgccaccccagagacaggcaacttttgagtactctttcattcctgcagagcccatgggcggacgaccatttggtttggtcatcaatctgaactacaaagatttgaacggcaatgtattccaagatgcagtcttcaatcaaacagttacagttattgaaagagaggatgggttagatggagaaacaatctttatgtatatgttccttgctggtcttgggcttctggttattgttggccttcatcaactcctagaatctagaaagcgtaagagacccatacagaaagtagaaatgggtacatcaagtcagaatgatgttgacatgagttggattcctcaggaaacattgaatcaaatcaataaagcttcaccaagaaggttgcccaggaaacgggcacagaagagatcagtgggatctgatgagtaaatgttcctttgtgcaacaattcggtctttacttaacctgccctaatatttttcggcctgatgggaattagtgcagagaagccatgtcaccatagaaggcaactcctacttgtgtgtggactgagcaatcagagtctgtggcgataatattgctgaaaatgcactgcattcatttttctaaagtaacaaatttggtttttttttaaaccattaaaatctatgtgtgtgcgtgtgtatgtatgtgagcagttggtcttaccagaatcattgttgaactacctgaaacaagtctttagaatactaaatataatgctgttgtctcttcctttttgacattttctgattttttcccccaaaactcagttaatatttacccactatgattattgatgtcctgccttgaacagttttaaagaaaacaatttttggaatagctcaaatttcaattgatggcacaaatcagcattttgttgttgttactgtattacaattagtattctaaaggcagaagcagaagtagctgctttttagcaatagaattgtttcagtattttgctgctgtttaatgcgcatcttcagaaaacttcccagtggcttcaaggaatttggggatctctctggcaacaaattgtgaaacatgaaatttctgctgactttaatatatgaaacctaatcctacccccttttttaacaaaaagaaactagtacatttgtgaaaattgtgttgtgttgtccattgttgctctagttctgacccagaggtagctctggagtgattttagacctactcactcagttgtgtgtaggtttttttgttttgttttgagagagaatttttctctccttaatagaagcatcctttttaaagagaagttgccttggtccacacactaagcagaaaaccaagttatcaggacagagatatttcccagttactcctaatcaatgaagaaagtgagttggatatttttaaagcagttaactaattttttcttacctaatcttttgggagttttgcttgttgatataacctttttagttaacctgaaagattccaaaaattgttcttaagtgcttgagactggaaccaaaattaaattgtacttcataaaatcctcttatagagttactcttgccctagattgtaaattaagtttggcattattgtcagactggatggagggtgaagtaaaatagtatgaacaattaagaggctctccccctcttgtctttaagccatattctcctacatgtattttataagaaaatgttaagtcaaattttagtggctctttaattcctgacctcttcattctccttttcagtataacctcccctatgctcatgcccacacagacaaaaaaacaaaacgaaatacacacagaaaaaagtctttccaaactgtttaagtatttaaacatctgagccaaagcagatagaagttattgtataattgttaatcactttgcaaataggggctatcaaattacctatattggcattgctggattataaactctatatctgtaatataaagtgtttgagtttttaattgggctgttatgatcagtagttgattttgagaaagctctatgagctctaagtaactgcatggttttttgtttaatgtaatataggagacccttcacattcccaaggaatatattccaaaacatttttgtgaatatctaagtttgtgaaactactagggcatgatacagtaaggtgtaattacagaatttacgaaatgtaaatggcctctacagagttttatggaatacctggtactaacgtaggcagctgcaaaaccacactgagttacagctgtcagccctcctcattcctaaataacttgccttacatatcagccctcccacttctgaagttcaaattagtgcctcggaaatgtagaatttattatttgtcatttttttttttttagcatagattgagaacagttgaactcttaaatcctcagatgccaggggtctgctctagcatcagtaagtatttagcagaaactaactccgtaatgaatggaattcaattccacacatggtttgttcaagcacacttaataagtagcctattttttaaatgtctttttaaaatgtaaatatttggatgaagtttttctttgttttgatatattcatttgctacaccaactatgttttcagaattcatcttttgaacaacttggtttcagaatatgtaaaatgactttaaggatcttgtgtatcaaacctatccccgga

SEQ ID NO: 2728 - DNA, 13226 bp, Homo sapiens
gcctcctgagtagctgggactacagtcacatgccaccacacctggctaagtttttgtatttttgctagagacaggggtctcatgttgcccaggctggtctcgaactcctgagctcaagcaattcgtccacctcagcctccgaaagtgctgggattacaggtgtgagccactgcacccgccttcaagagttatcaagagataaattatatttcctctctgaagagaaggtgaagtcatcttctgagagtgaaatagggagtgaggtgggagttcagaaagaatggaaacgtttttgaagagtcaaaattattgactggggacaaaggaaaagatttccatacagtgttctgttggagttggaaagcatgctctatgtggcatgatcgtctcaatctgcaccataccccatgagcagcgagttggggtcctctttgggtagatgttttgggaaggctggcagaatcacaaggcgctgagcatgctggtgagacccaggggagagtaaagctagaaggtgcctgaaactgggagaacgatgagatagaagaagagatttaagggaggaattgaatgagaaatgtcaatggattgcagattgagatcttgacagatctcagaggcactttaagattctaggctgacactggagaaaacgtggcttcagcaggatgcatgtcagtgaccacctactttaaactgacgctggtcttatttacatgaacaaaatatggagctgttgaattgttgagagggtgactgagaaaggctgtaaaaatccaggttgggtaatccccaccatcttggattagttagtgtgggcctctctggaatcagataggtctcacggcctgtctgccaggtcttatgattatgtacaggaaaagagcccagctaataggtgttttgaaaagcttctaaaacctataattgtgagccttttctaccttggacttttgaaggtttaaaccacagaatttttttttaaaggttgagttattttatgtcacaatgccttacaataaatttgtctcttccagaggacagttcctatctctcactttatgaacttttaggcccatgaagtgaattttctaggccattccccatacctccactccagccaattaatatcatggtttgcattttcatccaatcatgcatattctgtggggttggttcaccacacagacacatgcttttttacaagtgttgtcaccaggtgccaggcataggatgaacctgctgaggcagacaaaggatctttctgtcatgcagggaagagcaccagcacgtgagagccctgcctctctggccctttctggcttgtcttgctagagttctccatgatttgtctatccttactctctgtccttaccccaggctcagcctcaagctccccctgtatctaggtgttggatcattttaacatctgcagtttggtggagctgcatgtctctgttctacatacaaataccaaaagaacacaggtctctaggtatctgtgaacaactgacatcatccaaaaagagctttaaaaatcaggggaaaaaaaaaatctctgttgtgttttatctgcctgttgctttgattacagagcactgaagcaaggttttcaaatgtcctttctttgtcaacctgttatcctgccttacaggtggttctgatttcttccactgttattacagtaggagactaaatgtaattacccagcacttcaatttagacgtcaaacacgattatacagaaaacaatctgttagagtgtcccaatgattcagttgttacttggttttatggtgaattctagataagaaatactaataattaggatctcagttgccctttatggcttaacctttatatgttcctggccatttaggaacctagattcatctcatttaaacttctacagatgaagaaaaagagaccaagaaaatggaaatcactcatccaggttcagaaaactgtctgggagtaggtttgggactagcacccccatctcctgatacagaatttaatgctctgcagctctctggggaggagccccaccctctagttgctggagaaggggactcagaggtggtgtggaatggtgctctcatttaggggacagcttgtggggcaacatgtaaagtattctggttctccattggccttacaagcagaatatcttgtaaagtttttcatcagtacccaccaaatctctcccctccttccctcgttttctggtgggtgtgtgtttaaggtgaaataattcgagcaggtaaattttgttttaccaccacacattttaatatcatatgcatatgaatagcaaataaaaattaatctcctgattatttataatatgtcactctctgttaacaggcagagatttgtgttaataattgagagctctctggctgggtgcagtggctcatgcctgtaatcccagcactttggaaggctgagttgggtagatcacttgacgccaggagatcaagaccaacctggccaacatggcgaaaaccatctctaccaaaaatacaaaaattagccaggtgtggtggcacatacctgtaatcccagctcctcaggaggctgaggcatgagaatcgcttaagtccaggaggcagaggttgtggtgagccgagatcgtgccactgcaatccagcctgggccacagagtgagactctgtctcaaaaaaatatataaataaataaaataatgataataataattgagagctttttttaccctaaaatttcactggtctgttatacaacaaagaggctaaaactgtgttgagcagcagtaaggtttacctggtcttacagctggagggtgtgggggtgtagatgagatttagatagcacgggcactggtttttctgatggccagtcaactgttacctggcttctgatctaccaaggtatggcacagactctctgtgatctgcccagaagaggagactgaatcagtgctattagaactctggcgttccctttcagaaaaggtagaagttctcccaagtcactgctcagggccttgtcagtcagtttggtagatttgatgtttattgatgcagaaacagggaccaaggaaatgtccctaactctgggatttttgtcactttgcagaaaaggcatagtggaagaggataaaacattctttgaaagaaggaaatctccaaggtgtatgtatgtcttacatacttaggtgggagaaggttatttgactatgaacaagaaattgaataggaaccagttaaattgctgtaagaaaattaagggagtcctctaagaaagtgtcacccctctgcctccctagaataggagttaatgaattattctgtgaaaccctaaacaaaatcagataggcttcctttgctagagcttgagatcccttagtttagctatacagcatgtgtggtcattttggaggattgttttctatttgctaattatttggctctccaattttgctttccccagggagaatcccatctggataaactatcagttaacagccatgtagtcatccatgttaatagctttactgagtagctagctactcagacatgctagccgtgtagagaaatgtgagatgcggtaggtgtttcaatatatcaatggtacctatggtttgattattttcctggtctgttcaaatgctattaactgcttccaaaatgttataaatgatgtgtttgtagtgtggattgtttctctgttatctatattagtgtttctgtctgttcttaaatcactcatcaaatacttttgtgttgtatctgtttcattctcccctgccccagtcaaactgagcctagtattatgaggtaggccattttgctgttgagtcttgaagacaaagaatggtaatgcaaaatagacattactacttatagcccccttcctctctcataataaaccctgtctctgttgaacttttaactgcaaccacagtccagagtttcaaggagccatctctcaaacatgggtatcattaaggtccagagatttctaaccacagacttactatctttggaataaaagcctgagagcagcctaactcacgtctaatgcaggaagggcaagttaaaaacagccttggcatccttgagatcactgaccctacaggcattatagccttcgagttttattttgataacagcctcctagtgtacttgtctgctatttggttaaattgttgcaaagcaatagacagcgaccctctgcttttatttctagctcacttcagggtagggctaatgagctttcactctgggctgagtgcttgggtcatgcggtgacagatgtaggagaagcaatcctaggaatgagctatattaaaacataatctaagactctggtgctgcgttgccatgaggcaggggcagtgtggcgtctgtcttccccaatgtcacaaaaagcaaagtagtcacagagtttcaacaaagcatgttcatttgaccttggcattgatccaggtctgatctattaacatatcggaagtaacatgatctttaccatccttatcatcatcgtcactaacaatcttttacttatttttttactaaaaatcttttattgaaacttttactatgtgccaaacactttgctaaggatagtatcttcatgatctcacttaacttacaacattaataagtgagtattattaatttcccaattttagagaggaggaaactaagattagggagactaaaagacttccttaaggttatttttactggtttgcagatctggggttcaaatctaggtctgatttcagagcccgagcttttaacacaactatgtcatattaaacaaataaatcaaccagcgtggtggctcacacctgttaatcccagctactcaggaggctgaggcagaaggatgccttgaggccaggagtttgagaccagcctgggcaacatagcaacatctggtttctattaaataaaaaaaaaagagagagagacaagcaagcaaagaaatcagaaactgtttatccggcatctcctctttgtaagatgctatattagatttgtggggttggggtacaaaaaagcataagttactttccatccccaaatggctttaagtgttattggccaagaagtcatttaaaagataactagcaatgtactagatgccaagtatgtggagcatagtaaatattatatgaataaagaggaagtttggagaaggtgagagtcacactgggccttgaacactgggcaaggtttatatagatggaaaataaataagaaacacatttcacaccagggaggtgatgtgaacaaatcctaaggatgaggaagtacaaggcatgtcatgttgttgaaggttggagaatgatgggaatggggtagatgaagagtcagttattcaggaaagaagttttcgtgtactcatctatttggccctcagatatttactgagcgcctgctatctaaagttgtttctgggggaagaacaagagagaagggtgaaaaggtagatttttttttttccagagttgtctggctggcctgcctcatgcaaacatgttgggcattggcatttggtcagcagcctcttctcttaacttcacagttacgcacacttggctggagtatgttctggctctgacctttcttccctggccaatatgtcagaaggaaagagaccagctttggtatatcaatcttactgatttatttctaaacttgaaaaaaaaatcaaagcaatatagcagtgttagaaaaatgtttaaaagaaatgggcaatcacccatagtactaccttcttaatataactaaggtttctaatcttttctagtttttagcatggaaataatgccttttttacatgcttctaatcagatggtgtgtacagttttgcatcctgctttatttacagttagaactcatgaaaatgtgttgagtaaatgaacattgatgcatagtgtttacgggaaccaggtgtactgcctcttctccgttgttaatataaattgttttgaatgttctctattttaatggagatggggtcagtgaaggttttcaggcatcctacttttaaggtatggcttttgaattctgatacagacaatcggaactatcttagcatggattcaagagacttgagaattgaaatcctgataggcaggagcaagataaatatcactctagttccatctatccctaaggagaaccagcttaagcgcaaagacaatctctcatttgcaaatatgggcatgattcctttttttgcttttaattgcccaaatcttgcccctttgtccggcatctggtcaaggaacagggaagttctcagataagggatgtgggagaactgggaccaagtccttggaatttgaatttttcctcccacggtggttgtctgggttgctgttcttgcccactctgtgatccaagtagttgctgagttcagaattgccatgggcttttggaaacctcagtaactgctagttaactaaagtaacaggtgtgaaattagttctgtggttcagttctgccaatcttaaacccataaaaagtacagagttctacgtgtattaatcagcagtatccttctctctcccatccattttcgcctgcctgaataatctccaagaactactctaaaagaacacaagtattgactttgacaaattacacctccctttaaacattcctctgctcagcttctgaattcttctgacagtctaaaaaatagatccaataagacaatattattgcatttcctttagattgatttatcttgggagcatctcctctttcttgtctgtacacctggcactgagatggtagctggcataaaaatccaaagataaatgcttaaaaacatcagcaaccaaattaattcaggaatttatctcactcatgtgaacttaatgatcattctcatgtttgatgagatgttctgggtggataaagcatcagagcaaagagagcaaaatgcgtggtgggtgcaggaaaaaggaaagttccttaggagaaacagagttgagcagtcgccagagtataactcagtagtaacatcaccaaggaagagaaggggtctgtgatgcacaggaagccagcgccaggcctggtgaatatcaaaagcagcagatggggagacaaggaggccggctggaagggaaagggtggctattgtcctgctctgtttatctgttgcttgcttttattgagcacccaagaggacaaatctctgaactagacgtgctccctgacctcttcctgcaagtaacattcagaagagctggaagataatatacacttagaaggtccagtggctctccatttgttattcttccaatggaagaccctgaactaggaacttgaggagaaagattagccatctaaagaaaagacttgcaaaagatctcaaactcaaatgaaatggatcgccttccaccaccatgcgcttccagctgaaaagtggtcatgtgtgtgtatggcagtggctctgccaccttctatgtggctcctttgtgttttagactgagtatggaaaggtgctcagcacactctgtccttttttccctgttagcataggtatatttctgtgtccacaggtacaaagccaaggacctatgtgttctagtggtcagaacactggacttggtaatggttatcaaagctactgtttattaagcgttttctctgcaccagggaggtagtcgaaggtgctatcttacttctgaagatgctgaggcttgaagacattgattaacttaccaagaccgtggaattagtaagaggaagacctgcattggcacccaggttgatctgacttcaaagcctgcattttttttactgcctatggcaatctgtctcccagaaaccagaacaactagtttaaattcccagctctgctactccctagctgaatatttcatgactctggccctcagtctgtcaaatggaagggttgtgctaggtgttttctaacattcctactagttctgaagtccagtgcactgtctaaggcttttatcaaatatatgatttgcaaaacttctctccaattcatcaggttgtcttttgcttagttttaagcaggactttcatgagtataatctcaagcagtctggaatgtatggggaaatggtaggagaaattctttgattactatttattgagtgcctccccaaggatatagcagagaccaaaactgtcatggttcggcctttgaaaaaccaatgaagcagggaaaacagccactgaatatgttacaagggttgagtgttatgcagaaagattacagcatatgtaggcccttctgagggtaattcatgtgaatctggttcagccagttcagtgaacatctgcatgtatcccagaccaagcaagcaacagtatttattttattttcattaatttttaaattatttttctgcttagagtcttctcatgcacaagagcaataggatttaacatctaaatgtaacaggtgtgacaggccacctgtgttcagtcttctcttgttattcttttcttttttgaggcttcttacataccccagttttgatgggagttggcagggcatgtggagttgtacagtgtcagtctaaagaggaacaagggaagatggagataaggaagaagttaaagttaaatcaggggttaaagttagagggatggaatgaggtaaaaataatgagttataccttaggaatgtctcccaaattctcgcttactgcagcaggaagcataggttagaagggagagaagaaaagaaccacagattcacagtctctctgatttgaacgggacccaataagacatgtggtccaacctcatctaattattcaaatggcatctgcaacatcccaggaagactttcagtttgaatgctttcgttgacggatgatgcctacctgacaaggcaggccattggattgtagggcaagctcaggctgtgaagagagacactgctttttgttgagatatcttaaaaaaaaaacaaacttctatcttctagctttaattctggccttctgtgttctttcacttaatgtttacaaagttcatccatgttttagcatttatcatcacttcattcctgtttattaccgaataatatttcattgtatggttaatatcacattttatttatccaaccatcggctcatagatatttgggttgtttttacttttcagctattatgagtaatgctcctgtgaatattagtgcacacatttttgtgtggacatgttttcatttctctgggatatacacctggaagtgaaattactgggtcatatagtaactgtatgttaaacactttgagtgaccgccagactattttccaaaggactgcactattttacattcagtgtaagtatattgcatatatatgcgggttctaacttctccatctcctcgtcagcacttgttatcatctgtcttttatgttataaccatcctagtggccatgaagtgctatctattgtggttttgatttgtatttccctgatggctcatgacgttcagtatttttaaatgtacttatcgaccatttgtatctattcttttgagaaatgtttatttaggtcctttctccagctttaaaaaaattattttgttattgagttatagttctttatatattctagacacaagtctcttgtcaaatatatgatttgcaaaacttttctccaattcatcaggttgtcttttcatttattgatggtatcctttgaaacacgaaaccttctaatttcgatgacgtccagttcactcaccctttattgcttgtccttttggtgtcatagctaagaaaccactgcctaatccaaggttacaaagatttatgccaatgcttctgagagttttatagttttagctcttacatttaggtctttgatcctcatggtctatttttaaaaagcaagttgtatgacatttaaaactcagatactcagtcctcattaaaacttcatctgaaatcaagattagaggaaaaagagtttagcagagtccttccttgcaagtgacccaaaaggttgcagttttataagacaaaaatagactagacatctccagagactttattatgacttttattaggactttattatgactttcattaaggcttgggtttcgaggtgttcaaacctgcaaatatgggtgatagacggatggaccctttgtagttggcgttaggtgataaagagaataggaggctgctgcccaccgccgtttcaacacggccagcagctctgctctctgcctcctgtcctgtgtccttcctcctttggatctcttggcctgagatcctttcagatggtgatttttggtccccttttgtccacgtagttgcttacacatgctagtgcacccccacagcctcatgtctgcctgtccaccccatctccctcctcattctgggactggagacagtttggtttttttatgtatcaggataatgaccacctctttttcttcccatatgagctcccactcccttcttctctacgtaccttccttggagctaattcacacatacctcagggtgcttcttatttttcatgttttttttctcttcctatagatagaactcataaggtttccatggaaacccctgatcagaggtaggggattcttgaatagaggtgagatacacaagctttgctcatttctgaggggctctgggagtgtctccctcactcctccgccaactccctctccaactcttcctgggtcagctcttgggtctgtctctataagatgcttcaggagcccccagaactttgtcttaggatagaacagatggtggtgacgatggccctgagagtccgggctctaggaagaggctgctgctgggtgggttgtttggcatctgcagaaaacctgaaatctggtgtgtttcccaggaaaagggaagtgcttaatggcaatccaattctccctattgcgtcatgagacaagtcctggttaggagagctgggtcccaaattaccagcattgccttcccatctctggttgagattcttgtatgcccggtctttatatgaatggcaggtcttaggcatgcatataagcaaattaacatgctggaactggaagggattcagagtcgaggttctaatatataggttgaaggttcctggaggactgcagagttacagcaaaggctctaagaggccatgtgtgcactgaatgctgcctggggaacaaatacatcaacgtggtcaccatctcttggaactatgctatttttttaaatgataaaaattaatcccatacttgaaaaaattgcaaactactgatttgttgtagacctattaccttgcaaatgaagtaaacaggggctcagacagcaagagtgaggtggcgactagcctgaagtcagccagctaggaccggaggcttggggtggggtaagtgttagtggcagcacctactgctctgtttacccacactgtggaaagtgctatactgggaaaaggaggcctcctctgaccagcaagtgcctactcctgcagctcagagcctgagaaagaaactacacattaaaagtgaaactgaggtggtttcatcttcccagaataaatgaatgatatcagtagaaaagctaggggatttttctggggattggggggaagggagttcaaggaagcagcagttctgaggatactgatttcattcattatctttttgaaaaataaattaatattttaaattaggttcctaatcacagagtgtgaatcataacagaaggattgggtggcctccctttcaagaccagcgctgggaagagctttgaacctgagcctaactgtggatttagatctggtgcacttctccccacttctgtacctaggccagtcaaatccagaacttgttttttttaggggatttcagaggagttgagaacacgaaggtccataattaagcatcattgatttttaaattattttggctctgaggtttaaactggcattgaactctcaggttcagtttagaactctcttatattgtgaaaactgcctcagtgtttccattctgaagaccttgcagttgcttgatttgcatataggagtgtgatatttaagtgtgtgggaaagtggatgaatgtgggtgactatgttatgcgtttgtgaaaaagcatccaggaatataggtgatcatgtggcttgtcaggacttggcaggatgcagatggcacactcggatagggtaatggggggcgtttaagaaagggactctctttaaaggtgtgggtaaagttaagggatatcagcaaaggataaatggagcaaaggataaatgaggcaagagaggtcacctgacctgagctgtggccttgggtgcagagatgcagtcaatccacaggaaagtagcaagggagaagctgagggacaagcccctgtcccaattctcctcttgccctcctgtatccagccagtgcctcccttggcaggacccaaccagaagccagaaggcaagagaactggttacacttctcagaagggccagcctcctgggtcacagagcaagatggggctgtggggctgtgtagcaagatggggggatctactctacacatgcagagtggatccagagttgaatgtgtaatggtaggtcgggtaaaatcttactgtgagaacactcaggcattaactggggctgacctggacttgaatttaaagagtgcttcctacttcagagtcttgctctctctctctctctctctctctctctctcatttcacctattctgcttctttctccctgtggtagggaagaacctagtttccaatgtgtggcatcttgattaaatggaaagtacatgggctatggagctaaatcatattagcttgaaattttagctcagccacttactgaatgtgagccttgggctagttactaaccttgcaagttccagtttcctcatctgtaaaatgttggtaatgttaaactccttgcaaggttgatataagaattaaagactatgtatctttatctgtgtcagtatcttcatctcccagtatagtggttcattcatgttaagtgttcaataaatactggctatttttctcatatccaccacctgggctgtcggtcacacctactcattttctcttatactttgcttcacgaattccttcttctttcctacatcattaatcttttgctctctagtgggtctttcgtttttatttcttaaatacacatctccctgatgttaacaaagaaacctctctcccaacctaaattcttctcta

SEQ ID NO: 2729 - DNA, 8563 bp, Homo sapiens
aatttctactttaaaatacaactatgcacctccactatcttctggcatctaatatgaggatgctttttgagaggcttttcttcctgaaagatggcaaatgcttcaaaaactgaacaagttgataaattataccgggacgagctcacccaccactgaagtgcaaccatctttggggtagctccctacagctgtttaccaccatgctgtggtgcctaggagcagtctgtcataaagaaaagaagaatgcacttggaatataagcaacaggcaatttgcagaagagaagatataattatctagattggaatatgaccaggacaaccataccattcccacaaaccaccaagaaggcaaaaagaagctactcagacagtctggcatcaaagcgaaagcatcagtcaagagaaggaagtggcccaaaaatgggagatccagcaaggatccaaacaagagaatctccaaattaattttgctaagatatcctagaatgacaactgtacatcaggcattaagaacaaccgtcttgcaggtgggaaagcacactgaggacagagttttgttttctgattatacattctttgaatctaataaaattgttggagcatgtttcaaaaatagaaaaaaaggactatccaaagaaagaaagacatgagctctaggaaagagagaatcaaactcaagaaaaaggcaaagagaaacccaaggatgacagcttcattgcagtcttggaaaacatcttatccagggagaaaaataataaaaatgaccaaaagagtagataccaagagtaaggtaaaattattagatttactagattacctgaaataaaaatttacctcttgaaaaaagtatattgagaagatattgaaaggcatagaaagagttgccaatatgcacaaaagaaaataaccagaaagaaaacaatttcctttgctggaaataccttggttcatatatttttttcaacatctccatgtaaattttcggtttccccttcaattttcctgatgaaaactccagttgatataatatttgatattgatatttgaaagaaatagtctaatggacataagaattttttaaaatttctctaagcacgaaattctttctccatatcaagtctgatcaaaagcaatctatggtactggactacatatctttgcagttttacctaagtggcatttgttttatttaaacatctagggtttaaccatcatgagttatctttccttttttttcctctctctctctctcgttttcttttctgtgtcacttcactatgaagatatttagcaaaggatttggctttgttgactttttatcatagatataaatacagcccctgagaaatctttgctgatcctattctcccattgaacaaacatttattgagcttctaggtggtgtcaggtcctacacacgggattaacagggtatgcatgtcaggatttttggacccctagggaatcataatttcttcacatcatagttaacagagagcaaatactggttttttaaatagtcctatttatcagaaggcaagaatttacactattatctattaatagagtaagaatcattatgataaacacagaactttgaaactcccttagaccaactctatacattttaatgaaatttaatgaacatagaatatctacacattcatattatgttttataaaataaatttcaaaacctattggctaatgcatcagtccatgaccaaggttccacctgtgagactgccatgcaggtgggcaaattgcacatgctaaaggaaatagaccatgtcagatatcatcattgaggtctgtatgggcaccagaagccggctagagttggcagcagaagaaaccaatcaaaatctcagctgctctggcactgagccactttccaacctctcttcccagggagaagaatcagcctcacctctggcttcaactttcccaggaagagtagaaggggaaaatgccaactcttttttccaaagcaagaacggccagaataagatcagttatgagagaaagaaccctaatacccaaagcctcttctatcaccagtttcctttttactggtatgcctcatttgctcaaccttttctaaagtctcatgcttatcataagggatgatgtttgctacaggagacaagaactaggatcttccttccaacatgtccctgaaaaggaggagcgaagctatgatgtttccattgcttgctcccaaaccattgatctttaatttcatactacctgagaattttagcacaacacaaactccttagtgaatggcctaggtttcttgatgcaatattcaccttgaattgttttatactagcacttgggcagtaattaaagggacctagaaagaagcaggggaattgtggaggtgagctggggaaagaatagggaataaaagtaagacaaagagcacctgaaatacatcagctttgcctccccttccttctgccttgaaggcttctatcaactaccttggctacaccctcccttcctaccataatcacctctccagattcaaaaaggcctgtgaaagatttattttctctttttttttttgagatggggtctccctctgtcacccaggctggagtgcagtggcacgatttcggtttactgcaacctccacctcccaggttcatgggattctcctgcctcagcctccagagtagctgggattacaggtgcctgccaccacccccggctaatttttttgtatttttagttgaaatgaggtttcaccatattggctaggctggtcttgaactcctgacctcaggtgatcctcctgcctcaacctcccaaagtgctgggattactggcatgaggcaccctgcctggctgagagatttattttctaacctccttccaaaacaccaccaggctaaaataaaagggttctcgatttcctatctgacataagctatcccttgaaaaaactgagaaacacatctcttgttaaacttgttaaacgtaatttttataggaagcatagaaaagcatgctcttttctatcttcatatctagcatagttctaggggtgggtggtagtggtttagactgcttattactaagtttgaacttaaatcaacacaacccctagttaaatcataaatttggtttgttccccgtttggtgtggaccatttcaaccataccttgattttaatactcccttagaacagaagggttttctctgttgaactgtaaatctagttctaccaacatttttacattaggatggtatcttaactatacaaacatagcaacattaaattttttgctagagaaataaagggatgccttagtaagaatcaaagctttgaaatcacatagatctgtgaatactagctcagttacacccttgctgaattattttgatccaatgacttatcctctctgagctgtggttccctcatctgtaaaatgggagtaaaatccacttgctcccatggtggttttaaggatgaattaagaatgtaaagtgctttatgtagtgcctgtcgcacagaatgctcaaaaaagggctacttccattccttacagccccacatactaacccccgtgtagatgccacagcagcccttagctgacagatggctacaaagatgcatgcaaagggtccttaaaaggagtaacaatttagttaggtacatatgttttgtatacagctaattataatacaaggcaaaatgtattaaggcctatggtaaaggcaggcatcaacaacatttacaggagcactaaaggaggagtatgtctagggagcagcgttcctggaggagatgacagaagaggtaatcatcgcactaagaccttgaaagatggatgacttttgacatatgaaaaaggagattggaagtgaagtctgaaaaaaggagcaatgtagctacagagatgcaaaattgggcgattgtgggggacactaagcaatccaacatacacagagtctgggctgtgggagaggaagtaaggtggtaagaatgggctgaggccagaataagaaagaccttgaattcaattctacggggattcacatttattatttaaacaagagaaatcaatatttaaaaattgtgaatgaacactacagtgtccttatggaagtaaaatgccccaaacaagtgtagtgtgttatatctatagaacttagcatcaagcaactgcccctttcattcgagagtgaataataccaggcttcacactattggaacatactcagtcaattaagaaaagtactgattgccggctgcaaaatatccccatggtgccaaagtgtctgtggagtgggtggggagggggagggaaggtgtgataattaaaagaattgttacttgcaatgtcacaggagccaatgtgttaactcggcatgctgggaagctagaatgctcccagctgccacggggagggaggatgtggtttgatccctggcaccactcgttgggacaagatgaatcacaaatgtgttaatagtgaggttccatgtcataatgtgccagatggaggtggttacatctctgattgattgcctcctggccaagacaggagttttccagaaggcaaacgtctccaaattggcattcaagctctagggatcagcaggtctttatcatggtcaacatggacctgacattctcgactttatgaagtgtggctacccccaagacatgggcagccagaaacagtatctggatgaggaaagatgcgatgagggggtgatatatggaagaaacaggtttgtgcttgacagagctcctatggctaagcatgactattaacgaatctatgaatgtactggaaataaaggggagggggtggggagatgcagggggtaccctgcttgtgaacaaaataaataaccagagagagaaaaataaaggcaaaaaagagaaagagcaggatagaaaatacttcccagcctcagacaccaaatccccaaagcagatgagtctagatgccaggctgaggccaccgggcaggaatatagagcaggggacagcaagacgactctcctgtccattcccttccactcaccccgatggcgactacccagccctttgttgctgctgcttttttcccccagtgcaagcttccaacgacaaacagccaactacaagggcaataactgtggtgtcctactgggaactaatgcagcctctcgtgcaggcgctgggtcctaatacaggacagtgaataaagcttcattacagaacaatggagttagctgccagagcctacagatttgaataaacaacaaataagcaacatctgctccagcatatgtgtatggtaaaaaaaagtcacaaaataaaagaatttgtaaatgccaaaagcaacactaaactgccagtgctactgtagagtgaatttttaattgcacatgcaaagaggcaggctgtgggtattagtctcacatatgtcttgttgctgccaacctgggagtatagatgaatttaattaaataaggattatcccttctccccagtacaattacttatttataacaatgataaaattgcctaataaaaaaattgtaatattttaaaaacaaggctagagaacaccctgctttctgtgtaagtcgttcggggctgtttgaatttgagtgtgtcttttaaaattaagtctatgcctactgccaaggaagaaaaaaaaaaccccttatcataaagcctgctgcagttaaacagccagagactacattatggagaaatataaagaagacacagagcagcatggaaattgactttcatgggtgtgtagaaaattaagcaattggactcaaattgaggccaggtgactaagccaagggacagggccactgagacttgttctccaccagtgttctggtcgcccgtgagcagttcccttcgtgttggttatccctcttccatatgcactaattccctgaaaatgaacagcactacccaaaacaaaacaataacaaaagagatgggcactctcgtccctcttctcagtgacggtagagtccctttttacctccacattagcaacctgcatcatcacggaggccagtggtaataaaccaggtatgaaactagagacagcaaagtagattcatgtgtaggatgttactacagaaatcagtatcttctgagtctcaggatctcagtttctttcatctttgagcaattttgttatttaatcacttttcctcactaggattcaaggcaagtcagagcacttgaccaggggcattctctcaaggtcaattcagagggcaaccagaaccaaaagatagtcaaggtgtctaagtgtgtggctgtgggcagttacacaatcgttctacctcagtttccttatccgtgcagtggcagtggtaaaaccagaattcacctccaaagaaagtttccatgaattaatatgtgtaaagtgactgaagcctcagtaagtactcattcaataaacattgccaagaatttaaaaggatgctttataaggcacctagatctgtatctgtctctccctggatgttagcagctttctatttatctattgttttatttcttcctgacacttatcacaattgtaattcaataagtaattgatttcttctgatacttacaaattctatgagactagggtctgttttccttctatttgtatcttcagcattctcttaaggtcgactcaggaggcaaccagaatcaaaagacagttaaagtcttacaggtggctaggcatgagcagggcagaagacggctctcccccaacccactaggaatcttgggtgatgttttggcaattattgcattacctctttaaaaacgataacttggcaaccccagggagaggccatttcctgatgatccacacctgttaacatcaaactagtagttgaattcaagccccaggaagaagcaacttcctgggcatgcatgttgagagacaaaaatggtgaagtatgatcttccgggtacactccaccagaaaagggaagaaagcctcgatgattcccatcgaggaataactccctaaacagaccacctgtggtcacttctcaagggtaaggaaggctctgcgcatgcaggcagctcaccccaagggaagaatcatgggaaagagttgggcttataaagtcctaggatcccggttatgcaacgcacttggctttctttctctctttaacctttttctgtaggagcatacattttactttatgacttggttttgtcccttaactgtaggcctttaaaccactatgtgatgaaataccagttgtgttctcatttttaaatgactgcataattgtccactttatgcgtcattttttaaacaatcccctttattgaaatgtttagggcagttctaattttttacacctctcttataattgccttagagcaactttctagaggttatacacaggtgaaaaggtaaataaagttaaagctttctgatacatattgttatattccttccagaaagcaatgtgcttccttgccaacattagcttatatgaactcttaaacctccaccaatttaataactcatttgtctatttggctataattttaagttgtatttcttagattataactgaggttgaaaattgcttcatttacatatttcttatgtagtaaaatttctactgactttttttgttaaatcttttgttaaaaatactttgtgaaatatttggaaatatttcaaacacatagaaaatatagaaaataactggctgggtgcggtggctcacgcctgtaatcccagcactttgggaggcagaggccggcggatcacgaggtcaggagatccagaccatcctggctaacatagtgaaaccccgtctccactaaaaatacaaaaaaaacttagccgggcgtggtggcaggcgcctgtagtcccagctactcgggaggctgaggcaggagaatggcctgaatccgggagggttcagtgagctgagatcgcgccactgcactccagcctgggcgacagagagagactccatcaaaaaaagagaaagaaagaaagaaagaaagagagagagagagagagagagagagagagaaaggaaagaaagaaaaagaaagaaagaaagaaagaaagaaagaaagaaagaaagaaagaaagaaagaaagaaagaaaataacacaacaaatacatattcttcatagccaccgatcagctctattaaaacttaacattttgccataattacttcagattttttaaaaggggaaacatagatacagtagaagtcctgagtttattctttcctcctttcattcatgtccagagttaaccaggatcctgattatggtggttatatattccctttcatatttttgtgcttttactttgcacattattaatatacagcagatgttgctaaggttaatatatactttatatattgtatgtacccaactacgattaatttacccccaacttatatttgtaatatttatctatgtggatagactaacttctttactagcattgctgtatattattctatttatgagtacgatacataatgtttaaccattttcttattgatttgattgcccttatgttgttg

SEQ ID NO: 2730 - DNA, 1484 bp, Homo sapiens
ctcggagatggaaacccaaggtcatgcagttgtgccaatgcccgttgttagacaacatgcttctattcctgacaaaccagtctcaagcagctctgactgatggggcggatttcaatgctctccaatgacttccaagtgttaagaaaaagctgctgctaccctacatgcccaagctatacgaactacttttttccaggcaaacaggattcctgcagacaatgctcggatgatgaaatctgagaggctggatgacagagaaacccacatgcatacacacacactttataaagcttaggaacaaaagcactttataatctccttctgatgccaagtttacagtgcttccagagtcaacaaaggtgactcaggagagtgcacccagctcctttcagcacttatttagctcagccacctgtgtgagctcaaagacaagggtgccgacttcacctgagtagaccctgagtcacgtgatttcttgctggagatgattcagcaaaggagcactaacctctgagacaaggcttcagcttcctgagctctgctgactcgcctgggacttccctaagcccttctggacctagatgagggcaaaactcagtggaacctcagaagccctaaaaaaatgatagactttcttttgtctcatcattatcagcattttgggatgatttagtcagcctaagaaacctgatggcatgttgacaccagaaaacaggtagtatatattcccaaaccaagttaaaaaaaattaagaaataacagctggaatgccttttattttttctttacacaaatgtgtgtgtcatcgtcatatgccttttttgtgttaatttctgaggatcctgccagtgtgaatactccattctctgcgagtcgcaggtcaggctgcttttgaggcaagcacacgttaagtattgagcagaaacatttgaagcaaagatgagaaagacagaaggggaagcaagaaaaatagtcttcccagtgtgcctatttgggtgcatataaagttacttttagatgtgcgattactggttaatgatttggggaattcttttcaagtagaaatcctgggctaaaaactaagtgtgctcaagctacccccgcacccactgattctgcactccatgggaaaagttctcacaagcaagtcctttgtccactacccacgtctataggaaatgtttgaacagctatacacaaagaactcacaagtccacaacctcgggggtgttgcgggtggagagggcagtggtaaaggtgatgacagggagggcctgtggggacagtaatattagattagtggtcagaagatgctggagcctgccttgccagtcacacacttttagaggaatgctggacagtacacaccctccccaaccctgaatgtaggccctcgctgacatcacgccagatgaagccctgaggtctttaacatctgtaactctatggcatgtaacataaacaggtgtctgaccagtttcccc

SEQ ID NO: 2731 - DNA, 393 bp, Homo sapiens
aagagtcagaagcagaactctggagtggggagagcaggaggtcaggtggcttcctcttggactcactggccacgttttgccttttccataatgtttttcaaaggagtaagttgcatgaagtctgtggagaccatgatgtaaaagctattaaagaaatctgtgtgaaacagacgactggaacaggagctggcaggctgagggggttacagaagaggcattgaacggcagcctccttcatatgtgtttcctcttctaccaagcaacagcacagactattcctacccatcttgggcccagccctgtagacttgccaatcctgctgtttaaaagccagctgtgcttctaccaccataggaaccaggacatcaaagtctgtcttgcctgctgccatgt

SEQ ID NO: 2732 - DNA, 6166 bp, Homo sapiens
gtagaattagaggcagttctctctctaatcttcacagtcacttcactatggaagaatgccttccagatgttgtttaaaataaatgaaggaagtttggtgacaaaaatagaaagaaactatcatcagagtgtacggacgacctatagaatgggagaagaattttgcaatccacccttctgacaaaggaataatatccagaatttacaaggaatttaaacaaatttacaagaaaaaaaaaacagtcccatccaaaagtgaagaaaggatatgaactgacacttcttaaaagaagacttctatgctgccagcaaatatatgaaaaaaagctcaacatcactgatcatcagagaaatgcaaatcaaaaccacaatgagataccatctcacaccagacagggtggcagttattagaaagtcaggaaacaatagatgctggcaaggctgtggagaaataggaaagcctttacactgttggtgggagtgttaattagttcagccattgtagaatacagtatggcaattcctcaaggatctagaacaagaaataccatttgactcaacaatcccattactgggtatttacccaaaggaatataaatcattctactataaagacacatgcacacatacgtttattccagcactatttaccagagcaaagacatggagccaacccaaatgcccatcaatgatagattggataaaaaaaaaaaaatgtgggacatatacaccatggaatactatgcagccatgaaaaaatgagatcatgtcctttgcagggacatggatgaagctggaagacattatcctcagcaaactaacacaggaagagaaaaccaaacatcacatgttctcactcataagggagtgttgaacaatgagaagacatggacacagagaggggaacaacacacaccagggcctttgaggggtgggggatgatgggaaggaattagaggttgagtcagtagatgcagcaaaccaccatgtcacacgtatatctaggtaaaaaacctgcacattctgcacatatatcctttttgcttttttgttttaatttgggattttagaagaaataaagaaaaacaacttaaaaaagaatgcaagctcctagaggaagggtaggttggagggtggatagggaaaggggagatgttggtgaaaagatgcaaggttttaataaagaggaataggttttagtaatctcttgcagagcagaaagaccattgttaataataacatattttaaaattgcaaaaatattagattttaaatgttctcaaaactaagaaatgataaggttatgaagtgatagatatgtaaagtagtttgatgtaatcatttcacaatgtatgcatatatcaaaaatcatattgtagcccataaatgtataaaattattacttgttaattgaaagtttaaatgaagaacacttgggcacaaaggaaagaagaaacaaacaagtggttaaaggcaatatttattaaaatagataagatgcagttccagatttgacctaaagataaatttccatttctcccccctccctttttttttccttcctgtgaccctcttgtatctttatttttgttctgcctcaggttggaatcctggcctcataatggcttggctctcaatagtccatagctctgtaattatccagggctcacataaatgatacatagattccttaaaacattggggttatatctgtacatactatgggaatgcatttcagttccaaccagatagtcaagttggggtttcactttccaccttcactgaccctctggctatcaaaagtaatttttttggcttattcatcaaatatactgggaatttcaaaaggctaaatgctctacactcacctattcaaatgactatcatcagttatttaaaaataaatattttcaaagccatctgttgtgtaaattattttttaaatatacatgttttacataaatgaaaataccaaagatactgattttgtttaatcctttttcttttgacttttttttaactcttatctattcatctgagtgattaatccaccaaataattcacatacacaattcagtttaaagcctctgcaagtttaactattttaactgtatagaagaatacatagagttttctttgtcatttcataatttaaagtggaattacttttctgctggttttagtgaacaatactttatggaaattcctccatttcaagtggcatatatgcaattaattgtgcttaatgccttcataatacttagtagtggggtacaccataatttattcagttacctcacaaatgatagtgatttatgttattttcactttttatctactaaaaatgatgcttgccataaaacttttgatacatatattattatacaaaggtattctatttttatggagtacatatcccaacagaagattataagtttaaaggggaaatttatcttagtacatttaatttgtgctgctcaatttcttgccttaaaaccaattcagatttttacaagcaatataagagtgtcattttccagtccccaaaagcgatgtctttttaactttttacatacaaaatgtaagctgatacatataaaatatcaagtcattattacctgtattttcatttatctgaatactagtgaatttaacaatttggattacttttttggtgaatttcctattcatatcaattgaccattgttttttgataattgtgtcttttttaaaaagcttattgtttacattacacacatgttttccattgccatacatttgttattaatttttatgcaagcaggtattactatctttcattttggttgttggttccttttacaagtatttttttttttttttattccttgactacagataggagtttaattttagctaaagttggatagtcacgcagtggtagaaatccaagctatccctatacaaaccataagaaaaaggtagactgtttcctcctgctgatgtgtgtaaagtcatcctcctacctctttgttgtccatatattctctgagaattacagagatattcagctcaactattcaactgattatgggggttagtcagactgcttaatattgttgtgaagtattgttaaaaatgtcaactgggaataaaaaggaggtaaaactctctaatatgttggtgaagtgtctgctcccaaaattagtagagaatatcaattgtagagaatacaataccagctcttacttccccagaactcaagacttcatttgcctaagctcaaattgtcatttgacttggcagaggcagattgtataagtgattttcatataaaagaaagaagataatttcaggtcattagccttcttagaatgccttctttgacactctgtgttcaaatttattttgttgctgtcaagaaggaggggactgccctagggttgattatgattaattaacattctcatatcatacatataatccattactatactgctatttgtacatggcatatatacttttatggaacactggctatgatttctgatcaattctatagatctttacatattttctttacatttggaaaccatgaaaatgtaaaacattgccccatgtaaaacattgcccctttatagaagggcaatgttttacccaatgttgcaaaatgagttgatacttgtcattttgttgcatgaaatacctatgataccataaaccagattttagctgctcatcactcctttcagtgatacaaattctgttttaaatgcaaaatacatttggtgaatcattagtgtctcaaacctgaataactccattacaatgaaatcactatgtgaagaaaaatgactgacactacccaaaacctctgaatttgtatgcattgaaattactgtaccagatatggtgtggaagagaagaattaatcatttttattaatatgatattcaaaaaagtgtactttctcctcattttcatgaccaacatatcatgtctgacacatttatttttgtccttcacagtgagttacatttcatcttttggattattggcatgaagtaaaagagatagtcttgctgagatctattaatagtttcatatatcactttagtagtgactcagcatttccactacataagttcaatttatctctcttcagtattattcatacatttgtagcacaattcagagttcaacaattattttcctacatggaaagagcattcttctcatgaatccacacagcatgcttcctgaaacatttaaaatgtgataatcctattttacatttcaaacatccttaaaccatgtagcaatacatttgtgatcttggtcaagtccctatctcccttgactcactttatttatgtatatacaactataatattacacattatacatatatgctaattacactatccttgtccttaaaaatcttcctttggaagtgttgtaattttatgtatcctaaagttaaactaaaatgaagaatttgatgtttatcaatcaatatccatttaaagacagataaacaaataaagaacaatttgtattgttttctctatcttctcccagtgtacagtatctttctttagttttttgatgattttacttgtcatccaatttgttgtacaccaattctatcttgaatatttatgaacataagattgtattaattgatctatacatgagaatgttttacagaagtttagaaattccatcagtaaaaactagttatttttccccctgattttaaagtaagtgacttcaccacctgtctcttttcttatgagtgtggctgctaaaagcatatctggatttaacatgcagagatcagatttttttcataatgcttggatttggtagataaggtttgtgaagcagcaaaagctttcgcaggaactctttaaacatgttacaaaaagttacagaaaaaaactcttttagagatgtttttattttttggcattgactagttgaaaagaccaggttatttgtctaatagattgacacacatttggtgtgtggcaagtggtctttttctgatgttgtttactttttttcgcaattcatcatatttcctgtagaagagtaattacaaccagaagtttgattagagttatattcaacttttgtagaacaaaaataataatgcttctgtgttatttctattgtgttaaattactaaacacagaatgtctggttgttctatttttattaatgtaaacattcaccaatgagtaaagtgctatcagtctaatcactctactataaaaattctttaccacattttcaactaatcatttaaaatcattttgattattgcttagattgattgttccattatatgttacaaaatgttaatattccaattcccctttccttttgaatttattagataaaattcttctctaaagaattctccctcttccttctgttatgctaaattaaagtccataaaggtagatgagataaatgctttctattcttacattaccaattttcagaacaatgcattgcctattaatatcattatgaattttggaatttataaaaatcaattgtactttctcatgttattctccacttggttcataagcatagtttttgtgaggtttcctgtggtctttggagatgaaaatttttaattttcttgttgctttctagcccagaaaatgcctatggggaacatagagaggcatgttcccagacagatatggattgatttatttcttgagaacataggatcaactcagaagaccatggatggtaaattggatgaagaaaatgtagtacatgtgcaccatggaataatactacataaagatcaaaaagaatgaaatcaggtcctttgcagcaacacagatgtagctggaggtcattatcctaagtgaattgatggaggaacagaaaagcaaatactgcatgttctcactcataattggggctaaactgagcgcacatggacataaacatgagaacaatagacactgcggactattagatatgggagggaggaagggagaagtgcaaaagttgataaactacttactgggtactatgcttactacctgggtgataggatccgtactccagacctcagcatcttgtgatacgcacatgcaacaaatctgtacatgttcccctgtatctaaaatataagttgaaattttaaaaatccc

SEQ ID NO: 2733 - DNA, 2207 bp, Homo sapiens
caggagccctggagggtttgaagccagctcggtggtgggctttccattccacaccaaggccagcggcaggctcagctcaaaccctgagagtctggctccaaacagctccaggataactgcagtctcagagaagacccccagaaacccaaaatgcttccagccacagaggaggagagcagctggcagccagaagcatccattccaagtgagagacatcgaagggaacaaggcttaaccgccttgtctttgaacagcactaaatgattcagcaaaagggatgagaggaaacctttggccatgtcacgggttcacagccatctgtatatgttcctatagtcctgctttgtacctccagcctaaatgatggggaggtcgtttgaagatgagactgacccttcactacatgtgctgcttccaaccccagattccatcaggctgcacttctgagattcagtgaactcccactcatccttcaaaaccctatctcaatgtcgctgccatagcaaagccttccctggccccctcgggtagggagggtctctctgcccactggcaggccaagaaggccaagctctgccctctgagaatccatcagtgtcccaagctgactttccctagcctcgtatcccttcattccatgaaaggggaacttagggtggagtggaaattttgatcatctaaaggaacaataattgctttcattcattcatttaaacaatatgtattgagcacctaccaaggaccaggccttgtgctaagtgcccccacagaggtcacaatagtcatatactacaaacaaatacagcatcacaaaggttggcgcatgaagagacagcagctaagggcatggtcctggagccagaatgcctggatttgaatcacagctctactacttcccagcagcttgttgagcttagccaagtctctaagcccctctgagcctcagctttatcacctgtaaaatagggataaaagcagcatctgccctattcatctgttcacaggaatacatggcctatggagggaaagtacccaggctcctgagtgggccctcctggcccacggcagaagccgtgtgcatgtctgttcaacagatacctttggtggcctgtatgtaccaggcgcttctattctctgctggtcaaggaaggctcacggtggaataggatttagccccgggagagacagcaggggcattctaaagacatcgactagctggcatcctgtgccaggcatcccaaccttttgcgcatcgcggctcacctggaaaagacgtgggggtgaggaaggaggtgccacctgcatgaggcatggcagaaaagcatgacatcacctttatagtgcaaagcttgacaggaagaataagatacaaagtacttaaagaagataatcgatattggatgtgtattaaatttccaaggaaaatatttttaaatatgtaaattaatcttgagttggcttctacaagcataacttttttttttctttttttttattttgatacagagtctcgttctatcacccaggctggagtgcagtggtgtgatctcggcttactgcaacctccgcctcccgggttcaagtgattctcgtgcctcagccttttgaataactgggattaaaggcgcacaacaccatgcctggataacctttgtatttttagtagaggcggagtttcaccatattggccaggctggtctcaaacttccaacctaaccgggacccaccctgatctgcctgccttggcctcccaaagtgctgggattacaggtgtgagccaccgcaaccagccttacaagcataaatttttttataccaatgtaccaggtttcatgcttgagctgactaagcacagtccgggatcaggaatgtttttcaggggtcagtcctttgggttcctgacagtcaccactgatgagaagcggccgggcaggcagtagtggatgaggaccacctgtggcactacagagagccctctggtggcaggtgggatgtcgactgggcacagctgctgtgactgaatctgaaaggtgacagtggtgccaaagttaccttccaataaaatttcaactgttgcacgtttttgaatggttgtgaaaaaatgattttgtaactataaaaatgtataactacaaagaatctgtaagcttcaatggctggcaggttagggttggaaacctgggagtttgagggctccagggcctggg

SEQ ID NO: 2734 - DNA, 629 bp, Homo sapiens
caaagcaggtccagcctggatcctcataccggggctctcctgtccttcctcaggattcgaaatggggccagtcacacattctcccagccctgacacctgaacctgagcagcagctctgtgaagggggccagggtctgctctggggagaagccatgaaatggaggcggtcaacccctgcaaagcctcgaagtgtgagtggcagcctggcttgaggacgcggacacttagaaccaggacagcggagtcgagacctggccctgccccttcatagctgcatggcttgggagctctctcagtcacctactaaaaatggggatcgtaagattacagaacagtgatagcattaacctatttttaaggatctatatttatatacttagatcaatctgatagggtgcagactaaaatattaagcatcgtcttgaggcgataggatatcagatattattttctttttttgctttatctgtattttctaatttttcttcaatgaacatttggagtaaaaaaaaaacccaaaatgttaaagcaacaaccagataattagtacttaagtatttgtcctgacttacaggacagtttgagaatgatgtttatgaaagtggtttacaaactgtaaagttctttgc

SEQ ID NO: 2735 - DNA, 10600 bp, Homo sapiens
gccaaggggccagtcgcgagctacaaggctttggcccaccaagtgtgtaccatgctgctattgtcatcttccttgaattctttgcgtggggccttttgacaactccaatgttgactgttctacatgaaacattttctcaacacacattcctcatgaatggtctcattcaaggtgtaaagggcctgctctcttttttgagtgccccactcattggtgccctgtctgatgtgtgggggaggaagccctttctcctcggcactgtattctttacctgcttcccaatcccactgatgaggatcagcccatgtttatgcaaataccgtatacgtgataaacgtccctacaacatgatctttggaatgaactaagacaaaggaaactctgaggaaggaccatggcctgagaggtggaattcatccttccgaggactgagatgaggacggaaaatgaaccatcggggggattgacggtgaagatgctaatacctgcccagcatcgaccctagtgcgggtcccaagaccatccccctgtgcaggctccaccaccgctgtgctaactggaccgcggcagaagagtggaagttttcatgggctgagctgctgagttcagcctgggaactgaggccaacaagggagtctcctcggcacacaagtttgaaagaagtcctggtgacttcaagctcagaaccatggacggcagggctccctctggatgtggaattctccgtccctttccagggagggaacaaagcccacagcaccgagactccttcagggtgagcaaaggcctggaaacctgtatgcagttaaagaaaaggaaagaaagagataatcagtgcatgcagttgtcagctggctgggacctgaggagagtcacttgtggaggcaactggtctttatccctattgtccggtacaaggcaggcattaatcctgtgatccttatctgaagctcaggtttgattttattcttttcttaaggacctagtgttatccccaagcttgtaataatagtttaattgttacagccaatatctcaccttcagaaataagatgcttaggaaaccaagacaaggaactgtgtgttgcaaacagcatcaccctggagaagaggtggcaggaggtgacctacagaaaatggagcaatagcctagagcaagaaacacagaacaaaagagaaatgaggggttaggcaacctcctggagcaccaccgggacaagcacatattcaggggcctcctaacagactcgacttccagcatcctcagatggggctagacacgttacatagacattcaagagcagagaactcagggacttctgatttatatcaagaaatgcatacacagcagacgtgtgcctgtggagtggaattctggaaaagctcacagcccagaacataatgcagactcccccagccacagcaccttccaatcctgagaagagtgctgattctccatctgagcacccattctcctgcaacatcaggggagaggatttcacctaagggtcagaccagcgtctccaaacccagctccccacctttgcctgttggtggcacttgtgggagaaggggagatgatatgaaaagagccacaacaggagtcacctggacagggtggagcttgatggaaactgacatttgtgcccattggaggcaaatgtagaatttggtatcttccgtagcgtcaggcacatgaaactctccagtgcccatgacttttgacagtgacttcagagcacatctgggagacccatgtggcccaggctccacacagaggatacagaggaccaactgtataccacttcatgtgatgttggagtgctgttctgcacgcctaactttatggcttggtggatcagacaatgcccaatgtatgatggaaagctcaggttgcagggtagctaggtggcccatgcttgagcagtctccactaagtcccaggagcaagccaaaactgcttctgaaaaggagagtagttatcagcggaagatggcatgctccacagttctagggtccacactgatttgcctgtagaggcctgccagtggcttcagatagtatccctatctgccactgacacttcaagcaccattggatctcctgaaacataaagcccaagtgggagagcagcttgcacagcagcctggacctgttgcagagcctgcttttatcctgggcttaaaactagcagctttttgggtcacttggcaaataggtcagagagtaacacactcaattgaggaatatgttgcctctaaaatccaaagagggcctaatggtgttatgcctctttttttggttgtacaaggggctagatgcaacaacttattcttcactttagaagggatatctcgaccactagactcctagaaatttcgctgaagtgaaaggcccttgaatttttataggatttattttccaccctctgacatgcaaatgtcttagtagtaagtctagaatagttgctacttcttactgcttccagtcagcattatgtcatcaatgtaatggaccagtgcgattgatatagaagggaaaggcaattaagatcccttcagattaaattatgacatagggctggagagttggcatacacctgaggtaggacaacgaaggtgtattgcgagcttgccacctgaaaccaaactgtttctggtggtctctactaacagacatcaggaaaaaaagtatctgccagatcagtaagtgcataccaggtaccaggggatgtattaatttactcaagctatgaaaccacatttggaacagcagctgaaattgatgtccccacctgattaagtttccagtaatttactctcattctccaagatctatctgttttcttcacaggctaaataggggagtagaatgggaatgtgataaaaagtaccacctctgcatccttcaagtccttgatggtggtactaatctctgcaagctctacaagaatgcagtattgtttttggtttgctgtttttctagatagaggcaggtaagtggcttccactttatagcgtaattgccctcactcttcaggtcaggaaaccagtgtagggattctgctaattgttgagtatgtctattccaattattctgcagctacagagataacaagacgacccactgcaagacagacctaaactaaaactccattgatcacctaacctccctaagcccctactctcacttgtgaaccagagtgatgcattagttttcctggggtaccctgagtctgagttcagaaccaatgtccagtaattcccccaaagtctgattattcccttttccccaatgcacagtcaacttggtaaagtgctataggtccctttggggaaggctgagagaaaaatgaacagtatacaattttggtaatgcagtggggacacagcctcctcattatttaaggagatatgggtctgcaaactggcccaagtcttggaattgattcaggagctgtgactccgtttttttgattcgagttagacttttattcacttgattcttctttttatacagaacagataagaatttagtaggctttccatctcttttatttctatggatactatgaccagctagctaatgccataagtctctgtaaatcggactttctaactacagttttgactttactgtccattacagtaaccatgttcaccttgtctttggtgattaaatgctgccacttggcccctgccatcctgggatccagttactctccttatacttaagaatcccattcagtggcagcagttcccactgtaatttctgacctatacagaagagcaaccacagagctctttaaaaatattggaactccctcacaaatttatttctcatagtcataacagaaagtgtgtcctgagctagatgtggtagctcacacctataatcccagcaccttgggtggccaaggtaggagaatcgcttgagctcaggagtttgaagcctgcttgggcaacgtagcaagaccttgcctctataaaaatttttaaaattagccaggtatgatggtgcatatagtcccagctactcaggaggctgaggcaggagggtctcttgagcccaggagtttgagggtacagtgtgctatggtcacaccactgcactccagcctgggcaatagagtgagccctgactctaaaaaataataataaatagaaaaagaaagcatgtcctcttgttaaagatttttcaatgacacttgttcaaggatggtaaggctgactttttcaagatcatcagaatagatacagggaccaatgcaatagcattttacagcgagggagagagattgggctcaactctgaatacagtttgggtaagtgggaatttattgccaaggagtagggtgggggtcagtggattgaaaattactaagaggaaacttcaagagtaaggaaagattctggcttaactgacctaacaggattcttgctgaaaacaggctggggtgttgagacactacctgggagatggtggaggatgaagccctgatcagatatggaggatgatcagatattgagcatggaggttctttttttttttatgctttaagttctagggtacatgtgcacaacgtgcaggtttgttacatatgtatacatgtgccatgttggtgtgctgcacccatcaactcgtcatttacattaggtatttctcctaatgctatccttcccccctcttcccatcccacaacaggccccagtgtgtgatgttccccgccctgtgtccatgtgttctcattgttcaattcccacctatgagtgagaacatgcggtgtttggttttctgtccttgtgatagtttgctcagaatgatggtttccagcttcatccatgtccctacagaggacatgaactcatcatttttttttttttttttttttgagacggagtctcgctctgtcacccaggctggagtgcagtggcgcgatctccgctcactgcaagctccgcctcccgggttcacggcattctcccgcctcagcctcccgagtagctgggactacaggcgcccgccaccgctcccggctaattttttgtatttttagtagagaaggggtttcaccgtgctagccaggatggtctcgatctcctgacctcgtgatccacccacctcggcctcccaaagtgctgggattacaggcgtgagccactgcgcccggccttgaactcatcattttttatggctgcatagtattccatggtgtatatgtgccacattttcttaatccagtctatcattgatggacatttgggttggttccaagtctttgctattgtgaatagtgctgcaataaacgtacatgtacatttgtctttatagcagcataatttataatcctttgggtatatacccagtaatgggatggctgagtcaagatggtatttctagttctagatccctgaggaattgccacactgttttctacaatggttgaactagtttatagtcccaccaacagtgtaaaagtgttcctgtttctctacatcctctccagcacctgttgtttcctgactttttaatgatcagatagcctcctattttttaactatgagttggaatttgctgcttttgatatgataagaaagttcaaagtttctcttccttgctttgttgtgtgttctaattcttttctgcccatcccccagtaaagaaaaggctcagtatgatttcttgaatagattgtttaagctattttcaaaacaggacttggtcaggggcaggtagtcttaaatgttcagaagccactggatggaaaattgtgagcacataagtgtttttcttggtcaaccatgtcattttatagccaaagtttgacttgacatactggaattaatccacacgactttgaaaagaataaactctttaaaaagagagtgagcgctccgagggtgttatgagagtcactgtctgaaaccctattgatcatattgtggcagaagaaatagagtcctgccatgaattatacttttcaggttaaaaaaaaaaaaagcaatttgtaggacagtttgaataatttagtacaattgttaaaaatacagacatgcacattcctgtatgtgcatttttaaatgttcacgaatgatataagccagatatatttcttagaggtgcttgaaaaaagttatttcttcttgggctttattatctcaatttaaaaaaattaagatgcataattctcataagataacagattcagaagaatatagttcaagaaaaaaaattaaagaactcataaaggagaaggaggaggaggaagagagtgtgaaacaggagcctcagataacttggtaaaggcatgtctcccatttgggaactgatgttcctaagatccgcactgacgctgctcagccggtccatcacacagcaaaggcgtgaggaagggtcactgcccagctggactccagggtggtccacgcatgacagtcacaccgaaccttcatgaggatgtgaactgttggctccaatttaccattcccagcaattccactcagatatttgtatactaatgttcacagcagcgtgaactccacagcaggtggagtaatgttccattgtgtgcatatgccacattttgtttatccattcatctgttgatgcacatttcggttgttcccacctttgggctattattaataatgctgctgtgaacattcccaagagaaataggaagacggctttgctaagaactaaaaaagggatggacaacaagggcatatacccaggggcagtgttctatcatgacagctttactgagagcagagtagttctgctcagaatcagaacacttgttccctatagcccccctgattgccccacaaccaccaccgcatactccccttttcccaaccatgggcagcagattgagctattaacagaagtgtcctttcgctggatttctcaaccctttcctcatcgtccacatagagaaacagtaacagattgctactcacccaacacccaggtcaagtccaatgcaggtaggaataacagcaaatccttcaatttcttgattctgctcttaaaaatcttaacagaggccgggcacggtggctcacgcctgtaatgccagcattttgggaggccgaggcgggtggatcaccaagaccagcctggccaagatggtgaaaccccgtctccactaaaaatacaaaaattagccaggcgtggtggtgggcacctgtaatcccaggtactcgggaggctgaggcagagaattgcttgaacgcgggaggcagagactgcagtgagccgagatcacaccactgcactccagcccaggtgacagagcaagactccatctcaaaaaaaaaaaaaaaagacttaacagagcatttcacggggaagggccatgagggaacatcacctgggtgatggtaacattctgtatcttgataaggatttgagttatacaagtatatacatctgtcaaaattcaaagaatgtacactcaagatctgtgcatttcattatatgtaaatgttacattaaaatgttgtaaacaaatattgaacaaatatacgcatgctaaagtatttaagaggaagtactggtgtctgcaaaacaaaaattttttttccattttctgtggtaaaatatacataatataaatgtattattttaagtgtacaattcagtggcattaaatacactcagaaagttgtgcaaacatcccatttattcatttccacagattttttaattctcattccaaacagaagccctgtacccaaagagcaataactccgcatcctccaatccccactctctggtaacctctattctactttctgcctctatgaatttgccaattctaggtacctcatataagtggaatacagtatttatccttttgtgtctggcttctttcacttagcataatattttcaaggttcattcatgttttacatgtatcagaatcttgttttttcaggtggagtaatgttctattgtgtgcatatgccacatttggtttatccattcatcagttgatgcacatttcggttgttcccacctttgggctattatgaataatgttgctgtgaacactggtatacaaatatctgagtggaattgctggatcatatggtaattctgcatttaactttttaaggaactgccaaactgttttccacagagctgtaacattttacatccaaaccagcaataggacctggataaaaggtggctaaggcacagttaaataaaatactgttagttactgcccatttgcattgggtttctagtggcaaataatctagccgtgtccttgactggatctcccaatgattcttttcagtcatttgaatgagtatggtggtggtgacactggcaggaggctggagggtactttaattaacacgcgaacacacacaaatccattgcaccccactaagccgcccaaacacacatgaaacacaaaaactatccttgctagggaaacacagccctggaacaaaccccctggaccccttgtcaccaccagcccatcctgtaagaaaatgatggttgaagctgcagtgacagaattggagagatgctctgttagacaagtctgtcagctgaaaggggcagaaaccattgttgaactgcttatatgagaggaagacctgggtggcacaggcctggctggacgcagggctcacagagcgtcatcagcacttcatctcttcccctgcgggacctgctgtcctctgcgttgcacacaccccccgccaggctcatccctgtatcctccttggaggaaagtgccaggctggtgctacttggccctgcctgggtcacacgcctgcctcgggatgtggaggatggtcagcccagccacagcacatggattgctatgtgaaggatgatgttccacaagaaaaccaggacggcttcaccagggaggcaagagcagcagatgcccatgacagagggtgtatactctgaataaaagaatttggatttttaaaaagagacaggaagaaaaggacttccaaactctagaaagtttaaaactagtagaatgaaacatattgtgtataaatgtaaagctctttgttgagattaaatatacgtatcagttaaattttatttaaacatatatatacacatatacacacacacacatacatatatatgacccaagtacaggataaagatgaaattaataagtactctttaaaaatcttagttttggggctgggcgcggtggctcacgcctctaatccaagcactttgggaggccaaggcgggcggatcacctgagatcggtagttcgagaccagcctgaccaacgtggagaaaccctgtctctactaaaaatacaaagaattagccggacgtggtggcgcatgcctgtaatcccagctactcgggaggctgaggcaggagaatcgcttgaacccgggaggcggagatcgcagtgagccaagatggtgccatgtcactccagcctaggcaacaagagcaaaactccatctcaaaaaaaaaaaaaattagttttgggataccagtaatttcagtattattaacaacctgacttgggcaccccaaaagtttgcaataatggcattaaatggctggatagagaaagagatggtggcgtgaatgcctgcttcctggtgtcatgtctggaatttcatgtccagtcctgaaagctgcattttaggaagggtgctactgagcgtccagagaagacagcatttcgcttggtgaagggagtgggcttatgatgcatggcaggaggagtaatgtagaaagaaataagctttgcggtgcatagtgtagagaaattcctgctttgcgtcaaacagactgaccaggcaggcctcacagttttgcaaagccctggaagcacaggcttggctgcagatgttggatgactttccagaccagttttggaaaaagctcttgaggatcagaagctcctgggatttctgttatcacctgatttcatggagagagacagtccagggccgggaattatgtggcatctatgtgttccccagttgtgggatccatctggccgatggttatggtggtcagtgactttcagaggcctggaattcatgacagatgcttttgctaatgtgcttggtgccccactgaggctgctgagcagtgcttaccatgcgcccgatgtctcttctgtgtgcctctgagagcaaaagtggcctcagagtctgaaggagggcaaagtggccacagctgcagacacaaagtccagactagctcttgaccacatccaagtgcatcctgcattaagctcaggcacatcaaacctgcccaatcaaggtctgccaaaggaaggagtctgcaaatgacatttctcataatcaaacacactcttaatttgtttttatattattcactccattttttgattattataacttttaaaattatgtctagtagttttatcaattgctgagaagagtgttgaagtccaacttacaattgtggatttgttgatttcttctttcagctttattggttttggtttatgcattttaaggctctgctcttggtgtgtacacatgtaaaaccattttgtcttcatagtaaattaatttttaaaaatcattatgtaatgtccctctttgctccag

SEQ ID NO: 2736 - DNA, 967 bp, Homo sapiens
ggccttgagatgaggtgctgcacactgacatgctttatttggtggccagccatgtgggaaggagggaaaatccccatctgagccacagatccaaaccagaaggaactgaatgagatgctccgagggataaggcctgtcttagagacatcctcgcatctaggagagggggcggcagatgggcagccgtggagcccagccctgaccagctgctgtttgcaggggagagctgcctgtgtgcccctgtggtgagtgcgtggtgacagtgggattaagtgtacccagcaacctcagggaccactgggtggaggagacgcacggcgggcccttctgcctggcccttcccgcaactctgagtcctggatgcttggggcttgctaatctccatccccacggcagcgggatgcgacacaaccattactaaggccatggaatctcccacctctcgatggccaggcggttcacccagcaagtgtctcctaatctgaagagctgggagagcgaaagattttataagttatcagagaaccccctgtaacctcccttctagaaaggaagatgtaaaccaggacaatgggcctgtagctggcacctgaagtcagtgatctctctcctcccctcctctaaattctccttcttccgtgttttctacatcccccgtgatttgagtctgctgatttcatttgttatgtctgccttctgtttcctgcctcatttcacaaagaattagatgctgctctcaacaatacattcaaaataatacaaccataaagtaaatatttgagtaatttggagccagaggaatatatggtaacaccctgaggtggatgaaatgccgggatttcttagtgaccccttttcagaatactgcttctggaaccattctagtgtgtctcagaatgacatgtgggacatattatctttttttttatgttatataagcaatttattcaatgcatgtttattaaag

SEQ ID NO: 2737 - DNA, 40606 bp, Homo sapiens
atagccacgtctccgggattcctcagctctatttctggatttggtcagaaaacagcctgctctgctggattagctcatctctccatggaaatgccaccctggagttatgaggtagtgttatgtccttggcttttagagagataatataagaaacagacagttgaaaggcatttctgaatcttttgcaaagcctgagatgagggcattgtccattatgtgaccaaatgtcacccaaataaagatttctcttcacaatcgcttataatattcagtgctagagaaaagttcaattctccaggaaaacctgaattctttctttttatagataagcagaattgcagtgcccatcatgctgtcatttattttttcattatcttccaggggattctgttcaatccagcaaatattgaatgctagctaccatgtaatatactggattataaagatcaatagggccagttctgggctctgagacacggtctagggaacacagaccaaaatacattatagctatgctttcctcagatgccttttgtaatgatatctctttgttcccagtagtttctgaaaagctttgttctctaaatttttatgtgctatgttgtatttatgtagttttccccagtggaagacagacttttggaggagttttttgttttatttgtttttggctagttgttgtcctatatttcctactgccctacatccccctttcagagcacggcctctttctaaggctttctggtgcaatgcaaccctcctcgatggccacagctgattgactggagtgaacctgtgacctgaactgggccagtcagatttttcatactggaaatttggcgtcggagccctgagaaacaagtcaggtggtctcgggggctgaagctacccctgtggggtgactagtggaactcctggtagtgagaaaaagtgagatgagactgatgatcttcagaaggaaaagtttggactaaacacccagaggaaagctgaaatgagagaccacatggaatgaaggagaacgtgagtatgagcaagcgaaggtgagaaaaacacacggaagcacatgaaagttctttttggcttgttcctattttctctgtgacataaaagggaaggtctttggtggagagtaggaatgggaagagggtgggcaatttgagaagagagagggtgtgaattactcatcatggagcaggggtgtgaattgactgagggaatgtggttggagggacaaacagcactacaggcacgctggaggtttttgtcatgagtttacatggagacaagtcgtcctagctgcatgctttttctctggacactttcagttgtgtgggtgtggcacaggcagaaagtcagatttaaccagggctgggttttctgccaggtgactgtgacagaggaagagaggagcaaaggagttgatggtgtcttcaaaggactgatgataacaatggaccacagagcctaataagaaagcttagggtacaagtggacagcgcaatgatggcagtgataaacatcctagtgtgggctaagaatcattggtattccagtacagggggagtaagctggggagataaaagatgatgtttggaaaataggatatgtgaaacacagattgtgaaggagggcaataagtggcaatgccatagaataaggtcggggagagcagaggtagggtggacaaaataattggagatgagaagatcaagaaactgagagataaagaccctcgaggtgtcatctgcatgaatactgaaatcatcaagtgttagtacaagagtggtcttagagggagagagagggaaacggagcagagtcgcttggagacctttaagtgtctcctacaaaaaggagcaacagagagattgaacagtgcataagcttcacagaagctgtgtgtgggggtggtttatggaaaagataggaagaaccaaactgttttttcctatttttacacactcactcaatactcaacacagaatatttcacctctaggcaccaaaatgtacaggagtttctcccaaccccaaaccagttcttcagcagacatcagctgggcatcctccaatttaattcaattctgacactacctacctggagacagtatcagatcccacagattgagggctccatcccacaagactgccctctactccagatgccagttgtaagtcccgagttgagacctgtgctgctgaccaacaggctataaattgggcattcccaagacccccttaggggttgatttgctatggcagatcacagaactcagggaaactctttacttatgtttacccttctagtataaaggatattacaaaggatatagattaatggcaagatgaagaggtatatagggcaaggtaaggggggaggggcagagcttctgtgccctttctcagaaccttcacactttcagcaacctacgagctctctaaatcctgtttcttttttttttgtttgtttttttgtgttttttttatggaggcttcattacacatgcatgattgactaaaccattgaacgttggtgagcaatttgaccttcagcctgtctcctccctggagccacctccagggttggggttgaacgtttcaaacttctcatgatgtggttggtttcctggacagctagccccaccctgaggctacccaggagcctccagccaccagtcatctcattagcatacaaaaagaccatcactttggagactccaagagtcttaggagctgtgtttcaagaaaaggaggtgaagaccaaatatgtatttcttattataaatattatcataacagtttataggggaggaatggagttctgaaaatagcaatgagaagtgggacaacttcccactcacaaactcagtggtagcagaggagtgagataaaacaaatcttgagggggctgtgtgggggtgttgggtgggtagaagtgtcctcagggaagagcctggcttcagcagagcaagaaatagaaggaaacactcagagaagaagataaggctctcctctttcatactggaaatgaacattcagagaaaggttaaggacagatggtattttgctgatgataggccatgagtttcagaagtcacagtgaaatagtttgaaggggtaggaatttgggttctattatgagatgttcagaactttgtgagggcgagagtccaggtggagagaaaagaactgtggttgtggacatcctgtaatgatctagggaaacagaaatgtagggccaggtggtagtgagactgatggcttcttaccaggaggtgagtgatccactatttcaaaataagtaattcaaaatttaagctgttggaatcttaaaatattctgagcctcaagagaatgtgattatgggacctgactcaggtaaacagggagctataacctttgtttctctgattatagattagctcttttccttacctacacgggttagtaaaatgttgtaaatgactaaagagccccagggaagacttattttctatgttgattgtcattatggattaacttctctcttacttttctcacataaagacttcattatttcattgcctaagatggaatgttaagtacactcttttaaattggaaaggaaatgaaaataagctgtatggaaaggacaacaaactgtaactaagttgtaactcataaaccagtcttgtatagaaaatgttataatcctactaaatttctttgttttctgcctgtataagcaagaacttttacctctggtgcactgaccccgttactctggagtccatgtttttaggatggatattttcagatttttgtgtgaataaactctttaaaactggattctgatccttttgattatttcagattcacaattgtaaatgtaggttctattactaacatgccaggggtctgatctaggtttcattgcttactgtacagaaagccaatcactgagacaagtattgccagggaagaaggcttttttgggtgctacagctgaggagctgggaggtcaaaacagtgtgggaaaagaaatttaaaaaaatgttattaaagaagctactgtcaacctaaaggaagaaactgaggcaaaattaatgtaagtaaagagtttatttgggccaagatgaggacagctgctcagaagattcaggcccaagtgatcttggataggagctctgtttggcctttgttaccagcaggtttttaaaggcaaaagcaaggggatacgtagggggatgatacaaagttgcttgtcaggaattctctttggtttacagaaatgtcattcattagttattgcctatacattgttgacatatagattatgacctaatgatatctatcatgtggtgtcattaggttaattttgagctacttgtgagaaaaggcctagagtccacatagcaagcaaattcaagagatgattatttagctcaggaggggaagtgggatgtgactgtagcctcattctcatgcctcactgggcctgataatttaaaggaggttcacattcctcagatagaaagtttcttttctttctcgctataagcctctgtctttcttgtctctctattgctaagtggtttggcataaaatcatgtgctctggtagaaacctaagggctttttattcagctgttgaaattcatacccactggagattctagagccatcagtggccatggttcctgccactggaggaaactgtctttagagagtgaaggtgaagctgacatttataaacagccacggtgagaggcagggctggaaagcaggcctggctctgttccagttcctgtgtccattttggagacgagtttccgtttcctatggtttgattacgtgatcccatgaatctccatctcctgcttaagctgttttgagtgtcttgtccatacatgaagtgtcagggtgtcctaagaagacagtggaaagtgatggggtccagcatctgggatgttgggcatcttagtactgggggagtgtgtcagtctatagcaaaatcttcacttctgggctgggcttcaggatggaactcaagtcttttggagggaggaggagttcctagaggaactggggtcgcaaatgagttccaagtcaaggactcaagaccatgagtcaaatatagatgcctgagtgctgtcctcagcaagcagtcaagggtgttggacccagacgcccagatggagtccagggtaggcatcacttacaggtcgtctttgatgcatagaaataaaaaaggcaatctaaagggcagaatttgggttgaagccccataataaaaatcaagcagcttgttctaagtagcagttgtcatttggaagaggctaggcagaaagggtgacatggtaacatttacagatagaaagaaggataagcagatgagagaggaaaacttcaaagaaaaatgaaggaggtagaatctgaaaaaaaaaagtcctggactgaagagaacatggtgttgctgcttttgtaagttatctgtgggctaggttgtggatatagagaaagctgctaaaggtgatagttcactgaagatggcaaaagcaccatgagcagaactgggacacaggatcagggccagatgagactacaagatgacaaattttgggggtcaggaggggaagtgagatgtgactatggcctcattggtagacttttccattcatggcccccaagggaccgtgtctctcagtattcatgctcttgtgcattgtctcccatattggactctgggcttggcaaggtgacttgctttggccaataatatgaacaaattaaatagggataaattagaggcctgataggcatttgcatattggacctatgctctttgaattctgagattgccagaggatggattgactagctgtcattaccttactacaagcctatggatgaagccagcacaggaggtaatggaaggaattgcagagctacgaagctgtgactgtaatgcagcatgcctagtccccttcctacctctagtcttcttgttatatgaactgataacttatagtttaaacttctcagtaagttcactttcttgcaactgaaagtgtcctaatgacacagtgtattagtccattttcatactactctaaagaacttcctgagcctgggtaatttataaatgaaagaggtttaattgactcacagcttagcatggctggggaggcctcaggaaacttacaattatggtggaaagcaaagaggaagcaagagaccttcttcataggcagcaggaaggagaagtgctgagcgaagcagggaagagccccttataaaaccatcagaccttgtgagaactcactcactatcacaagaacagcgtgagggaaactgccctctgattcaattacctccacctggtctctcccttgacatgtggggattatggggattacaaatcaagatgagatttgggtggggacacaaagcctaaccacatcacacagccttttgtttttaattttttgaggcaaattcccataatgacatggttttttttttgaagctgggaattctataagtaaaaatatttgcaaggcacttaacagcttcgatggggaaactctatccctgtgtccatgctttctacttacctgatcccctaagtaccattttctgaaatgctgtccactgggatgcagcaaggagtccagttggtgattttagagcatcacagccatgaagagttactgagttgtgcgtactcatctgaaactaagacagcctttttggttccagttgtcagcttgtgatctatttatctttgctcccagggggctatataaaggataccagaaacaggtacttctcatgtcccttctagctcaatgagtaatagacttgatggtttttccctctgatgtctgaaactttaaaaagacaataaaaacacacagatcaatatactgaataagtatatcttccaaacctcatactctgtttctcattataaacatataaattagcctcatgcaaagaaaagaagcatagcttgtaacatcttttctatctgacatgtgctgctgcctagaagactccttaacatgctccctttattacatctcccatcatattctccacttgagtatccagcaactggaatacagtgttatagaaatgagtagttatatatctgtaattatttccagcttcaaccgtgtctataataagccaatgtacttaggtcactaagctctaaataggccagagggtatggaagacatatctatccccaccactggaagaaagctcaaagcttgtccttgttgctcacgctgtgatgttttcccaaagggagggcagcagggctgttatttggggacagctgagacctgcgaatgcataagagcagaaatgatcaatggagcatccccattgtccatcacagggaaaacccagagagggaaaatagggcatattttccctcactgccctgaatgcaatacaaatctcatcactccatctccctttttagcctgtgctggagcaaatagttttagaacatgcacaatttgaagcaaccccattaagtcaggatggcaaatgctataatttatccatgctccctccttggagaagttgaacaaatattgcagatgagctttataggtaaagactgtagcagagccttattaactaggtttagaacagtaggttgaagccctttctcagacaagaaccacagactctgtttcctcttgatgtgatagatctgttaggggtgcttgtgtctgcactaagattacagctctaggcagggtagttcttgagacacttagaccacagctctgctctttgaggaatgaggcaattcaagtgttaaatgggctccatgttttaatctttagcacttgaacttattctatttctgtccccttctttgcaatgttaggctcagctgtctgtggtgacaggacttcttctgcagccaaccagcatacagctggtcactacagccctaggtgctgccaaaggctgagaggaatgggaaatgctagtactttccttcgtgcaagagtgggagatggtgcaagggcatttctgtctagttcaagtaagcatatattgagttctccctactggctaggccattagagacatagaaatgaataaagcatggcccctgcctcaaaagctttcattgtctacagtaaggtttggcaaactatacctgtgagggtgaagatgctgcctgttgtaaataaagttttatttaaacacaaccatgcacactcatttacatatcgtctatggctgcttttgtttctacaatggcagagtaggtctaacaagatcatatgggcccaacagcctaaaatatctactaactgatccttcacagaaaatgtttgctcacctctgcacaacttagtaatttttggtatatttacagaattatgcagccactaccactaccaaatttcagcattttcatcaccccaggcgacatctcatatccattagcagtcagccccagcccttgataaccactaatctattctctatctttatgaatttgtctattcctgacattgcataaaagtgtagtaaggcaaaatgtggccttttgtgactggcttctttcacttgcaatactgttttaaaggttcattaatgttttagcatgcatcagtgcttcatttctttttattgcctaatagcagtccattatatgtatataccatatttggtttatcttttcctcagttgatgaatgtttcggttatttccactttttgactattatagttaatgatattatgaagatttgtgtatgagttttgcgaggatatgtgcttttgcttgggtacatacctcagcatgaaatttctgggtcataggataactgcatttaacattttgaaggactggcaaactgctttccaaagcagctatgctgtttgcaatcctaccagcaatgtatgaaggtttccatttctcgacattcttgctaacacttgttattgtctgtctttttgattctggttgtcctagtgagtataaggtggtccttcattgtggttttgatttgcatttccttcaacgctaatgatgttgactattttttcttgtactcattagctatctgtacaatgtcttctctgaagaaatgtctatcaaatcctttgcccatttaaaaattaggttatttgctttttgggttaagttgtaagtgttctttatatattctgaattctagtttcctatcagacagtatatattatgcaaatatgtcctctcattctgtgggttgttttttcacctttttgatggtgtttttggaagtgaaaacagtttgtaaccttgatgatatcccatttgcctattttttcttttgttgcttgtgcttttgatgaccaatctaagaaaccattgcctaatccaaggctacaaagatgtacttctatgtttttttctaagagttttacagttttagcttttatgtttaggtatattatccattttgacttcatttttatatatagtgtgaggtaggggtccaaaaatcctcttgcatgtgaatagacagttgtcccagtaccatttgttgaaaagactattctttccccattcttcacacccttcgtaaaaatcaattgactgtaaatgtgaagatttatttctggattctcagttctattccactgatctatatgtctatccttatgccagtaccacacaatcttaatcactgaaactttgtagtaggttttgaaattgggaagtgtgagtcctccaactttgctcttccttttcaagattgttttggctattttggattccttgcatttctgtatgaattttaggataactttgtcagtttatgcaaaaaaaaaaaaaagccagctgggattttgacaaggaatgcattgatttgtagatcagcttggggaatattccaagatcagttttaatctttttgtttccaagatgttttgagcatggatcatctgggtaacttgcatcaatgattcccagcatttctgagggttaagtttcttttataatgtaaaccattattactgtcttctcaaaggataaaacttttacttttctattaaaagcatcattttattgcccaagtacataagaccaaacactattatgaactagagaatgcttttaagtgaatttgtattttattaattcataatagtgtctatatatacttcagaaattatagagcaaaacatggagaaatggtaaatattctgtcttcagccactgcttggtatatttatggagtcattgtccggtttgcaaaaaaaaaaaaatcagctcccacttagggaacctctagttagcaagaaaatccttcttctaaagcaggtctatctttctgtccagagtgcctcagccatagaacagggcagtgtgagcaggactggccttcgtaaactgaataaagatgccaaatagctcacgatcaacctggtgcttttaaagagttgactttcttgtgagggaaggaaattgtatcccaagctgcttcccctgttgtctaaagctgactttgcctcacctggcctgggaaactttgctccctggatgctctaccaattgagttaattggcagtatgctcagatgaacaaattcagccacagaaatacctctaagattttctttggcaccttcaattaccagtttttattaaaaagaaaaaagaaagcaagcaaacagaaatctcatgtgaacattctaatctttcctgctggcatcacctttctttatatttggaacaaaatggagaagtaaaaaatcgtccttttttttttttctctcagtcaagacgctctattgaagaaaagaataaagtaaattgattgcttataccagtccagaaaatcgttcagatttgtattctcttctacttagacacatccactttgccatattgtagtggaaaggtcactgatactagaatcagaatatcttaactcaaataccaaatccctgtcttgctgatctcaatttctttacagttaaatagaattagtaatagctaacttttgaatgtgagaattaaggagaaacttgaagagagtaaagcagttaaataattcaagtcttgtgttgtttttttttattactagcgtgctatttttgcacgaaagataatgcacccgccacttcctgagattcccaacctccttctagagggccacgtttttcagtgtggcatgggtccccgcaggcttcccttcctgctggagcaagtggagactatgcacctccccaggtgtgtgcccaaatcatgcagagagggctcaggagctcccagggcccagcagcttcttcctgatggcaggagtgggccaaggcagcatgccagggcccaggtaaagtgagacccagacagtggggagagagggcgaggaagtcaccagacagagagatgaacatagcccttcttttcctcccttcccatttcccacctgtccatgtaactagcatgacttacatcttcgtatgtgttctttgaccccatgtggtgtcctttcttttttagtgttaaacattttctaggcttctggcttggtgcaaatgatttgcctttggaaaaaattatatttattgaaagcttcaccatttaaataaaacccctctaataattcccacttccctccttattacccctccttcctctgctggctagattcccatctgtgttcattgccttggggaggagcttgaaaaggcggggtaacctgctagtcactggcttcctgtttctggagcctggcccatgatgggaagcagtgaggtgccctgggtggggtgaggtgtaataggaaagcatgaagatggtggaagtgggagtgcctctgaggggaatgctccaggtcaacacagaagagcttctgtccctactttcctgctcttggactacagaaacgtcctctgggccgagggcaggctcagagtaaggaggagagagagagagagagacagagaagcagcaagaagagcagaaaagtcaacaggcctgagagggccatggtgcaaactgcttcaaaggcaggtccttggagcccatgtcactgcagaggagttggagggctagagaacagagaagtttggcagccatcatccttggccatagttccggaaggctgcaagaggctaggtgggcaatgtatgagcaggacatctagcaaatgggccatggagagcctgactgagactcttatgtcctattctggcccagaaacttcacaatgggtcttaaatagcacagagaagtgcagccctgaaaggttcacatggacaggagtctcagcatgtggacaggtgatagaggagcaaatggggtgaggcacattttagccaacacctgtaactgaggcttaggagatgccctcccctttttcccccatgacctggtactaagtactctctcttgaactggtgaactaccctggacaaaggactgaattcccagggactgagattacatttttgtcaccctagcaagaagagggctcaaataacaattctaaggcgttatagaaaattttgtatttcttgcacacttgagttggtggaatgaaattcatacccaccacactgttctttgtctattccttgtatgtgttccactctagttgatgtgacttggtgagtcttttggactggattaaatatggcacaacaagtctttgtcaagcttaccatttgcctgttcctctattaggtaccaggaacaggtgtgtgaatgagaagtggttggtagtaggcagcctcaaaggccctcatgagctgcacctcctggtattcttgaccttgtgaatgctctccatttgaatatgggctggctctagtgatggagcaaacagaatatggcaaacagaatatggcaaaagtgatgggatgtcacctccaatatcagattacaattagactgtggctttccttttgctcattctatctctggctggttcggagggaagccagctgccatactgcaagctgcctgaagaatagatccagagaaaacgaactgatatctccagaactgaagacctagttcctactaatagccctgctggggagcttggtttcttcaagtgttgaaccttgagatgactgtagtcctgtttgacactttgcagccttgggagagactcagccagaggcacccagctaaacctccaggattcctgaccctcagaatctatgagaaaataaatgtttctgttttaagttgctgtgttttggagttactcattatgcagcaagagataaccagtacccagtccttgccctccaggaactcttgctctaggatgagaatttctttggaaagagcattcatgataataaagatcagagagctaggcataatggcacggattctgttaattaggcttcaggcagtgagaagaggagatgagacgcaggatgctgaacaggcaataatgcctgtgaggtctgggatcggtttcctctggccaacacattctctttaattacaaagcttagttcctgaaatgacaattttctatttttactcagtggattggtggaagtaagagaagtagcatcccgtggtagaaatgagagagcagggctgtttagggaatttagctcaaatcaacaactgtttttggggcggccactctgtacctatgagcccttctctcacatactcatagatgctgtgccccagcctctactgaatcaccctttatcgagggcattttgctaggatagactgtgcttgtgactgatgttcttagtcatcacctcttctgtgaggtggagccactgaaaaatggtaactctcatctgtcattgttatagttgcaacagatttaaagacaacttcattgaaaatagaaaagggtggtggtggaggcggctgcgaaggagaattggtttttcttctaaaaagccctgactcaggccacacattgagagtgctgcaatctttttggttctacaacttatatcccagaatccccaacccactatgaagatacactcccttctcatctgaaacattgtgtgctaacaatagcaacactgggaacttcggatatttccttgcaaatggatttttcctttggatatgactatattaaaatattgctcctggttctggttcttaattttaggtgagttcagaaaaaaagatgcatcagattgaaggaggacattgaaatcaattatatactgattagctcggaggaaaggtttccttgttctttttcttttttttccctctttctgtattggctaatccccatgcacactgcaattgggtgcagtcaagctgttccaggcttttgataactgcctcaactgtcagaagtcactgggagtgccagcagtcagccacagaactaccactgagctttatggaactttgcaaatcttactggaatccatcgcatttcatcttgtcagtccaaccagctcactgtttgttgtatgtgatgttttagagataatctctctctgggcacagcacagtgtttgttttgtctgctgagcattgactgccttatcttctgttaccagtattctgattctgtggggaagaaaataccactctcagtctacatgattggggtgggactgatcccaatcctgcttccagaagggggcaggtaacccatggatgggcgattacagtgctttatcccctggtcccaaggcttggtttaggatggacatatgacccaatccaggccagacatagccattgagacttggttctaggacttctatttgaggagtgagaaaaggcctgttatgctccattggggttggtgctacaggtagctttcttatgatcacaggggagtgcctgtccatgaatggagaccacatagaggataggaggagagagagagagagagagagagacagtgagagagacacacacacacacacacacacacacacacacacacacacacagagagtcagagagagagacaggagtttcatggtcaatacattttttgtcattcttccttttgtttaattaagtttaagctgggtttttgtaatttgcagctcaaagaatcttgactatatgctggagcacagtctgccatgggccctgcacatttttgcaggatatgccaagaattcaaggccatgcatctctttcctaagacctttctcagaatcgtgtttgcagggagcaatgttgcaggatgaagtaacctctctcacaaagagcaggcttgcatctgcttcctataaaagcagtgagtctcctatgttcagtgttcctttcttgcaacacaatccttcttgggtgcatgcattcgtctacacccccactgtgttgtccctgtgggacttgggggcatgaggaacagatacaaaccaacagcatgttcatgctgttactgggctgtgactactaaagacttttgcctctgaccgaggggtcttgtgacttctgccaacattcaagaaaaataacagtctggcttattagcttaaaaagtaaagcaaacccttaacccttcttgacactgtatggctccttcgggcttctgtaggctattgaatgttgcatagaagcttggttaagagcacatgcttgataggaagacagatggatttgagtcctggctctaccattctctatctgattttgagtgagttatttaacctctctggccttctggtttctcctctatgaaataaaaataatacttccaattacaaaatacatgtaatgcccttggctgagaacctggctcagaggaagttcagtaagtggtagctatatgtaactgcctagtggtagcacttagcatatgatttttaaaaaaatatttaatcatattttctcattacaaaagtaaaaaaagtcattgttgaaaaattgggaaatatatgtcagaaagataagaaaagttttttaaaaattataattccacaacctagataaccattattatcatttggtgaatatcaatatggagtgtgtgtgtgtgtgtgtgtgtgtgttttaaaccaaagcagaatcatgtcatatgcacaattttatctgtttttttcttacttaatatatcatgaccatctttctagttcctacttcttttgtagctttttatgaaaacatattataaaatagttggtatgtataacacaatataaatagcatagaaataattaagaataataaaatggacacttaggaagtcaccatgcaacttatgcagtagaaaattaccataccttgggaggcttccgtgtgaccctccctgatcacattagcccaccttcttcacttaccctcaggataccatgatcctgaattttgtgtttttcattctcttacaatttgtgcagttttaccatgcatacctgtatttgtaaaaatttagtctgctcatttcagaactcaatgtcatggtattctgcttgcacgtattttctgtgacttgcttttatgctggacatatgttcctgagatccatctatgttgatgcatagagttgtaatttattcacttttgggggtgtatggtattctcatgtacacatgtgccatgatttagtcaagggtatctggaaaaatcacaaaggaaaaggatttgattgacatcatctgcctcccttggcaggtgcttcacactctggatgggggatgggtgtctcaccctgaacctagctgtttgctttcaggcaggccaattccaggtttcccagccccaggcaagctgaccccagacaatgcaggccccaggagtatcatggaggaagaaaagaagggttgagggctggaggttatgggacagaagacagcatggatgtctcaggtagtttacagctatttaactgggggaaaatgtagaagagacagaaacattcttccatcaggatatatggctggagatacagaattgaagaggctgagattactctgcataagaaagggcatggaaaatgttagaaaacttaacctgtgtaagaaagctaacactctaaccttactaagaggaggctaagtcagcataacctacatgtaggacaatttggctaaatctacaaaaattaaaaattcaccttccctttgatccaatgattaaatttctagaaatttacagatgtataaaatcatatatgaacagttacttattgcagcaatttttatgataacaaaatagtaaaacaatttaaatgtctattaatgtggaaatagataaataaattatggcttatttatccaatggaaaacaatgcagtgcgttaaggagaaggaggcaactctatagatactaatatggtacgatctccaagttttattaaatgtaaaagcaaattgcagtggtgtaaaatggtgtgtgtgtgtgtgtgtgtgtatgtgtgtgtgagtttctatctgctatctgtatatagaatatctcgttacagtggttacttctggggatctggataactggggatatagatgggagaaagataaattactttttatgtctttaaaattttctttttttttaaaattatactttaagttttagggcacatgtgcacaacgtgcaggtttgttacatatgtatacgtgtgccatgttggtgtgcagcacccagtagctcgtcatttaacattaggtatatctccaaatgctatccctcccctctccccccacctgacaacaggtcccggcgtgtgatgttccccttcctgtgtccatgtgtccttatcgttcaattcctacctatgagtgagaacatgcggtgtttggttttttgtccttgcaacagtttgctgagaatggtggtttccagcttcatccatgtccctacaaaggacatgaactcatcattttttatggctgcatagtattccatggtgtctatgtgccacattttcttaatccagtctatcattgttggacatttgggttggttccaagtctttgctattgtgagtagtgccgcaataaacatacatgtgcatgtgtctttaaggcagcatgatttataatcctttgggtatatacccagtaatgggattgccgggtcaaatggtatttctagttctatatccctgaggaattgcacatatgaagctaccaatgagccaaaaaataagtgaaataaaaataaaaatatgtggaaggcaggagtcaaagagcagaaagtaggtaagtgaagatgctggtatggagctttgcggagaggcaggagggatttgttctgagagggacgagtgggaaatttgttgtgaagaggacttttgagttttgcagactattgggatgctgtatagccttttgccagcatcccttttgtccaagaaaacctttactccttaatgccacttttgaagctggattctttttcctttgttatgtgttccactcaaagagaggactaaaggcaacagacgcaaggctctttttaggcaaaagttgtaataataacataatagcaaaataaagacaatactaataaagaatggctactattttagcatttacagtgtggcagacattgactaagcattttacatatattatctcatttaatccccatataaactatataatgttggtggtactattcccattttatagataaagaaactgaggcacaaaaagattaagtaacacatgttcaacattatatagctagtaagtgatagtactgaaatttgagctaatttggtttgcctttgaagattgtgcttttaacacttcactatattcttttcctaaggaatgaagaatttcttaggcatagcagcatgatcgtgtgcacgtgtgtgcacacacacacaaacacacacatatctaacttaagacttaactgtgtacaaatatttatgggccaattttcaggtagagctgagacaagaatgtagaaacattataatcttgttcacccaagaaaaatctggagacattaggattttaggcagggtaatcatttggggaatattggtaagaaagatgcctgcaaactgacaggcaagcaggtgttgttgccattgctattaggccgttgggaattcccagaatgggaggctgaggaagaaatcaaataaatagtttgctgactcctctaactggcaaaagtattttcaaaactccgtgtagattacttacccttgagcggccctgagaacttgtgtgatatatttcagagatgacgtgttaacccaaaagctctgaaaaatctccctggagctcacatgagccaagctgcttcagctcccattgtgaacgaaatagtcagtgttttcataggaagactgactagttcttctttcttgtctcttatcgttccaacaaggctaattccagtgagtttatgagaacaatttaaggcttattttctcagccgcttttccagagggagctgaagtaatgtcagttccttcattactacctacagagggataaagtgcatctctgtattgttccctatattaaactgttgtttatttggacaagagaatttccaggcagatacttgtattcccaccaacaccaacacttttcatctctaatttaaagagaaaagacactctagatttgggcttccaaatagcatagccactagcctatgatgcagctgttagcatttgaaatgtggctagtctgaattaagctgttctgtaagtatacaccacatttcaatgacttaatgtgaaaaaaaggatgtaatatatccccaaacttttatattggttacatgttataatgataatagaggcagtccttgctttgcctgttggtgtagaaccatgaaaatgatcctgcaagctgaaatgatacaagtgattttaattaacaatgggtgaaaattatgattattatgcaacctttaaaacatttttgtctaaactttaaacattcttactgtcagccataaatatacgcagaaatttaaaagtggtaaaatgaacctatttagtacacagtaatttcaaataatggaaacatcgagagttaaagtacttcttttcttctttgtgagtagtttgaacagtgcttccttcttcttgtcctataacttgtattgtggagagagcatcttttctaagctttgccaaattgtcatattacttcctaagatcagcttccaacattttctccttgctttcccaatgttgtgaaatccgagagtttcttcaatgagaagttttgtttcgttttttgggttttttgttgggacagggcctcactctgtcatccaggctggagtgcagtggctcgatcatgactcactgcagcctcaaactccctggctcaaaagattgttccctgacctcagccaccctggtagctgggactacaggtgcacacaaccatgccaaaataatttttgtattttttatagagatagggttttgccatgtcacctaggctggtcttgaattcctggactcaagcaatctgcctgcatcggcctcccaaagtgctgagatcataagcatgagccacagctcctgacccaatataagttttttgctggtgtcccttcctctgggttatcattgtttctgggacagtatcgtttttgggacagtcatgttccacatttatgtccatgcatttgccttcactaagttcctctggctgcgtgtcttgagactctcgaacagcagtagtgtcaacaatccctacagtgatccatcttctgatcacgcctacattcacttccaacaatatcactttttgtttctttgctgcacttccatctttgttggccattccctccttagattattcatttctgtaaaatgtcacgtgagtttaccactgggagacaaggaatcaacacaactccatgcatgcttcactgtctgcgcctggactgaataacagatgcatagtgaccaatcgctgatagacttcaaaagaaatggcatgactggtcactgctattgatgcacacgtgttgtttacgtagtgatttgtggactgaaagtctagcagcaaagtttttactttatgcaataaagtaaaactgtatattaactgtatgcaataaagtacagttaagcataatgtacagttaatataccagagttaatataccacagtaactgaaatttgaaccatgttgttggaagattagtgttatttaattaagtggtggtaactggaatttatgcatattggaaccatgcaaagcaaagtatgcctgtatttttggatactgggttaaagtatataattaaaattatttgtacctgtttctttttactttttgaattaactaatagaaaaatttaaatcacatttgtggctcacactatatccctactggacagtcctgctctgtaccatacattaaccaaaatttaggagaagaaaataaagaaatatacagttgaaaaagaatgaaacattgttagagttttaagtagccggcaacaaagtaagagattccaatcttcacaaattgaacatgattgtatggtgaaaaacagtaaagctaaaattaaaaagataatagattgggaaaacatttgcatcatatatgtaagccaaagacaaattgccgatattatgaaattattcattcaaactcattccaaaattatcaacatcccagtagattgttaaacagatgaataggcaatttatatgagagaaaattgaaatagcaaatgaatacctagaaaaatgtttatcttgtctagttatcaaaggcatggaaattactgttaactttgagttacaatttactatccactctattaataaaacaattacaaccctctacactgtgggaaatttggtgatttcatgcaccatgactgacattgtaattagatacaatacttttgttagcaatattgtataaataggaaaagacaaaaagacatttttaacccttggacctagtaatgccactcctgagaatttaagacaatgaattaattcaacagggacaaaaagttatatatacagtaagatgtatattgtgtaatttcttataatagcaaaaaaaaaaaaagaaaaagaaaaattaaggacattctaaatgtctgatatagaacactacatccaacaatgacaaaatgcattgtgttttccaaatgcttatggaaggtttactagagtttagcacatgctgtgtcataaagcaagctgaaatatatttcaaaggagtgaaatcatttagaatatgctctttgagcacagtagaattatgctagaaatctgtaacaaaagctaaccagaaaatcaccaactgctttaaaagtaagctattaaattacaaataactcatgaatcaaagaaggaaacacaataaaaattagaagatattttgaactaaatgatagtggagacatggcatatcaaaacatgtagaaaacagataaatgatgctcaaggaaataactgccaacctagagttctataataataaaaatatttttcaaataggatggtgaaataaatatatcatcagattagcaaaaactaggagaattcctgcaatgcctagaggaaaatttatattctcaaatgtatatattagaaaagaattaaatgctacatatcaataattcaagttttcacctcaaaacgaaacataattttaaatatcaccacacacaaaaaattagtccaaagaaagtagtaggaagttaatagtaaaaataaaagcagaaaaaagataagtagaaaacaaatattaatgcaataaagaaaaaaacctaatttcttgaaaaagacacattaaattgataaaactatgacaagactgatgtaaaaaagagagcaaattaccaattccagtaacaaataaggagacattagtatagatgctatagacatttaaaagagaaaaagatatcacaaataatgttatgccaatttcagtgaatgaaattccttgaaaaacatagcttaccaaaattgacacaataagaaagagcaattagagtattatatgtctactaaagaatttaaatgttttatttaaagcctctgtgcaaagtatactcctggtctgggtggtttctttggtgatttgtagcaaatattaaagcaagtgataactccaatttttatatactcttccagaatataaaacagacggtagccttcctagactttctataggaccagcataatcttgataggtaaattacttaaggaaattgtaagaaaggaaaattacagacaaatttgtagcatgaattatatatatgtaaattctaaataatatattagcaaatagaattctttgatatgtaaatggagaaggtatcacaataaaatgaagtttatttcagaaatgctaatgatgatttattatgaataaacaatatagttcaccatatttgcagaaaagtggagataaataaaattttcttaatgattacaaaaacacatttgataaaacacaatattaattcatgataaaaactcttagcaaaccaggaagtcaatttgatggtgaattattgaaaactttcttcctatgcttaggagcgtgatatggatacttgctacttctattaaaagaaaaatggaagtcttaaccaaggcaataaggctataaaaagaaattttgaaaagacagtttggaaaagggtgaaataaaactgtcactcttcatggacaacataattgtacatagaaaatctaaaatagaatctagagacaactactagaatttataagtaaatttggcatggttgttggatccaagatcaatgtatgaaatcaattgcatttttatatattggcaacaaaaatgcaaataaaattaaaattaaaattaaaaagatatgatttacattagcataaaaactttcaaatctagaaatgtatttaatgatagacatttaagacctttacactgaaaactataaaactttgccaagagaaattttaggagcctaaatatagagagattccaccccccccatttttgtggtttagaattaaaatggtcaggatgtaaattgtctccaaactaatctttagattaaacacaatcctgattaaaatctcagcaggttttgtgtagaaattgacaagctgattctaaaattcatataagaatgcaaacggcaaaacatagtcaaggagattatttataaaaagaaagattattttgaggacttacactctcagatattgagacatatcacaaagctattgaaattaagagagattgaagtttgcataacaatagataaaaagaccagtggaacagaacagagagtccacatctctatagttatctgatattttacaaaagtgatactgctgtatagggtagaaaggatgacctttttaacaaatggtgctgttatttggatatccacatgggaaaaatgaatctttatcttacacaagtcaattccagtcagattgtagatctataggcaaaagttaaacaaataaatgcttttaggaaaaaaaaaacccacagaagatatatttattatctcaggtagacaaaattttcttaattcggatataaaatgtactagttataaaatgttcacttggactacattaaagttagaaatttcctattcattaaaagacaccattagagtgaaaacataagccacacaatattgagtatattgttaataaatataaaaagactcatatccagaatatataaagaactgaaaatcattgagaaaaattaaataatgcaatataaaaataggcaaatgacttaaatagtcatttcatgaaagaggatatccaaatggtcaataaatgtgagagcatgtttaacctcatcatcaaggaatgtagattgaaatcacaatatgacactactactcattcattggaatagccaaacaaagaagatggataatacaaaatatcagtgagggtatggaacaagtgaactgtcattcattgccagcaggagtgtacattggtacaaccactttgaaaaaatgtttggaagactcgactagccatatacgtatcctatgaggcagcaattgcactcctggctatatacccaatagaaatgcatgcacagtgcacccaaaatatacaagaatgttcattgtattatctgaaatagttccaaactggaacaacatgtgttcatcaacaaaaaatgaatacatgaactttggcatatttatacaataaatactataaagtagttaaaaaaaatgaaccattgctacatgcaacaaagggtaagttttcagatgttaatgttgagttaaataagcctgacacatatgactttatactgtatgattatgtttatattaagcacaaaaatgtaggcaaaaccagtctttgtttatggaagtcaacgtaatggctaactttgggtgggtacggtgattgaggtgggttgctggtaatgttttgtcattcatctaagtggctgtttataaactttgtaaaaactcatcaagctttattaagttttgtgcaccttttgcatgaatgttatatttcataagaaagtttataaagcagaatatgaacagggaaatgtgtgtgtgtgtgtgtgtgtgtgtgtgtgtgtgtgtgtgtgatgtgttcagtggtcaggattgctgactgtttctgcacactttagaaaaaggagaggcataggagagaaacaattgagcccaatcgagttgaaagtgaggaaacctacataggattcatgaagatggatagtctgccatgtgttctgtgatttatagctcataaaggacttctctgtacattaactcaattcctcttcacaacaaccttttgatgtaaaaattaattattatctccattttgcctttcagaaaactgagacagatattgggtgatatttattttcttttcttttctcttttcttcttttctttttttttgagatggagtctcgctctgtcgcccaggctagactgcaatggcacgaccttggctcactgcagcctctgcctcccgggttcaagcgattctcctgcctcaacctcctgagtagctgagattataagcatgcgccaccacgcccggctaatttttgtatttttagtagagacggggtttcaccatgggtgatgtttctaaggaagcaaaaccatgaagtgtagagccaccatgctcttttcactacactgctgttagaaaactagacatttggatggaagaatatgctgtggtctgaaggtttgtgtccctccaaaattcatgttgaaacttaaactccattgtggtaggtttttttttttttttttttttgtgacgaagtgtcactcggttgcccaagctggagtgcagtggtgcgatcttggctcactgcaacctacaggcatgtaccattgtgcctggctaatttttgtatttttagtagagacggggtttcactatgttgtccaggctggtcttgaactcctgacttcgtgatccgtctgcctcggcctcccaaagtgtggggattacaggtgtgagccaccgcacctggcctgtggtagttttaggaggtgaagccttttgggaagtgactaagtaatgcggcctccacccacatagatgagattagtgtccttataaaagaggctttggagagctgcctggcccttcattccttccaccatatgaggacacagcatttgtcccttccagaagatgcagcaacatggtgccatcttggaaacagagagtgaaccctcaccaggcacatgggtcttggacttcccaggccccagaactgtgagaaatcgatttctattatttatatatttcccagtgtaaagtatttcattatgacaacaggaatggaccaaaacagaatatgctatatgctatttggaataaattattcctcacaacttttctatgaaattggcattatcatcctcagtttgcagatgtggttcaggaatacctaataacctatgaacatacaatctagtaagtggccaaggcagtatctcaacatgtatctgtctcactctaaagctcatctctttctctcaaatgtagctgctagctgcttgtgtgtggtataaatgattcagctgcaagagctcagacagcagaaagatcactgcagggtgggtcagggagccttcgtggaggtgaaggtaccctttgggatagatttaattaataaatgaattaattaattttttctcaacttttatttcctattcagggagtacatgcacagatttgttaccttggtatatcacatgatgcttaggtttgggggtacaaatgattccatcacccaggtactgagcatagtacccaatgattagtttttcaacccttgacccccttattctctccctcctctaggagtccccagtttctattgttgccatctttatatccatgggtacccaatatttagctcccatttatgagtgagaacgtgcagtacttggttttctgtttctgcattaattcacttaggataatggcctccagctacatccatgttgctgcaaagaacataatttcattctttttatggctgcatagtagtccgtagtgtatatgtaccacattttctttacccagtccaccactgatgggttgattccatgtgtttgctattgtgaaagtgctgcaatgaacatgtgagtgcatgtgtctttttggtagaaaggcttgttttcttttggatatatacccaataatggttttgctgggtcaaatggtaattctgttttaacttctttgagaaatgagatgggattaaataggagaccaagatgtggaaagaactctgagtttggggggaatggaggagatcaagaaagtgttggaaggctcattggtcagtgagcagctttgtttggctgaagtacagggttttttaagttccaagaagtcagagactgttttgtgaattgacttatccccaatgctcaacacaaattaaatgctccagataaatgaataaactgattggttagcatcaaaatttgtgcactttttagaaacgtaacagtttatggatggcatcgttcattcagtcccctggtaacacaatgaggtttaatttgacacactagttaaaaaactgaaaagtacctagaaaacgagatggtaccagctaagccagttgagaaaatattcaggaaaatcagagtgttccaagtgtgactgcttttgagtcctaaaggtatctgaaggcacagggtgaaaatggcttagatgagtgcctatcctggggccagcatctgcagatcgtactgagagtgcctgcccaactcctttcatttgggacttttgagcctttgtccttgctgtcggactggtgcttttgggaaacttctctataagctctgttttcacaagaaaaataatttgttgggataatgatctacacaatgtgacagtatttcaggcactacctcctgtttgaatggaaaaatagcgttacaggtcgctctctaagaattcctcttttttgatcttgcaggaacactactccccaaataggttctgcccatgggatgtggagatgatgaattttctaacctcagtgttgctgacacttagatccatgcgcttctggaaagactcatttctaagccatcacggctgattgaatgattgtatcccccaggtgtttaataatggatccatgtcaatcctaaaagaagtatctggtggactgcaataaggttctgcctgtgatcgtcttcattttatcatccactcatgaagatgtgaaagccagacttcagacagacaattagagggcattagtaatgcatattggatgagaagttgtgacacaaaattttaataggctgcaaagatgtgctaaaattcactaggtataaatgatgtcataggttcagggagatactgagacaagtgtgaacagaatacatgagattacactgaagttcaattaactgctagtcaaaaactaaaaactaaaacaatgtattctgtagtgaacacttgcagatctgtgtgcttagttcaccttttctagaagttgccccttcccttgtccagatggttgcaaaaaagcactgacgtcacaacatgacctggttcctggccacagttgataggtccagaaactgatactcaacttaagaataaggatctgttctgtttattttaaaatcagaaccaagaatggtaagctggactgtcttcgaaagcctggactctaagaagtaaagctttggatttataggcagccatgtcccccaccactggggtggcagaggaatctagtctttggagagaggggtggacatgagagatggaaagagactcctgtctacatgttcctatggctcagttgcatttctcttccttgagtatcactgtattctaataacctaatagatcctcatatcttccctttcaactcaagctaactaagtgtctcatatttgcaaagcaaaatgttccaagtacatgacttaagctccagctacagtgccctgaataagggtgggataatcataatagtaaatttccaagtggccaagtcttaactttgccttggccacactaatgtggtccatgtggtcatttccaggctcaactttctgaagatgatggtcaagagacagaagtctctgaggaagaggaggtagctgtttagaaatgtttaaagggttgccatgtataagtcaaagtaggtgttctatgttgctccaacagacaaaaatgataccaatagtcaaaagttggaatgcagattttgactggacacaacaattgtttttgtaagtattagacttatccaataaaggaatggatgacctagtgaaggatcaaggtctctgtcaatggaaggttgggtcagaacttagatatacatttatttgggagtttgatgaatagatggctattaatagctgtcatttatcaaaggctttttatgtgtgaaacactgtgcttgacatatgctttatgtaaatttacacatcttcataataatcatatgaatagatataccttatacatttaataatagttatcaaatatttataagaacaatattttggtaattttaaacgtaaaattaaaaaaatttgttatgcttcaattgtagaattatgctacaattaatttcagtctttgaagtatttgtaattttaccacttcatggcatttttctactttttttttttttgagacggagtctcgctgtgtcacccatgctggagtgcagtggtgcgatctcggctcactgcaagctccgcctcccgggttcataccattctcctgcctcagcctcccgagtagctgggactacaggtgctcaccaccatgcccagctaatttttttgtatctttaggagagacgagttttcaccgtgttagccaggatggtctcgatctcctgacctcatgatccgcccacctcggcctcccaaaggcatttttgctacttttaagttttaaattcttttactgatacataattttatgcatatttatggggtaggtgtgatattttattacatgcatagaatgtgtaatgatgaaatcagggtttagggtattcatcacctcgaggacttatcatttctgtgtgttggaaacatttcaaatcctctcttctggctattttgaaatatacaatacattgttgttaactataatctacctactctgctattaaatattagaacttattccttttctttaactgtatgttagttctcaccaacccacctcttttcatcccctagcaacaccccaccaacacacacacacacacacacacacacacacacacacacacacacacatttttcagcctctggtaactatcattctactctctacctccatgagatcaacttttttagctctcatatatgaatgagaacatgccatatgtgtctttctgtgcctggcttacttcatttaacataatgacctccagttccatccatattgctgcaaatgacaggatttcatttttttatggctgaatagtattccactgtgtatttttgccatattttcattatccattcattgactgatggatattttaaattaatgaataattctcaattttgactcaattctataggatatggtggcccttccagattttcaaataatacaagctaccacattttcatttccattatgattatttcagttacatttacccaattgcttcccatatatttttctggatacaattgataatgtccttttgtttactatatagcaggaaaaccaacttttgttgtcttaatattctctagctgtggagttcaactattttatctttcatagctgggtaagaacaggagtaatattttctattttactgttgatcaccatccccaaaatccctaatattatctgctccataaaaatccccaaaaccaacactcaagggtttgcttaacatcagactgaatgaataatttctttgaaaagataacccgaatttgatatctagtctgacctatgatattctttataaaataaggaattattttgtatcatactgaattctaaaatatatgttcttgagctttaaaatgctttctaaaactttctatttaattctgcattttttcaccagctactgtaaaaattctgccatatcacatcattgttgctttactttgttcatcctttttttctagtttgtcccacattttttatctctataaaatgtcagtgaagagactaaacataaatatacaaagatcatggctaagccagatgcagacagcctgatagtgaatgccagatgccagagattctcttcagtttaaatattcagcaccaggtggttcagttgacctaacaaaagaacacgtgttcatgagatgcaaagatagaattggagatactagttctcatttggataaaatttagttatttaatgaaagcatgcaagaagggtttgaaatcaagtaaaaatgaaattaagttaaatcattcattcacatctatacagaaagaaaattttattgcaatttgtaaaatttcttttcagaagtaattcttagaacaaatgctagtatttataatatcagctagagaaaaaaatcctttaattacgctttagtgaaagcataatattaagtctgtttccaactccctgaagagtggcaataattaagataatcaatgtttcctaatatgggttagagtagaaatagaatttcttataaaacacattgtatttcttgttttgaaagatctcatagctcaaatttaagttgttgcctttataactagctacagtaaataagctggccatggactttgaccttacacagaaactaatgaccttaggagtatttcaagatgttttattaacataagtgaagtgagttaacacagatatgctgcaataagtgtttgtgatacgtgttcacatacatgtgaagcatatgtgtgtgcatgcagttgagtacttctgttgtcaaagtggccactgtcttagaaagcaatcaaatgaaggcaggatgttaactttaccattaactaagcaagacgacattgccatcacttacatttattccttacaagttactttttaagtgtacaatagaggttcatgaggaagtagccccttaaaaatgttttagacaatatttaaaatatatatagcaaatgaataactatatagtcaatgcattggaatgatatacttgctgtacattattgctttgtaaggggttgtattagttttctgttacttctgtaaccaattactacaaatttgacagcttaaacagtgcagacttaccatcttagggttctagagagttgaagtcccacatgggttgccctgggctaaaatcaagatatccgttgtgttctttcctggatactccagggcagaatccatttccttgccttttctagcttgtagaggccaccacattccttgactcacagtccccttcatccttcttgaaagccatcatcattgcatcactgtggtcacattctctgaccgactgtgcctccctcttcaacttttgtgggccttcgtgattacattgagctcactggacaaaatagcacaatcttcctattataatgtcaatggattaacaacctcaattccacctggtcccttaattcctctttgctatgtaaacacttgcagccctgtgttcacaggttctgaggattagaatgtgaacatttgggggcaacacttattctgcccattacgaggggatttagggggcttcaccatccaaaaagcagacttttgcataatttctttctttttaagacagcagcccatcttttgctactcctggtgtttggactcccttgattcaatttctcttcctgtcttctgctattgcaaaggaaggccacagtctaactgcatgtggctgaggaggaaaccttggggtttatctccttcttgaccaacgcttctcttttctgtcccattctatttccctatttttagcagtgccgtgtcctcccaattttgaggctctttagggttccagcctgtgaattagtttccaagcttggccactgaaagaagtttcgttctacttaatagcattttttacccacgatttttctctctctaattctcttgtttcttatggacaaaaaattaattgctataattttagaaaggtttcaggagaaagtagagacatacatgtgtgttccatcagccagataagcaaataaccagaagtctaaggtacttattttttataagacaaagtcctaaggctgacaagtaatttgtctaagatcacaaagacaaataaattggaaccagaattctattctgggcttttctgatctttgttttgggaggatgattagatgcaataaactttaaggtctctctttaatataatatattaaagatacattaaaccacaatgattctcaagatttattgtctgtctcagctgagaggcaatttgtattatacacatgccatatagttcctacaagattttaattagcttgagaaatttatatgtcttcataactcatattgtatcatatacatgatggtcacctgataaatattataaagaaagaatatgaatgcttatttgccaaacagaattaatcttcagagtttcctaacctgtaatcctagggtctggcctagggctcagattaaactcctgatataatgtaatggtaattccatagcaagattcttcactcgagtcagctgtctgctcacatgttgctcccaaagctcttatagaagcacatttgagataagatggtcaaggttaactgtgtgtattattactgctgggcagctattggcatagtatctaaatttcaggtagttgttttggtaacacatttgatacctggagaacattaatgggagtcatcaatgttagcgatattttctttgtagtctcctagcctcaggcatagtggagatagtgtttaggctgagctatgaccttcactgctttaagaattaaaaagtttgcagtgtcaagggaatgagaagacaagccacagactgggagaaaatatctgcaaaagacatatctgataaataacaattatacaaaatatacaagaaaactcttaaaactcaacaataagaatacaaacaatttggttaaatagtaggtaaaagaccttaacagacaacttaccaaaggatatattcagttggagaataagcctatgaaaagatggtctacattttatgttatcatggaaatgaaaattaaaatgacaaagagatatcactatgcacctattagaatggccaaaatccagaatgctgataaaaccaaatgctgacaaggatgtggagcaacaggaactctcattcatcgctggtggaaatacaaaatggtacatcactttggaagacagtttggcaatttcttacaaaactaaacatgctcttaccatatgatccagcaatcatgctacttggtgtttacacaaaagagttgaaaacttatgtccacacaaaaacgtgaacatggatgtttatagcagctttattcatagttgcccaaactcaaaggcaaccaagatgtccttcggcaggtgaatgggtaaataaactctggtgcatccagacaatagaaaactattcagtgctaaaaagaaataagctgtcaagccatgaaaagacatggaggaaatttaaatgcatattactaagtgaaagaagccaatctgaaaaggctacatactgtgtgataccaactacagatgctcctctacttactataggatacttcccaataaacccattgtaaattgaaaatatcctaagtcaaagatggctgtttttgttagacatgatgggatgggaaatcacagacacaacacccaaaaaacgctggcaagacagtacactttagagcatcaattgtttaccctcatggcggcgtggctgactgggagctactgctcactgctgttttctagtatggcaagagcagcaacagagagtctcctatcatgtattgccagcccaggaaaagatcagaattgacaatttgaagtacagattctactgaatgcatatcactttcgcacagtgctaaagttgaaaaacagtaagccaaaccatcataagttggggaccgtctgtatatgacaccctggaaaaggaaaaactattcagataggaaaaagatcagtggttgtcaggggttgacggggggatgaacaggtggagctctgaggatttttaggcagtgaaaatactctgtatgatgctataactatggatatgtatcattacagatttctccaaacccatagaatgtacaacacaagaatgaatcataatgtaaaccatggacttcgggtgataatgtttcagagtaggttcagcaattgtaaaaatgcaccactgtggtgggggatgttgataatggggaggctatgcatgtgtggaggtaagaagtataggggaattctctgtaccttctgctcaattttgctgtgaatctaaaactgctttaaaaaataaagtctataaaaaaaggattacagtgcccccccactcccacatatttttaaatcacaaattttaaaattatgatatccttcatatataattcaaaattggtacaatactaaattgaaaattattttttaaaatttcctaaatgacagcatccctgattttgggaggaaatagcaaattctatttttttttttttttttttttgagactaagacttgctctgtcacccaggctggagtgcagtggtgcgatctcagctcactgcaacctctgcctcccgggttcaagcgattctcctgcctcagcctcccgagtagctgggattacaggcgcccaccatgatgcgcggctaatttttgtatttttagcagagacggagtttcaccatgttgcccaggctagtctcatactcctgacctcaagtgttccgcccgccttggccttccaaagtgctggaattacaggcgcgagtatttccactgagcccagctagcaaattctttcaaagaatattttcactctcctttttctgtgggtgctcctgcttactgcagcttggggtgatgccttttcggttacctgaggtgggtagcggagattcccaattcccatatcccttttctttccccagtggttccttcggcccccatggccgggacacatggaaaggtgcaaggtatgaaaatccccgcccatggtgagggacctgtttgggcctcgagatccattttttttggttcctcaagtttctggtgagtttggcaagtcttcagaggtcccttccagggtggtacatgaagttttgacagatgggtgtgaatttgagagctatcctctcttgtctagcagggtgaacttagataattcattctatgtctttgaatcttgggttcttttataacatttgttttaaagcttttgtaatatgcataaaataccaacctcttagggagaatgccaggaagaaatggcataagacacacagaggagtcagtgcagtcccttcaataagtatcatttccactgttctctttcccaactccatcataaaaaaggtggccctggtgatcataatagggcacattttatagtaattcacacattacaaagcaatttcatacacattggtagcattatcaaatactagtgtttgaaggcaactggaaaatctagttcttatcttatcaataaataacctaatcccaagaaacctcatgtaatttatcccaggtcatgcagctaggtaaaggcacgagcatgattgaaagcatgggtggtattctgctcctaaatatgccttttgatatatctaatccttattgcatatgtaatatcttagaataatagctgctgtgtatattcacctaccaaaatgccacacaagttccccaatattttctcatctaattcctacaactatcttccaaggtgagtattattattttctcatttaaggaatcacagaatgagggctcaaacaagttgagtaccatctgcaaggtcacccagcccataagaggcagggtagaaatgggtctgacaaacaagcttatgctcccaatactcaaggttgttgtctagatggggttattataggacaaggcagatggaattagttgagctgttcaaatcatctgtgtgagtgactccgtgcgattggtatttattgctaggaaacatggcagtggagtgtgtatatgctttgtagttagacttcggttggaatccaaactctagagaaggtggcctgtcaagtggaatgatggagcatggactttgctgtcaatctgacctgtgtccaagtccctgttctggtactcactaactatgtgaccttgggcaagtttcttttcttctctaacttctgtctgtgagatgggataataacagcatcaatctcctggtgttgttctaaagaggaaatgagagatattgtttataaagtgtacacacagtactttgtacagtacttgctacctagtgggtgcttactaaatgttaacttttcttattattgttttcattattgtatacacagtactttgcacagtacttgctacctagtaggtgcttactaaatgttaacttttcttattattgttttcattattgtatacacagtactttgcacagtacttgctacctagtgggtgcttactaaatgttaatttttctcattgtttgcattattgtatacacagtactttgcacagtgcttgctacctagtgagtgcttactaaatgttaacttatgattgttttcattattatttagcctctctgagtcttggttaactcattagtaaaatggaaaaatgataactatgttatagtgtcagtgtaataattagagaactctatgtaaagtgtctggtccccaacatatggtcactcaaaggagtggtatgactcaagtgtatactagaggcttctataatgaagtcacagataactgcagataaatattaacctattggaaaagtatagataagtagtcttaatggcaataacgttgttctctgtgggaagctgtttccaaatctccattttccattttgtaaaatcaacatcagggttaaatgtaaagctacgggttaggatagagatgagctttgcccaggactaagtggaggaatggccaaaatgtcttcaactccaaggttgaaatgcaaaaatctattggtctctgttgattgctttcccttgatcatggaattaaatggcaggcatgttgtggctttgcagcagactgctgtgtgcaatctcagctcagttttctgtcaggtgtgggccctgtgtgtaaataaaccaaccacgctgttaccccatgatgcaaccatctgtaaaatggggattaggagtgctgtgaaaatgaaatgtgggaatgtgtttgacatgatgtattgtcatgctccataaatgtcttcaaacattaaaaaacaatttaaaagttgaatgttggagaaatacagaatacattatgaccaaaaaagaagcctagctttccagacctcccattcaaagcatgaaataacacccagggaattatgttgataattacccaagtctaaaacagtagtactgtttaaaaaataaccttttatttaggttttagtggcttaaaactgccttgacaggcatttttatcaaacattgacatactcttcctaaattattttgagaggcaaagtcttaaggattatttggaagaaaaaatttaatcttcttgaacatgcggtatctcagaaagcaaatgaatttctaacattagtattttaattatttggctattgtctagaaggaagtccttttatagttccgaaaagctccctactgtcatctgaattatgacaaagtatttcgttttgtaggaataccacctctttcacaaattacataattgcagaaagatcaattaataagtgctgaattccttatttgcatacagtttaaggacatcactatgaagactcagaatattcttttttataaattcgctcatttctgaagagcagccaatactggatctcttgagtattccaactgtcctttatagaaaataaaagcatggaagaaacaacatagatttctatacagaaagacaaaacccccacttccctcaaataatggtgccctagagaggagggggaataatatttattgagcacctgctatgaagcaggcattgtgccaagagcattagatgcatgatttcttcattgtaatcttggcaacaaccccatgacatagacatctcttcacatctttgttcattgtgctgcccaaacctatctttctccccattcccttcatctccacttcaactccaggtagagaaatgcctcccagtgttttcatgctatggctcacggagaaaagtgtaacatttgcacggcacactgcaacaaacagcagagtattctggaatatttagataaggcttggtgaaaaaaatcctttttatatatagtataatttacaagaaaaaaatcatgtattgtaggagatattaaatattgaatttgtactgttgcaggactctctccttagttcagctaaagatgggtccttgtcacacagtcatgaaaaattagcctcgcatgcaatttgaagggtgagaataaatggaatttattgggcaaaaaggcagggggataagggaaacagagaccctctacaaagccagaatgctgctggtgtgcttcctgcctcgcagattgaattccacgttccacccaggaagaggaggggccaggctcctccttgctgcaaacagtgcgaacttcccaaggctccccaccagtgcacatccctcccagtgtgcaggctggttggagtttctcatgggaccccttcccacctggctgtctcagtactactcttacaaataaaaccatttaatggatataaggctatttatatatttttcttttttgttgtgtcagtttgggtaacttgtgcttttcaaaaactatgtccatgttatctgacttgtcaacttcattaatacaaaactgttcatagtatatatgcccttattgtcattttaatgtctacagaatctgtaattttgtcccctcttacattgctgataatagcaatttgtgttttctccttttttattatttatctatttatttatttattttttctcttttttttattatactttaagttttagtgtacatgtgcacattgtgcaggttagttacatatgtatacatgtgccatgctggtgcgctgc

SEQ ID NO: 2738 - DNA, 354 bp, Homo sapiens
agacggaagtgagccacacactctgtgtcctcgcctcaccaggaaactactaaagttcctggggaagcaaagtagaatttcataagaacaaaatggatggagaggagaaaacctatggtggctgtgaaggccctgatgccacgtatgtcaaattgatatcatctgatggccatgaatttattgtaaaaagagaacatgcattaacatcaggcacgataaaagccatgttgagtggcccaggtcagtttgctgagaacgaaaccaatgaggtcaattttagagagataccttcacatgtgctatcgaaagtatgcatgtattttacctacaaggttcgctacactaacagctcca

SEQ ID NO: 2739 - DNA, 494 bp, Homo sapiens
gcctgtcataaggtccagcgagctgccttccacgagaccagcagaagagtgggcaaacgtgaagtccagtcctgctgcccaggctgccattgacctcacggcgggggctgcaggttcctgcttctccacgccaatgacatggtgagagaatacagggggagctgaagacaaacaacataaacttatgtttgcaaagcaccttttactctgtgaaataaagtgagtgcaagcagtaaatggaacaacaagctttcagagtcactgcagggcaagagctggggaaggaagagctggctggtcagggaggatgcactggagagaaaaaccatcactcaattggctaggacattccaggacatcagggagaccacacaacagccagagtgtctcttctcctccaaatgaacgcaacacctctccagcaagggcacagaactgggctgaggctgagtattgctgaggcaataccgtttagaacataggcacgggtaagg

SEQ ID NO: 2740 - DNA, 15178 bp, Homo sapiens
gcaagtgatgagctacagaagcaatgcagcagtctgatatgccaagttctgggtacctgaccactggcaggttcagtatcagctttcagcctgctaaggcatgggtccggtttaccacctattttgtttgtataaaactatatagaaaatctatttcaatgtaattttttaaacagtggactgattgattatgtagcacatttaccatggtttttctgtgatttttcaagaatcactgatgtgtcctattgtatttttgtcctagttaaacttcacagcgtctctgtcagtgtactgttttttatctgcaattgcaaagtgctgataaaggtcctttctgttttccaaaagagcaatgatagagtgaaaaaaaaaacccaaatagtctcgtggtactcattgcagaaatatagtttagcccagagtaaaaaagcctttaaaacttcatattatcttgccacacttattacttctgaaaattttattagtgttttgatcttttggcaatttaaaaatgggagctgcatgtttgaaaactaaaattattgtttggaaatgtctaggaaatatggttttattgataaatttgggtttaagtgttagtggacatgcatagcttggtagatacataagatcccattatactatagccaaatgtaggattttaaaaattatgattaaaatgtctactacctgtattttaagaccacatgagtccgaatctcatagatttaacaaattcaggtagttggaactcagttgtaaaccaagaaataaagccaaaaggaatttggtgcagataaaattgatacccagaagcttgtatagtctcagctcttcttccttctcacctccctcccctctccccctacactatgggaggttcttttaggagcttgttttacagttctaatagttctctgttttttttttttaatagttctctctagttaaaaagaggcagttccaactctgccagaaaggcagacaaagaaaaatgataaaaatcagacagaaaaactctaaaagcattgggactatctagtgaagtgacaggaagccctgaatatttcatttgctctaatacagaacaatgtggatattcatcataaccgccctgacatgttaagggaagattaaattatgttcaatacgttatatcaaataaagttcagaaatgtacagtacatttcaggaagcattctgtgcaagaaagttattgtctttatgaatgtaaaggaaaaaaaaaacctcaactcagcagagaacatagatatccagaatagcaaccattgtatgattacatattaaccttcccattgttgatatgtactggggacctctgttgtttataagtgctgtgaccttggccgtgagactttatactaatacctatccctcagtaatgttctgtagattcaccaagatttatctttgtaaagtttttcacattgtacttgccaattagtatatatttaataattgtggctattatgcatttcaagcttcctgtgaacaaaaaatacattggaagccaggtcgcgtcaaggattacagaccacacattacattttcatgagcctacactgctaggtgttttcttgttgggtactctgaaaaatattacatgaactaaaagactgtcaacattggagagagtatgccataatcttgaagtagctggcattgttactggatatgtatggcttaagtctttggtttggaggtgggaggctgtcctgtgcattgcaggatggttggttaacagcatccctggcctctacccactggatgccagtagcacccctcctcccaccccagttataacaatcagagatataggcattgctcaatgtccctgggggccagatcaccccggctgagaaccactgcactagagaaacaaatgtgtaaatatggagcatgaagttttaaatagtggtcacaagtgaatgctgagtgtgtttaaattctcattccttttgtgctatgaggctttgactacatgtatctgctttactataattctctctctgtgtgtgtgtgtgtgtgtgtgtgtgtgtgtgtgtgtgtgtcttttcaccttataatttaggtgttgtttagtgacagttaaaggatactaagaaaggattgggatgaaacagtgtgttttatccagtattttgagagtaaggcttcccaggtgagcttccgtcactgattttttggatggctgtacattaattaacatacatttattgagtgcatacccttctaaaaagtcctgtgctaggtactgcaaggaaaagaattttttttttttttttttttttgcctgaacctcctggatgagggaatttcttttctggcatgtaacgtttcttttctcggcccatgtgtctggagtgctagttattcttcccctccagtcccaaacagcttcttttcctatggcttcactgacctttcgctctaaaatcctcatgcttgtgttcacctcttcccattcccccatctctattgcatcattatgcgggtttgcaaacatcatcatcttctttctggcatgactcagactcctgataacgttcatttctggttgccttatttagggaaaatcatcttcttcttctaggccatattagcatgggacactcgtccatctattactcagtagctctttaatttcaaaatatagtcctaatcaaaattttctagctctttattttacttatattttgggggactcatcagttatgattaaatgggtcaactagtaacagaaatctaagtaatacttgtaaactaaatagaattaattttcccttgatgtagaagtcaagaggctggtatggtgatgttgtgatttcatcagcctctcagtttttctcaatccttctattctgcgttcctattctgtagcttccatcctcaaggtcaagtcatggtctaaagatgtctgtctgtctattgcagctccaaccatcacatctgagttttagaaatagagatgtagaaaaaaagaaaggcctgtcaatggaatgctttctgcttctctgaagtccctcttaaaattgtttaaattttaacacctatctacaagggtggctaggatatgtagctgggcacattgttgctatcaacaatacagagattgtgttaataaggaggaagtgagaatagatattggccaggcagcagatgtctctgcacacagagaattttgagtggaatttatgtcatcgatgttttatacaccatatacaaaataggactttaagaagatgtttcataatctatacagcaaaatttactatattaatattgagttattactcctaaaatttgttccttgtgctcaaatacagaattggaaggattctttatcattgctccaaggaatgagggggaaaactgtcacattcctctgaaaagtaaaaaatgtggtccatcaatctagttgactattttttttttcacactgatctgtcagaagtggctgattagctgtgggtttctatacatagctagcatttatcagagaaatatcatgaggacactctttctgttgaatatacgaaaaccataaccagtttctacatgtaagggaaggagtggtacacaggtctgtcaaactgtgatgcagggtggtgtggggaaaggaacggactacgttcaagaagcctctcttctgcttcacgttgaacatttctgactctgtcacttttcctcaatcactgtaagcctctgcttttcatctataaaatgggactaatccttaactcggctatcatttgttgtgtcccttcttaaagatacattgaatgcccatctgtggcaagataccagagtaggacagagctattgttatgcttaaataaaatatcttgtagaaaatcatatgtaaattcaaagtgctattgggttgctgatatggagattatttattttttttatcatttagatccagatcagattttagccattcttggcaacagataaactctatttctcaaaaatttctagtagcaatcaattatctcaaaaaaattctgctgtcctgtgtgacactgcaactatgtattacccattaatgctaattaggaaggacctgggaagcacagccagataacctatagtttattcccagccctcctacttggcctccaaacttccacaaaacactagcttcctttgtgcctacttccaagcctaaaattcttaagtaactttattatttatttgtttatacagtggcaaaatcctgaaatccttcacatacttgttaggcaacattaaatatttgtgaagtctgagtggcacactcaccttaagaagcttcaaatgaggccaggtgctgtggctcatgcctgtaatcccagcattttgggaggccaaggcaggtagatcaactgaggtcaggagttctagaccagccagaccaacatggtgaaaccccgtctctactgaaaaataaacccatacacaaaaattagccatgcatggtggcttgcacctgtaatcccagctactcaggaggctgaggcaggagaatcacttgaactggggaggcggaggttgcagtgagctgagatagcgccactgcactccagcctgggcgatagagcatgattccgtctcaaaaaaaaaaaagcctcaaatgaggaatatatattgaaagagttttatttatttattttggtttaatgaaaatttgatctgttgtatttttaattagaaattatttgcttcaaggtttttatacaggacatacaggaactaatttggatatttttaatattatagatctgtactgcgttctcagaaggctacaaaactctgtaagagaaaaataattatttggcctgcattgtttaaaaggagatcatatctagttgaggaaaactggtggcgttggagcatggctttgacagattttgatgggcacagaaagcgaggctggctgagcattccaggaagaaaccaaaatgtagggaccagagaaactcctggggatgatttgggaaaagtgagattttttgattattctaaagaaatggactgaatgcctcaaaaacaagagctatgacttatttctcgtcaccactcctagcctagttacagtgatgacataaagagagcttggtgatcatttatcaaactgaattacaaccagttttaagccaaacccaaagactgcagagaaatggatatgcccaccgtctcttctgtaactgtcatgcttaaatatgacataggtgttccctaaagagcatttcacaatttctattagtgcaccattcgaaatatgatgttacagaaggctaacagtaagttctgtgtcacaacagaagtttattccaaggagagtagggccacagatggcatctactcaaattaacaatgggtgcttaagtctccctttcagtagccctaaaaagtgatgactcaccacctcagcataaattcctagtttattcccaaacagtccatcttgcaagcttctcttacatgagcatacaaagttagcctgtagatttcaggagtgtgttggtaattctgggttagaactgacgttttttggtataaggatattcaaatgggcggaagtccttcaaagcagtgattctcaaatttgagtgaacatcacagtctcctggagtacttgctaaaacacagacttctgggccctaccctcagagtttatgatttggtaaatttgtgacactagcctgagaatttgtatttctcacaagttaccagataataccaaggctgttgatttgggcaccacactttgagaaccgttcttaaggatattccgaagccaagagcaagtaaacatcctctgtggcaaagcttggagaatgaaaaacatagagaggatattttactttgctgcctcagggctggtctggctttctctgaacaaaacgatgcccactcagtctttctcctgccatacaggccaaaagaactaccttcctgggtgagctttgcactctcatccatccgggctgtcattcctgctcttctttccatgttggcacgccttcccttgctatgctccctattgaaatactcctccctcttcaaggcctagctaaatgccagaggctgtctctgattctcatgaacatgatgaattgttcaatgggttcccatagttccttgcttatatctttatgtcccacttgtaacatgtgcccatggcatacaattcgttttatccactttaatctctcctggaagtgtaagatctagaagtccagaagggcagggatcgtgtgaggtttgatattccctggcatctagcagagtgtctggcatagagtaggtgcctggcaaatagtttttgaataaataaatgagccttccaatctcttctcttctcacttagccacatcctctgcatgaataatatgactggagggaggggttgcattgataacagaatgaagctgaattgaatctagagactgacaattgaagcttagctctacatttattagttgctggacctcacgcagtacactgaacctctctgtcccatcctctgtctaaatcaaagggtcctaactctcagcggtgtttcaaagattaaacaaggcattacacatgagtgttttggaaaactgtaaatcctatataaatatgaatatgttagttgcttaatatttccatgtataacaaaagtatgtacatcttctacaatgacccaaagtgacagtggtttcaatatattttctataatgaactagaataaatgctttatttgtccacccattttaaatgtgttgcatataagaaaagcatcttatttttgtttttaatttgttttattttttattttttgtcttcaaaggcgaggggaaaaatgagattgttgaattgagaagcaggcctcttatttgccatataccagtaaatatcacttaacctccctcgtcatttattataatttgaaacaatccatagcttgacagggtgtgagacctggaagactctagggtatatcatctaggcccctaattttacagaagaggagctgcagttcagaaagaagtcccctgtccaggttcatatgactggtttgtacccaattcaccccacctgaatatcccactctgaaggcttcaacaaatgtcggttagtctgagaaggtcaatgttctgtttgctcatcagtcctgggactaaggtttctatcaacccattgacccaagtaattagaatgttttgtgtgttttggaaattcacctgaatttacacatttaacttcctagtaggtgtctgtgcctacgaatacaaaggacatagatgtacagatttcatctggaaactattttttggtgtccagataatcaatatcttcttagcaacttgagacattaggacagaaatatatttaacttaaaatcttgatcactgtttagaattaaatgttggtcaatgaaacccattatttactttttatattcatgttattcatatttttcaagtaaaaaattcaagctatcttgtcggatgataggacagaatatgtaaagtcataattttcctattggacatacattaatatgtggcattattttattatatattttaaaaaatattactcttgaagagatgctgtttcattccttaggtcaagaatacttcagatttattcagaaacttttatggaacatctttgtgtgccaggaactgtgctaattgctaataatatgaatttgaaaggtacacaggtcttgtttggaagaaacttatagacagactaaaaatgtatttaaggacaaagtatgacagtgaggtataataaattcaacaatgagataaataataggtatagggttggcacaagtacaagggagtgggttgttgtttgggtggctcagggaagctcatacagatgggaactgtctttcagaatgagtaggagtttatcaaaagtggaaactaggaaaaggatggcagttccagtagtggaaatagcaggtgcaaaggcatggagatgtgaaacagtatggcatattcaagtggttgtaagtcggtagacacctctgaaatgcagaatttgtgtaggttggtagtagaaactgaggttgaaaaaggaggtaaggacaagttcctggaaggcctttgaaggcccattaaaatgtttaaagtattctgcaggcaaaaaggagtttggagtatgtgtaattttagagacatgtgacatgatcagatgtactcttaaagagggtctttggggcttcgcccatgactctctttggttcttcttccttacagtctgcaacagtgaaagactgtttcctacatgaagtctgtgagagagagaacaggtttgcatgttgccaagttatcaaagaaaatacatttccttcaaaaccaacttatcccctgaagctgctagtaagaaaaatatgagcaaaatataccacagaataaacttaagctgcattttaaaaagactattatcttgtatgaaaataattcataagttaaaatgttaaaaggccagggaccacacctgtaataccagcactttgggaggaaggggtgggcagatcacttgaggtcaggggtttgagaccagtctggctaacatggcaaaaccccatctccacaaaaaataaaaaaaaaattagccaggcatgtgacggtgcacgcctataattccgcactcctacttaggaaggtgaggtgggaggatcgctggaaccgggaggcagaggttgcaatgagccaagatggcactgtattccatcctggaagacagggtgagactctattaaaaaataataaataaataaaaataaatagttaaaatgatatttcagtgtaattttagtaacacagaaaactcgatatatttattacaactcaaagttataataataagaataaaactacattgtcaaggcaccctatgaattaagaattaaaacggtcattagttaagcagcagaacgcttaaggagaagtcaatgaataatgagatttactgcactttgggagggcctagctctttccgcccattgaatagacattaccattggggtcactctacttactataagtgcttactatcgtatgcagtggctgaggttttggctgtggcgatcaatcctctactgttggataagggataggtgaaatcacttcacaggtcacagtaatgaatttttcactgtctgggacactatcagttaaatcatatcatggctacttataggcgtattgatttgagagctaagacaactgcaattggatagggtgactcaaaagccttcaacttttgacaccctgcttgtgctgatttttaacatgatagagtgaccccttaagattgcaacttcccttcctccatactcaataacatttactctaccctccaaagagaaggatgacttgaaatcattccaagaatgagttccttgatttatttgagaatccatattggagattaatcagctccaagtttggtgaactccctaactggcttctggccccatacttcaatttcagtttatatttagttgttactcaatggaaagccttacctcacagaaaatttattctgctttctgcaagcattgtttaaaaagtcttttttccttctatttttctgttgctcccttctaatgccatttctcatccttcatattttgcgtaaattttggagcacaaagcataatcatgaataaaataatctctattgaagcaatgattatttgcttaagagatgtttatctagttggagaagaatgaaaaccaacaaaagccagaaaattcatgggtttttaaaacaatttgcttttgttaaaaggggaaatatctactgatgtgagaatttgaaattctaagagactaaaaaaaaaaaaaatctaaatagtctttgttcctgtaagtccatggatagttgagaattgaccatatcgtgggggagacaatcattttgtgtatatagatgtatctcagtgccttacttttctttgtgaaatgaacaaaaaacaatgacaaaaatcaacaaaaccaacaaaatcaattattttttctaggatacattattatctggaccactagtcagttgttatagaccatttctgttatatcttatgccattatttactttctatctgacatttgtgtatatttttatcctacaataataaaaataacaataataatagtaaaaataatgatagaatattgtgtcatgtcagaatgtattggacttgatgtcagaagatttgaattgatataaaactgaatatgccacctcctagaagtgtgagtctacataaagtggccttacttttccaagcctcattttgaccctttgtgaaatggggctattctttctgcactgctcatttcatagagcagatatgaggatcacatttgataatagatgtaagtggggacctatcaaatactaaagtgtttttattcataaatatttttaatctgctattcttgagcagctttcctatttagtttgcttggttatttattcatttattcacatcttattttctaaggagttcgttaatttgatggaatctccatcatatattcgtgtgtgtatatatatagtgtgtgtatatatatatgtgtatatatacatgtatgtatatatgtgtatatatatatgtatatatacacatatatacatatatatgtatatatgtatcttcatttctctaaacatccataataaatgtgttaagctatgttccccaggttgatatgaattccaggtaattattcattctttgattattgactatcaagggaaagttgaaaaattgataagtccactttttttaatacttcctgaatacttgccattataaggattcagcatcctgataagtcactaggtttcttaaactagaaatataataaaattttaaatcttaccttggcagtcttcagaatgttggatgaatttaacccctctctatcttcttaatgaaatgaacttgtaggttagtgctggcagaataaatggagtgcaaaacaccccttctagttcattgatgaatattttatgtgagatagaacccaaaacctcattaaaaccccaatgtgttataactctgcctcatttttgatcaatcttatcattcagcacgaaggaggagacttcctaactgtacttttataaggtagcaagtggcaacgtttcataagacacatggatcttgtcatcttcatgtatttgtgatggattactgaaagcgttttcagtttctttccaagtaaaaaattaatcttatgaaactgaatttccaaagtcattgttaaatacagacataactcatttagccacaactcgttgaagacaatatcggttttcaaaattaattctggtaaaatcctacctaagcaagctctctagatctatctctatgttagtgtgtcatatattgacactaacaggatgcaaggaggtctcccatgacatttaaaaaaaactttattgatgtataatttacataccgtaaagtttacccatttaaaacatacaacgtactggttttcagtatattcgtagagttgtgcatctaccaccattatcaaattccagaacactttcagcactgcaaaagagaacctgtacccattcagcagtcattccccattttcccctctccctagcacctggcagccattaatctactttgtctctaacgatttgcctactatgaacatttcatattattggaatcatacaatatgtggccttttgaatctagctgctttaactgaacgtggtgctttcaagggtcattcttgcagtacatatcagtatttcattcttttgcatacctaaacagtattctcttatatggctatttcacattttgtttattcattccatgagttctttagtttcatcaaagtgttttgtggattcctcttcctactccccagaagagaacatttctggtggacaaattagccatatataatgactcatatatttatattaattgggagaaaggggctcattagtagataccatactgtgctggaaatggtcaaaatctaggtttcttttgtaggctttacttcccctgcctcttttattaaacgttgacttcctgcattccacactctgatgattgattgattgattgattgatattgtgtctcaagttatacattttctctgcataagtagatctctttgaactaacccctttctacctctcatcctgggtacatgtgagatgtcccaaccacactgaccttttcagtatcttgaatacaaaactgtttctcgttttggggtcttcacatatgctgttcccacttggggtgatttttcttagctaaccctttatcaggctttcgtttcagtttaaatgcccatatttcagagaggctctgaccatctcctactccccaactcagtctagattacatggcccctgctattcctttttaatagcactctacgcctttcctttctggaacttaacgtaaatttgttatcgtggatttgcttgtatgctctaaagtgtaaccttcactagaatgttggttccaagaaagctagacttttttttttttttttttttttttttttacctgttttgtcaactgctgtatcctcagcatctaaaacagtttctggcacagaataggcattcagtaaatatttgtagaacaaacatttgactttaattaccacctgtactctgatgactgcctacttggaatctctcccctagacatatctgatgctccattctggtatgggctgtcatcttgacatctctatgtgaatgttccacatgtacaccgaagtcagcagttctgaaactggactcattatctttcttcaccaactttgcttctacctgccctctttagtggaataaaaattcttcttactacctaagccagaaatctgagcatcatcttaaattcttttctttcttcagctattaatatggaactggtcataaggtccagttgattaagtgtcctaaacatttatttaatatgtttttatttccaccatcactatcttaattacttcttttctctctgttgtgctgttatgatatcctcctaacttgcctcaccccacccaagtcttatttaattcatacctcacaccgctgtgagctttctaaatctaatagttgaccatgtcaactgctttgttacgaagcctttggggattatttcttacaggtgagatcccaacttcattacttggcctgcaagccccaagcttctttggcttcagcaggagccatgttccagtcatgccaaactgcttttattccccgaaatatgctactttttaaaaactgtgtgccttttcccataaggtttccttcacccacaaagccctctttctcccatctacttaacaaacttatagtcatttttttaagattctgcccaaatgtcatatatttctcaaagatttggctaactaccctagaagagttaggtttccttccaccatgctcaacgacacctgtacttatctgaataatagcttgaaccctgtgaatttaatcatcatgatagcgatctgtaacactagacatgagcccttgaagggcaaaggctcttctctgctgacgtaggcttcagatgatggcagacttgtgtttaaatcctgattcttacttgcagtcccacagcttgggtgagacctttaactctaactgagaagatgtgtgtaaagagcctattatagtacctgacgtacaataagtatttacttaatgataattcttattcatattatttttaataatagaagtaacaacagtgtcctaggtgtgagacagcaactgacatttggtaacatttgttgaatcaatgattcaacaaaaattaactttgttgttggtgaatcatgatgaaaccatcatgcaataaaataggagtgaacataaacttatgaggtgatccagaaaacaggtgcacaaatatacgacaacaggggttttagcctagagtggctggagagagggctgggtgacttggactttgcttcccctcaacttgctgaaggccagatctgaaaatctgaaagaattcatacaagaatccaggactccaaagattgtgcttgaaatagtcgcggacagatcccagaaatctgtgctttgaacaggcactccacgtggttctgaggtaggaatggagatgagactaccttagagaccgtgaagtctctgcaacattctgtttgtagtattttctcttatcatcatttgcctttgtacttttttgtattcatgaattgggatgatgctcaaagatccaataaagaagtttattggcacactctttccagcagtcacttgaagtctgggagccaaataatgcagggaagttagtttttattgcttactcagccccagcagcacaaacaatcaaaagtccaatctagaatctgttttcatctgacttctgagcccatttttgcagatgcagaagtttgcattcttgagatcgctggtttcctttttctattttatgaggcttttctgaagcctaactagtaatatctccccaacattttaaactctttagagaaaaagttttcataaataaatataggatcagtcatggtggtgattaggtgatttctgcagtaatgcaggacaagggaaaaactttctggagtttgtctcagatgaagtaaatcaacttgctgtgttcagtgggttacttttggagaacatgatatgctctagggcccacatgttaccttgttctccaaaaatagcatttcctactcattaagcaaattaattctttgtctttcagaagataaataatttacagattcttcctagattctaaacctcatagtcagtcatgatagtctgttttatcttatattcatataaagttaaaattaaacattattagaaactttgtagtttacagaaaccatgttccagagagaggaaatggtttgctcaagatcacacagtaaattggtggcaaaaacagtctcagcctctggttcttagctctgcattcagtggccaataaaaataataagaatattctccatacctatattagtcagggttctccagagaaacggaaccgataggattgtgtatgtgtgtgtgtgtatatatattaatatctatgtagaaagtaatggtaaaaaccacaattacttttgcgtcaac

SEQ ID NO: 2741 - DNA, 821 bp, Homo sapiens
ggggagggagcgggcaccaacatcctggactctggagcctggcatgagagcagtgccattcctaggttatagatgagctaaattagctgtgacgctcattagcggcagctcctaattagtgaaaattaatattggctttgataaagacgtcggcgccagctctccaaggcagaggcattatcatccttgtcagctgggctaacgactggacgagaaaaattgaggctcagagaggttgaggaacttgccctgggacctctggataccaggatttgggcccaggcagcctgactcaagagccatgatcctgactttggtattatcctgcccttcccttcaacctcacccccaaaaggggcactctggatgccagccccatcgtataccagcacgtaacatcatatccggcacacaaacctgtacttccatttacagcccctgagtaagtccaggacaaagtctccaggctctgtattccagaacaccgcctctccagtagggaagactccgggagcatcctgccttcccaggcgggaatggaggccaggaggctttgcccagaccttgactgtgctattgccaagtgaccagctctggggcctggctcctctgccacttgggagaggactcggcagatgggcttcccttcaccccagtccctgctccccagccagagaccctgagttccagcccagggtaatgaggggaagtaacagatacacctacttttaatccaaataaaggaaaaatgtttgccaccatggagtttataaaaataacaatgcattattcgggtattaataacaataaagatgtcaaac

SEQ ID NO: 2742 - DNA, 8299 bp, Homo sapiens
gttgacaaatagacaaaatggaaataatgaataggaattttatttcatgtggatacacgaagagaaagttgctcattttcttgaagatgttgcatttcaccacacctcatgaaggctaaacaagggaattgatctaggtagaagtctatctgaaatgctccaaaaataatcagtcccaagaaaaaccagtgctgagcattgagacagatgcaaagcaagttgagagcatatacccctacctgaaagtcactgagctgtttagctctgaataattggcagcagtgagtgatgtagcttttatttataattatgctagaaaccaacttgtgaaatctgattgcagtttcttgccttttaatttatttggttcttagcccctgggaatgttaggaggaggtagaagatgagaggctattaaatggtcactttgtaaaagtatcctctgtccctcatctttcactgtctcttcctcatcctgctttaactctcagaattcctcgcacttctgtgtttctggaagaaccatctatgcctcaatttttttcacacacctgattattttctgaatgggtagcaggacatttgtgcccatgcgtgtgagttgccatggtttcctctttctgcagatcctagagcctctgtcttcccttcttgtcagcatttccattaaccattattaggccaacccaagtatagcaccagccatcctgagagaaccacaacccgggcattaacgtcagggtctgcgcccgggctacatggccttctctgtgcaggctggggctggttctgtgagttaccccctctgtctgacaagctgtatttagttatggggtgacaggcagctgatggggtttccaaactgaaccttgcagcacttgattcagatagctaaagtactgttttgaatgctatttttcctgtaattttaaatttcatgttggtgagtaaatatgaccacttttctccaaaccaagggatggttttgctgcagcattgccatgcatgagcagccagcccacccagggaggcctcagagcaggatctggtggtggccctgaagctgtgcagcccttccccgggggatgatgccacaggtgctctgtgctttccaggtgggggtggattcagaacccagtggtgggaatccagacagcgtggcatggtttccagccaccctgcagagctttctttattccctaaccctatagtgatacagttctacctttctgcggctcatatctatatatcaacagatatatataattttatatatatgtgtgtgtgtatatatatacatgcttttttttgttgttttatctgtgaagagaaccagttgaaagcagttaattttgaccctgttcctttggttcctgggaaccttggatgagctcccagtgtttgagcctgagtctgtgtggggtgggggaggggaaggcagggcagctactaaaaatctcctggagttgtacgcaagaagccacgttggtgcccgtgtctttctggggacaggatccttctcttgtatcacatcttcaaagaggtttctcacccataaaagctgaccctgagctcttgacaggctcttggtccctccttccccttctctcctcccccgttctatgtgctgagcttggtcttccacgttccattctctcagccggggcagtgacaagcaggcgaagctaatgaggtttgtcctctagcttacctgtcttaaggccaccaatggtagagtccctcatcatcccagtcaaatgtcagaaaagccaaaatcgagctgcattaaagaagaggggctgaccaggagcagtggctcacacctgtaatcccagtactttgggaggccaagatgggtgggtcacttgaggccaggagttcaagaccagcctggccaacatggtgaaaccccttctctactaaaaatacaaaaatgagctgggtgtggtggtgcatgcctgtaatcccagctgtttgggaggctgaggcatgggaatcgcttgaacccaggaggcggaggttgtagtgagcgaagatcatgccactgcactccagcctgggtggcggagcaagactctctcaaaatgaatagattagatagataggatagatagatagatagatagatagatagatagatagatacatacatacatacatacatacatacatacatacgtagagagtgggggaatatggaatgtccaagcccaacgttccttacctccagaagagagagaatcctgaggtgctcatgtggagaaacactggccccctgtttgcttctgattttaaccttgtggttgccgtgtctcctgtaacacagtgcagaggaacacctcctctaaattgtgatttctcagatggatgggccccgttgggcagattgtgtttaggactttgtaaccaagactgtcactagtgggtggggtggcctggtgcggtctagctcagtaggggaaaagggcagccaccatttccacacctcagcacacacctccatgaaagccaggggctaatgtcccagagccaggccatccgcccacttacccctgtgtgggcagcccttggcctgctagcctatgaagcctcagggcagaactatggctgttaaaaaaggaaaagcattgcctttggctttgttgttgcaccttagtaccacttcctggtcattttcctgtcaccaccactcctgcctaaaccaagagcaggggaggcatgactaccatttcattccttcctttatggaacttgcttaggctgcctgtgtgagcagccctggaggatgggcttctcaaagcttttctccaaaaatttccatcaacggtgctgagcatggatacctctgtcagcagcaaaactgtttagctgggttcagccgggcgcggtggctcacgcctgtaatcccagcactttgggaggccgaggcaggcggatcacaaggtcaggagatcgagaccgtcctggcgaacacggtgaaaccccgtctctactaaaaatacaaaaaaaaaaaaaaaaacaaaattagccgggcatggtggcgagcgccggtagtcccagctactcgagaggctgaggcaggagaatggcatgaacctgaggggcggagcttgcagtgagaggagatcgcgccactgtactccagcctgggcgacagagcgagattccatctcaaaaaaaaaataaaaacaacaaaaaaaaagactgtgtagctgggttcaagcatagttcaatggcattccttaggttctgttttaaaacagcagtcatataaacacatttactactgcaaaattgagtccctgtgattcatagttttcagggcctaagggtagagggttgtggccctgtaggaggctggcagctccatctgtaaggccggaagctttgcgggggtggagtgatggctgccagtggcttcttagtagtgctgggttggccagcagtgagtaactgacccaacaccttctgtcttaagcattcaggtagaactggaagccgaggcggaaaagatgcgggtgtcccagcaagaattactttctgttgatgaatctgtttacactccagactctgatgtggccgcaccacagatcaacaggaacctcatccagaaggctggttaccttaatcttagaaagtgagaacgccaccgtctgcctctttttctgaaatccgttttccctaagaggtggctgaaaagcaatcttacgtgcctcattaaagtcagagggaggtgggtgggtgagactgggaagaactcccatcacagcagccctcccacttgcaacacaggaaacctctggggcccaggcgccaaactgcactaagagatggggctggaaacgagtcctctaagagcctggtgctgtggactctggtcactgtggccatgtgcaaacagaccactcttaactgttgccgtcctggaccactgacagtttttatcccctcatgccacttcccccacaccagctggcagatgagagccatgtgctggagacctacctgcaaggccagaggcaaggtcaggaggcttttagagtcagttcgattcatactgattgagtcacacatttaccactcaggtctttaagtgtccgttttgaatggaagggatgatcaggtttaagtatttctgtgagcagagaggatattgtcatggtgtggtgtgaaaagcactgactttggaatcagacatcccagctgggctgagccttgatctcttcatctgtaaaatggagctgataactgcacctgctttacgaagttagattgaatgtggtcatccctcccaggcagtgagcactcagatgtcagccgttgccatttggggaaattattggggcaggaaacccagtgcctttggacatagttgctactcagtaaatactgagccaagtaaatgtgtttgataacccccagtggagggtccatggagaggaactgccagctgttaccaggctggagtacctctaaggtctgtgaacttgcagcgatcacaagctaaatgtcccctgtagttctgcagatgtagaaaacctaccgggttctgtcgttatttgccaggaactagattttccttttgtaagctgcccacaaaacaagaatgaccttcaattacagcaaaatccagtctgttgagagcctcctaggactatggggtgggtgctgtgggctaaggcaaccctgactagattcagagcagctcagctccaggtgtcagagaaatgattctccaggtgttcagtccttaatggtgtcggactcattctagttgcatctcctggtttagtagtcagcatgtggctgtggtgcggggagtcggccctgggactggtgtctcccttggaagcagagcccatgatctcccagatcattccagctaaattgtacccttctgctgctctttccacttgaatgggcagttttgctttaacgatataaagaaacacattatttctaaaatgccaccagtacccataacgaggtagcaagacttggaggtggccgctggtgctttctggtactaatgggctttttaaaacacaactcacagcaaaacagggctggtcaccaccacctgggagaggctttatttcttcacccaaggcgggaatctcatgtgtcagcccaggggagccgtggctggaggtttgatccaggacctggacaactgctcagtgatggccgtggattgcgaagaccggcgctactgcttccagatcaccacgcccaatggaaaatcgtatgtttcacgcgttttatttgggaggagaatgagtatagtggttccacccgttccaagggcctcctagttcattcctatgtgccagccctctgtgggagaggccccaatctgggtattgttgacctttcaggaggatgattttctgctctctttaaacaagcccgcatgacccataagggatccagcctgccttatcccatatggagataagtgagggtttgtctgtggctttggagaagagatgacctacgtgtgtgagacagcaacagaagtcgtgcttgttagcatagattctcagagagagaaggctgtggctactcctagcctgttgtaaagaagcatttgtgtttggattgcagcaggggagagtaactattttggtaaggacgaccttcctgagaaggccatttttccagcagaagcaggagttgtgagaagtgtactccactgcagcagcatcgtcggctgccaggctgttcccacatgtcctgtgtacctgaggggccccaaagaggtggtactttaccaatccgcaggctgtggccattcacagtagatcccatcccagtgggatcccctctcagagtggtggtttttaaactgctccaaggagttcagggtcccatggaggggcttcagggtcccatggaggggcttcagggttcacctgcctggggagaggagtggccctgcccgtcatcagagccgctcttctcacactgcattctattaagatttgacctgaacagcaggggtaggggtggggacggcattgggatgatgtctctcctcccagcttggcagagcagctttagacctcatccttcctgctttggtgatgggaaatgacctgggaatggagattcctggatgctcatcatggtcctttgcagttacctcctctgggcctcactttcctcagatataaaatagggataagatctatgttactccatctgccacagatgagaggaacaagggaactggcagatgtggggtctctttaaaaagttaaagcctcggctgggtacagtggctcacgcctataatcccagcactttgggaggccgaggcaggtggatcccctgaggttgggagtttgagatcagcatgaccaacatggagaaaccccgtctctactggaaatacaaaattggccgggcacgttagtggtggcgcatgcctgtaatcccagctactcaggaggctgaggcaggagaatcgcttgaacctgggaggcggaggttgtggtgagccgagatcacaccattgcactccagcctggtgcaacaagagcaaaactccatcaaaaaaaaaaaaaaaaaaaaaaaaaaaagagttaacgcctccacaaaggtagggcagtattactgttaccttattcccgggcctccatacgcagcagacttttcagttctgggaaaggagtgaatgggctgccaagtccttctttgggcatggtttgaggagtggctgggcttggagtcctggtcatcttggatcattagaggaggtcaacaggtggatctcactgtacaaacacagatttgggctagaagatccgagtcccgccttctcatttcatagatgaacatgctgaggcccagggaaacggccatgtttgtccaagatcacatagtgaatcagggcagagccagacctacaagcccattttcttttttctttttcttttttttttttttgtttgagatagggccttgccctatcacccaggctggagtgcagtggcacagtcaccactcactgcagcctcagcctcctgggctcgatcgatcctcccacttcagcctctctagtagctaggactacaggcacacgccaccacgcccagctaatttttgtattttttgtagagagggggtttcaccatgttgcccaggctggtctcgaactcctgggctcaagccatcctcctgcctcaccttcccaaaatgctgggactgcaggcatgagccactgcacctggccctggaaccccattttctttccctctcatcatgctgccttcatggcacttttcctcccacaccccagctaagttcagtttatgtagagaaattcccagtcactgagatcagggaagcacttaattacttagacacttttgtttcaggggaataatcctccaggctgagagcagaaaggaaaatgaagaggtaaaaattttgtttgtcatatttctttcctaacgtggtgggtgactttgggattcagtgttcttttttaatgtcctctacagtggatatgtgcaataaacaacatctccagacagatctacctgaccgacaaccctgaggtaattatcagccaccggcatctcagcccttttctcaacctggaaggtaagcgtccacctcctgggactgagtgtgtcttcctgtggatttttaggcagtcgcgatcaagttgaatcagaccgctctgcaagcagtgactcccattacaagttttggaaaaaaacaagaaagctcatgccccagccagaacctgaaaaattcagagatggaaaatgaaaatgacaagattgttcccaaagcaacagccagtctacctgaagcagaggagctgatcgcgcctggaacgccgattcaattcgatattgtgcttcctgctacagaattccttgatcagaacagagggagcaggcgtaccaacccttttggtgaaactgaggatgaatcatttccagaagcagaaggtaagtgactagtttggtgtccttattctttcctctgcacaaaatgacaacggccattgaaataagatgtgaaatcatgttttagagagctatgattaggagtatgaattaagatttgttgttctgaaagtttagtaagatatctgcagtggaggcaagtcttggataaaaactgaggggtagctgaaagaccacctacagctatttcaccattagccatagcgtttttgtagcatagcatagaaatgttgtgaaatctgaatctgttatcacattcaaatgcagtcttggtgaactggaaatacgctgtgtcattttagaaaaccaaaagc

SEQ ID NO: 2743 - DNA, 1729 bp, Homo sapiens
gtaagacagtctcagcagcataaagaaagctgtctagaaatacagaggagggagagattgttctggctgactgtagggctagagaacagaaatagaatcagaaaagaggacgagatctgtggcatgtgagggtgagggcatttacatcagtccaaatggatgaagaggagattccagtctagcacagcatggccagtcagagtagaagggaggccccagcatgtggggaagctgcaattaactttttaccaaaacctacccctggtgaggcagaacagagagaaataataccaaaagccacccaactgaaaaggtcttcttgacttcctggactatgatgaacggtcgtcttgagaagaccccctacaccaaatgcgcgtatcggaacctactcactcagaacagcatgggttagttccacttactggtttaagaaagctcaacgggcagaggaaaaataaaagctgctgtctccctaaaagcctcactataatacctgtagggtattacatagctgtgactggatttaatcagttaaggtcataatcattagcattcattagtgtcttttgaagtcttaaggaggtccagggagattcagatcctgaagtgattttgttttggctgttgcctgctgggaaaccaagataagagcctccagagaccgcaaatacaatagaggttcacagtggaaggattcttggctgaatctgttcagtaaggttagtcttgccttccagagagcctttgactggtaaggatgtctgagtgttattcctccactgagctcttactgcgtacctagggcaagttgttcccccttttagacttggttttctcatggataaaattgatataatgatagcaaggctaagactttgtggaggaggttttatgtatttatcatagtgcaacatgaaagtgagtgcttgattgtgtgtatgtgtctggagagcatgcatcacaagtgaaaaaacatctaaaaactgagatacgtttgtcttttcttttagtccattatctccaaatgacagactagactgacatcacagacacacattcaatgagctgtttgcaatcacagtcttcatctcttggaaacattcgtactggtttcatttcaaaggcagtgctgtctaaaggctatgaagtatcttattggaaagctccagtaaacagtatcttatttcactgagaatttctggaaagttacttcagaatttttcaagatggtacaggacaatcctgctctactcaaaagaagcaaagggtaatttagtagctgtggggtgaaattaaatcatgttgccaaaacagtgtgaagaatcttgctgaggactttaatggtatcattctcaatttcatgaaagctaagtacaacctagggtttctgatgcactctcttaccacacagttctttcatttaatgtttaatctttaccgccgctttgatgtatggatttgtttattttgtaattattttgtttaagacactctatgattatttcactgttgtgcccattcttgcaatccgtggggttttaaaaaatctacctatcgcaggcaatctctagggccattctgccaaaagaaaatagtaggattaaaatcccacacacatgcaagaagcagctaggaatatagtggagtcaatttaaatatatactaaacacaggacaaatgcatcaagtagaatgcagacgtgattccattccaattccaggcttct

SEQ ID NO: 2744 - DNA, 4557 bp, Homo sapiens
gattcactgggttatttactgatttgtggacttaccacatactcagaggccaagccctgtgctggctgcagtgatgttgagatggatcagccctgcctgtgaactcagtggaggaggcacggggatgtgaaaaaggccagagaagtgtgccacagcggggtgcaccgatgccaggaggggcaaggacagctgaggacgactgaacctgtgggcatgaggcaggaacgacagagcagggcatgccaggcagcaggcaccatgtgcaaaggcatggcagagcagagcttgttgggcaccagggcacaggctgcccagcacttggcccttgtccaatggggaaatggagtccttgtctccgcaggctccatctatgagatctctgggaatgagtgctgcctctccacgggggacctgatcaaggtcacccaggtccgcctccagaaggtggtctgtgagaacccgaagaccagccagaccatggagctcgcccccaacttccaggcggctgagtgaccaggctggggaggatgaggaggaagagtgcaaagaggaggcagagagcccagagcgggtcctgctgcccttccacttccctggcagtttcgtggaggagatgagtgacagccggcgctacagcctggcagatctgactgcccagttttcactgccttgtgaggtcaaggtggtggccaaggacaccagccaccccactgaccctctgacctccttcctgggcctgcggctggaggagaagatcacagagccattcttggtggtgagcctagactctgagcctgggatgtgctttgagatccctccccggtggctggacctgactgttgtgaaggccaaggggcagccagacttgccagaggggtctctccccatagccacagtggaggagctgacagacaccttctattatcgtcttcggaagttaccagcctgtgagatccaagcccccccacccaggccccctaaaaatcagggcctcagcaagcagaggagacacagcagtgagggaggcgtcaaggtactagtataatcccagagggcacggaggggtcacctattgggatcactgcttctttgtcatgtctgcctgtcatgtttctcttgcaactgtgtaaacttgtagtttataaacttgcacactttgcacccattattctcattccacctcacaattaatcctgaggttggcatgattatcagtatcttatgattgagaaaacaaggacttggagaccctaagacttgcccagggtccctgttaataagtgggaggactgaacttggccatggacagtctaactccaagttcatggtgctttcctctctccactactgctgccttcactccctagttcgagcctcatcatttttctcctaaactacttcagcaggctcttacaaaagctgtcagaaaggcctcctaactcctttcttagtcattgatggacctcagctccatcttctggaaccttctgtggctgcccatcatcatgggatgatgcaaaccccttaacatggcatccagggtcctttataagctgacttgtcgcacctccccgacccatcttcctccactcactctgctgtccacgctccagcgagagaaatgcccgcagctccctcatggcgccgggactcctgctccagagccccacacccaggccttctgccagcagtgttcttcctccttcaggctcacaggcaaggtgggactcggatttctcactcagcagcggtggtcctgcctcctcttctgtgctcccactgcacgctctacgtagctcaggacaggttgtttttagtgagtcctacctgagtctctggctgaaaagagttctgtcggggcagggaccttacctgctccaaggccagagaggacctgctaaacggggccaaacagaatcacagatgagcgggagagagccaggcatggggtcagaaagactaagtttacgttccggttcacttactctgcctgtgctgggtactcctccgagcgtcctttttctcaccagtagacctgtgatatcctctgcagctgctttctgtgacctgcttactctgtggcaggcccctgatatgctttgtcccaaccaattctcacagtgcttctgagttacacaccggtgtcctgcttcacagttgagaaggtgagaggcacagagaggtcaaatagtttacctgagatcacacagccaacaagtggcagggccagagcttgcaattgggtctgaccacacagcctgagcttctaactaccgtggtctgctgagaacgggaggggatgagacagatcaaaagtcctttactatccccagctcttgttttgggatcttgggtgactcgtatttaatcacgtgtggtaggcagcaggtggcagtggaaattacaagatgactcctgagtggtctcagccccagcaggggcttttatctgtggcgtgagcgtgggaagtcattttctgacaatggctggactgaaacatccgaaacacaggccttgtgccagtgctgaaaagggtactttccagaaccgacagaccttagcccgtgtcttggctcccagtggagggactctgggcccggtcactgctgtcgccctggaaccacaacttttcccctctgtgcgttggaatcttggtgctgatcagggagctgtgccgcacactctgtaaagcgtggtggggcgccaagacctctgcctctacaggtcacaggcgtggctctgggtccaaaccttggccctgctgtggatccccgtgtgacctttgacaaggcacactttctctcctacataaactgggaattgaaaccactcagagggtaacttgaggattaaagagcagacgtcatgtagcatctggcacatgggggaacgcaatggaagtcctctttcttctgggccacctcagctcaggcgtcgtcacaaggctttgtggctcctttcttacggtatccccactttgcttttttccccttcagcaagagaattaaaggacattgaccaaattcctaagtggaaaatcccaggaacaccctgtctccaacccccaaccctatcctcattttctaccctgatccctttctcccttgccagagaatatttcacatgcatgtagcaaaaacaccaggggtcttgagaggtcatagcctgaaaaggaagtagagagagaagcagaggaagtgacacttaacgtgaatgaccgtttttcatggactctgcttccccatttcttgagaccctgatgatttctgctttttctcccaaagtcttctcaagtcttaggattgcagcaacacgctcggctgcccaaacccaaggcgaagaccttgccagagttcatcaaggatggctccagtacgtacagcaagattcctgcccacaggaagggccacaggcccgctaagccccaaaggcaggatctagatgatgatgaacatgattatgaagaaatacttgagcaatttcagaaaaccatctaagtgctggaggaaccacgcttcctaactgctgcttctcagggaatccgacaccagccaaccattttaagcctctaaaagacctcgggcaagtctcacagaaactgagctgcagacggggagtagctttgtggaaactgatttgatggacactgcaccagcttccttcaggttctagattcttgctacttagggcgggctggtttggacctaacatctcgcacgtgactccctcagcctcagagccttgggatgcagagcagctggcagggttcctctcaatcctgcaaccccagctgtcccaccggtggatgcagaggggaatccgaggccatcaaccttggtgacagcagcgcagtgccaatgctgatcacactgcatgggagattttgttaacgtctgccacccccactctcacccccaagctctaagcccccgggaggcctggactgtcttcctcatctctgtagcaccaagcctgatagatctgtatatggtaaacaggggtttaaccacatgtggttaacatggattaatgtgggaacttggcttcaagaacacaaccttaggaccttgggccccaaaagctggtggtgaaatgaggaggagccaatttaagaagacccttatggagacctgaggctgcagaaactggtaggtttcatcaggtggttaaagtcgtcaaagttgtaagtgactaaccaagattatttcattttaaaaccatagaataaaaatgacacctgagcttctctatgaatgagaacggtatcatttattaaattctgactgcgtgccaggcacttacaaaccatatccaaatcctcaactttccagaatgcctgattttaaagattagggaacaggctgcatggtcaagtaccttaggacgctgacaagttgcagttaagggtgaggacctggaaagtatgagactgggttaggatcccagcttgctacctaccagccagggctatgagcaagttattttaacctaagtttcagttttttgacatgtcagatgaaactatagttactaccccagaagactgactgttttaag

SEQ ID NO: 2745 - DNA, 928 bp, Homo sapiens
gtgaggggcatgggaaggttaagactccttaggagggtctaacaatgctcagctccagttggcaatgactaaaccagaggacttctaaagacacctccaaccttcccctttgtgatttctagtctgtgtcatacataactaatggccaaaattcagagtaaaaatttttcagtgattcatgtaacgagctcatccagccagacatggtggctcatacctgtagcccaagctattgggaggttgaagtggggaaattggttgagcccaggagtttgaagctgcagtgagtcatgactgcaccattgtactccagcctgggcaacagagtgagaccctatctcttaagaaaaaaaaagaatcaaaaaaatctcatccagcccaaagcactcaatagtagagtacctcttttgccacatgtagtggattttattggttcttttgtgggatgcatttaccagattaccctactcctacctctaactcttccattaggatagcaaaccaaacagaagagggctgtcattaataacgttctacttaataggcacttgatgaacatcttccacatttggtgtaaattccattcaccctgcgagccacccatatcctgtctatctgaccgttgggaaattgattttgttatttttgcttctccctggaggactgcacaaagttttaagacaggcttggcatgagccacagcacccagcccagagaaacctctttatgtcccatgagcattagagcagtacccagaaccatgtaaggtactagcagtggtaaatgcctggcaggctctttgctcatcttcctcctaagccaggaacaggcatcagccctcacccagagcacttggatctccccacgtgtgctaagatcccttcgcagcatggagcttcatgcagcaaggccgatgacataagctggc

SEQ ID NO: 2746 - DNA, 16948 bp, Homo sapiens
tgaggagtgaagagaccgtgtttacagtcaccagcaggctgcgtaaagaagtggcccagtgagacagggaaagtgacccagaaaatttagttttgttcagaatgaaagctgctgtatttcatttttgtttcttaatttgacggagtaggaacgttattttccttctctgtcattgagaccagtagcatttctatgttacaaactgaagatatttggggtctcgtcggcttgggattatcaatgcttgggagtgtgagtgaagacactcaggatggctcaaggatccggggatcaaagagcagtgggggttgctgacccagaggagagttctccaaacatgatcgtttactgcaaagtttctcaaagggctgaactgactcaaatatactggggactccctctgctcctcacacctgcccaggagggttacttctcaaggtcttgtgccagccattagtgttgtccactcaaactgctcaggaagcgtggtaagcacggtcagttgtgtcagcatttgcacaaagtcagtgacttacggtgcttccttgtggaggagttctctatccaatggtgccaggcttggccatgtgacttgctttggtcaataaaatgtgagcagatgtgatatgactatccacatccgtgcttaggctgtaagagccatcatgtgactcagccatgctcttctctctgccatgagaatggcatattaccataggaaatagtccttcagcctgtggagatagggcaaaacagagccacggcccacctgccactggcatgtaaggtgagtaggaaataaagctttctttgtagtgtacacccctgtgattggaaggttatttgttactgctgcataacttagtgaaagacaacttatatagtaggccagagacctgccaactttttcttaaagaccagatagtaaatattttaggcttgtgggccatttacagtctgtcatagctactcaattctatggcaaaagcagctattgacaatatataaacaaataggtatggctatgtgccaataaaactttatttacaaacacaggtctttggcttgtgggctgtagtttgcccacccctgccataggattttgcttcctcacctccttgaagttggatgtggccagtgaagttgggtgtggcacttgctttgcctagtggaatgcaagctatttaaagaagtggtgtaagtggtggctactctgtcagtctgagtcttgagagataccattagagagctgagcatcggccaacctatgctggacattcagcataactaagaaataaaccttattgtttaaaaccactaagatgtatggggtgtttgttactgcagcatatataactgcgcctatctgtactgatacaggtctatctggcattacgtttcggggcaccacctctgctcactgccatcccagggcacctcacgtggcattctttgttactgacttctttataatgtttgcgttgtagaccacgatgacagaatttacttaacgatgatgttttgattatcatgcaagtgtgggggaggattgttctgttgaaacagcgtgactgcaaatattttaccaatagatcagtgaaattcacgtgcccttgaacattttcaaaggtatgaaatcacctgaaataattttttagttcattttttagtggctaaaatctgttaatagtttgattcacaagcctggcctttgaaaaagtaaaaattggataatgctgcacaagccatgttctccctggtgtgtaagggttaattattggactcttgcttgatgatgacagtgcaggttcattgaagtcatcactttatatcaccagcctgtctgcagcactgttggggccacgcctcttgtgcgatggttggctcagacctgtagcttcctttgccttatcccctttcacattgaagcctcatctgctgcttgacagtgcatgcctgagagttgcttttccacagtccctgttcttctcctaggtctggttaattgcttctctgttaaacagagaacatgttgaacagcagccttaaattattgtccaattttagcctactgggaacccctctgcagctactctgatcaccactgatatttctagaaagttcctattcacaggggactcttttctcccttctttatgctcaagggagaataaatcacagaagcagcaatccctccatgtgtcaaactatcaatcctacatggagctacaaaacaaaaggcagtatccctttgttgccagagaacatccagtccctgtacaagtctgtgcctcaggggctcaggctcattagcaccatagcagtggctcatgctttccatacacttttctctaccaacacctacagttagtctcagagttgttctttatcatgataggttacagagcagtgttttaaccatattaccttgactgaggtatggtgaggccagatgtggatcaagagaaagaaacagggatggattttatggttttgaggctcacagttccctggggagacacagcaggctgtgctgggccactcagcggaagcacagagtgaggcatgaggcagagggagatgggggatggtagggaagcagctttattgtcgtctccagggaaaggaaaaggaaaggcagggtatgcaggtttaggattggctaatttgaaaatgttcttggggctctggggcatagaggctgtccccggttgtctcatacctggccccagggtgatgaggtaggtccacggtggcctagggtgcaagagccacttaagggaagtggtgggagtttaaactacttggttgactcctcaagaaggggaactgactggcctctagctagggcctcaaaacagggtgaagacagtatagaataaaaaatatattacaactaggacagataccaacatactgggggtttgtacctaccacagttattccttacatttatgtttcattttgtctagtaatagtgaagtgaatggagttctagactgaagtctctgtttaggcagactctgaatttgttttctcattggttcccagagatggactgagatacctcagtcctgtggatacctcaggcaggcttaaaatgtggcacaaattctctttaactattcagttgatactttttcgtgagggcttcaaagaggctgattttctattgctaaaaattgcatacctctctatgttcaaagaaaataccatttactttatatatgaaagagcatttgcttatttggaaaacttttatttgcatttcacattttttatcacttcttactaaatagaagtttctcacattctctagggattgaactaagtgataacttagaaagaaagtattgttcaaatacccattttttggcttttatgttagtaaaatgtttcccctttttctagcttttctttgtgatttcagaaacgtgcaacttctttgaacgcatattaaatgtttttaaatttaaataatgaaccacttgcttttgttacagcccagtggttcttcttgcctgctgcacagacagagccaaggcactgagacagtagtgttgcagcgagaaagatttaattattgctaggcagtcaagtgacagaatgagaggcatttctcaaatccactgccccaagagctcagaggctagggtttttaaggataatatggcatgcagggggctagggaataggtgctgctgattggttaaagatgaaatcattgaggtcttcatgcactgagtcagtttctgggtaggagtcacaggaccagttgagtcagttccctggtgtgagtcatgggtccaggtagagtcagtcagtagccagaatgcaaaagtctgaaaaatatctcaaagaccaatcttaggttttacaatagtgatgttatctataggagcaatttgggggcattaccaatcatgtgacctctggctagatggctcctgagcagtaagaaattatagaaaagcaagctaggggacaatggttggttatcatttagttactcctacattttagcagaattcaggcccctcccataattctaaccttgtcgcttttcattagttttacaagggtggttttcagtccctaaacaaggagggggttagttttgggaaagggctattatcatccttgctttaaaattaaactgtaaactaaattcctcccatagttaggttggcctatatccagaagagttagcttgggaggttagaagcagaatggagtgagctattttgctgactagctttctgtcattgtcataatttttagaaaggtggtctcactcttagtaaacagtagtatgctatgctttactcagttgtataatttcatttgaattcaacaaataactacagacagctgtcaacttagtgatgttgagattggggctaggcctgcagtaatcctctgaaatatgtatgtgcaccccaaaaacatgtcattgagatgggtagacacctgcaagaggagtgcttttaaaacgtttttacatgaagatgctttctacttcagtgagacttttgccagtggtgttagaagttgctgtgaaaaccaagataaggagccactgtgtttttgatttgttctagggatttaatatccctcatagttaatcactcaggcaattactgggttaacaatatgtcctgaagaagagtagtttttgagccatgttctttgaatcactaagattcttcaaaactgctttagagtttcccatgaacatttggatcacattaaagcaggctcattatttccatcttcatgtccatgtaaatgaggttgagttcttcacttggttctcagctttagtgttgttagtatatagaaatgcacctgattttttatgttaattttgtatcctgaagcttcattgcagtcgtttatcaggtctaggagtcttttgcaggaatcttttgggtttctctaagtataagagcatgtcactggggaccccaaaagtgaggaaggtgggagagaagtgagggttaaaaaattctctattgggtacaatgttcactatttatgtgatgtgttcactagaagcccaaaccttaccattatgcaatatacccatgtaacaaacctgtacacatactttctgaatctaatataaaataacaaagaaaaaaataacaaaaagtaggctcgttagtaagacaatagctgaggagccctgaggattggtcaccttctagcagagagaggaagggccaagctgatttacaacagtcctgatcaaagaagggtgacctgtccagggcaagtccacaagcctccccctctgtgtcatgaggccacagagcactggagttccatgaagtcaatggaaaagaagagttctactgcttaaacaagtttaaaaaccactgctctagcattgtttataagaaaagaaactaagaataaaaacaatactgaattcaaacagctaattccttaagacctgggaacattgtgtgttcttatgcagttataatttaatccaaatacattggaaccacaccataattcaattctaggtcaagagcagagttttgtatacagcagattcattttggagcactctctggggatttggttacagaaaaatccagaggatttatctgggctgtcttactcataaaactgcacaatggcctagattttagagatgacattacagtgaggtctcctccaggacatgctatggtatacaccactatacaccacttaatctttagagggctcatttgaatcacattatttatgtagtgtgtccacatgttagatttggccagattctcaaactggggtgtcagttccacgtctagcccattaatttgttgccattgtgaagacagtagacttgaatgccttcagaaggagcatgctgtactgcacaagtgcgaggggcctcattcctaaagtgatcacactgtgttttagggaattgtgcccctttacaatgctgtgactttgggtgacactctctagcttctatagtacccaagtctgggttgcgtctgaatttgaaatctctactatgagactgtattgtttgtttttaaagtcgatggagcacttgacttggagccagaagagaaagcttgggtcttcacgcttcttgattaattatcaagccagttaattttctagagcctctgtttattcatttgtcaaatgggacaaataatgtctgtttcacagggcttgttgtgaagattatactctgttgtgttatagaggtttaaagtggacctgtgggtttgtatgaaatacagcaaggtaacataaattaaaagtagatgagggataaaagcggggaaagggtctaaaatggggttaacaagttgtaccttttgtgcagatctatatgcttgctaggaatgagccacaaatttgcttctgtgccctctagcagccaaggagaaaatggaaaccttattttctttaatcatggtgtctacgagattgggaacacagtagggagtcatgaaaaatattccttttcctagtaacttaacagagagagaccaccctcaggggtctgcaaaagaggacattgcatggtacagcctatagtgtctgctacacagagaggttgcaaactggcagtccaccagtgtcaccatttgttgggatttttgttttgttttgtttaggcttgatgtctaaaaagtttgatccaacatttaaaagaatcagattttgcaaaaataacatttttaagttttctttcaaaatcagatgatcagttaatattgtaactatatatcaaaattaattggcactgtgtagcagcttttttttaatgtagcaatgatttcaggtttgccacagtctccaccattccctactgccttacttactacattttatttcctacttggcatttaggcatctgatttagtgactcctattctacagcatccttgtagtaggctcagcagtacgcttcataaggctgagaatccctgagaggattgattgatatgggaaaatgctggtactctgtacaatattgttctacaataaaaatgtagaattagaatattgaagttactgttagaactttgaaatcatgactgagggtttaaaaatgcttaatgagggccgggcgcggtggctcacgcctgtaatcccagcactttgggaggctgaggcgggtggatcacgaggtcaggagatcgacaccatcctggctaacatggtgaaacctcgtctctactaaaaatacaaaaaaaaaattagccaggcgcggtggcaggcgcctgtagtcccagctactcaggaggctgaggccggagaatggcgtgaacccgggaggcggagcttgcagtgagccgagatcgcgccactgcactccagcctgggtgacagagtgagactccgtctcaaaaaaaaaaaaaaaaaaaaagcttaatgaacgagagtctcaaatagctaattaaaacaacctcaacttccaaactaatctcctagcaagtagtttacccagagtatccattccaattgctctttaatcaaataaaaatttcagaatattttatttaaatatttacatagctatatattttcatcagaaaagagtatcacaggaaagacatgttttaagtatgcttttaactgtataaagtttgattgttaggctctatgatctggtgacaatagtcgttactgttagaggtgaatccttgtaaagttgttatttttgtcaaggtccactttggcttctagacttgttgagtttggtaagatgttttgagcgctgagttgctaattttccagaaatgtaatttgcaatgaagatgttggatggggctttcccaattatcagaaggaattctccaaagttgaaaatgagtgataattatctaatattctaaaacatgctgctagacatggatatagagtgtttaataaaagatgtcaaagttgtgttgtggccaccagccaccatcacagctctagccaacattagagatgactggtgatctaggaggagattgtggagggttatctcagtgaagagcctcataaagagtattggggaattttccctcccattgccgtggagagaagagatgagtgctcttaccctttccccaagccaagagagaagagctctgatctagagataggggttatggcaaccatgggagattggcatctcacttcccacttggatgcctgcggagctctctccaggcccatcagaatggagcacagcgatgattttagggatctgtgagcatatatacagatgcttccaacatacagtatttgatagatgcaaagttgctagagcagcctgtgaaagtgaggcaaagaaaaagatgttcagtggttgacaagctcaacttccaccatttggcagagaaagatgtgtacattttcgtggggccaagcaacatcaggaaaggtagagagtttgagcaattgttgctggttccttgtccagaggtggccttttgggttgaggcaacccagactgtgagaaccctgacatgtatgttgaagtagaagatgtgtgttttgggggaggggctcacaaaaggctggtcaaatggttcttccaccatgctagggaacttggaatagagggtccatgtgggcctctgaagaacctacaaatgcaccctgtgaaggtcccaggatgtgactgcctgccttgcacagctgactttggtagccaagagaattgaaaacagcacgacctgatgtaagaagatgttccgtttcctcaccactgatgtcacttccctgtgttaacctgagaagagctacggcacagagtgatggaggagagaatgaaagcagaggaggagggtaaaaggaaaggctacagtcccttccccactacaggtcatacaaaaggaggagggaaaagctttgagttggatatgagattgaagttttgatacgaaattactatacttttagtaagtgagtgagtcttagtttccataaataaggctattataagtgaaagtgatggaaaaatgatggggtcttcctgagctgtccagctgcagggaatggagatccactggaacaagtcaaagataataataatgagaaaaaaaaagattcttaaatccccaccattcaatgaaccagttaccaaacccacacgatacagagacattgagattccaatatgaatctctccacagaaggaggcaccttctcttgccatcttctgtgtattataaccatttttgggggggtttggtgcttcttgttcaaaattgaagtcttgtagccaaaagtcaaaatcatattcttctaaaattcacttgaaaaatatttccttttacagttgaattaaagcaaattacttggttaattaatgtcaaaggtgactctgttctagagataatttctgagtcatgatacctaatatttaaaaattatgttttgatttttatctttagtcatggtgatttcaaatgaggttattaaatcactgtaattcatgatttatataaaatatgaagacattaacctacaacatcttggattgctttttttttttaattgcattagtcactagtaccttctaacagttccagtttttggaaggcagcctctagtttcctattcagcctcatcatagctgttccttttggagagcggtggagaatacaggattgaaggtgaccctcacagcatgacaaattgtcaatctggctccctcagaaaccttatagggagtgtattagtcagctttggctgtcgtaagcaagtaccacagactgggtggcttaaacagcagaagtttattttctcacagttctggaggctggaaagtccaagatcaaggtggaggcctctcttcctggtttgcagaatcccaccttctcactgtgtcctcacgtggcctcttttctgtgcacttaagggagggagagagacagctgtctggcgtctcttcctcttcttctaaagacaccaatgctacctattagggcccatctcttatgaccatagttaacttccctaaagggcctatctctacatatattcacattggggattaaggtttcaacatataaatttgggggcctggggagaacacagttcagtccataacagagaggaagaaagagattcttaaaaagtgttctcttctgcaagttgacatttctgaaaaatatgtttattctccaaatttaagagacttttagaaccaattacctgtgaaattttcttttccaaatgaccgaaactcaactcaaactagctgaagcaaaagtggatattttttggctcacatagcagatggccaagggtcagatatgtcagccacagctggatccagggtcgatgtcatcaggtctttgtcctccccttgagctctgtgtccccccatgttggcccctcctcaggagggtccttttcctgtggtggcattgattacctggggcagctccaggctgatctggcccttagaatttgcagctttaaatggagagaaactgtctcccaagagtcaactctgactgcccccgcctgggttagggatacatattagcagcctggacccagggcctatctgggtggttatgggctggcattcccaacagctgggagaggaccaaatgaaagattccaggcagatcaaactgtaaggcatgtccacagtcttccccttctaagtttctgagctaaaacaacttatttgtcctttgtgacttgtataattgtataattgatagtccagagaaggtccaaattagttcatctttatatgtgtaagagattctatctaaaggtcatcagaacctttttgaaagtcaactgatgtcatgttggcctttgctggtgtttctctgcagactctccggacgacccagccttgtcaccacctggagatttggctccagcctggctaaccacaggctgttgacatgatggctgtggtctctctgcactcctcctccaacctcccccttctctatcctcttatgcatacctattgttgtggtctaaatgtatgtgtcccccccaaattcatatgttaaagtcctagcccccaaagtactagtattagaaagtaggtcttttgggagctgattaggtcatggaggcagggccctcatgattgggattagtgcccttatcaaagaggcttgagagaggtctctcacccctttcaccatgtgaggacacagaagacaccatccatctgtgaaccaagaagtgagccctcaccagacaccaaatctgccagcatcttgatcttggacttcccagtctccagaactgtgagaaacgaatgtctgttgtttatcagccacccagttggtggtattttgttatagcagcccaaatggactaatacacctaatgtcacccatctcatgtgaatgtaggtgctcatctcttgcctgaaattcttggggtcaagtgtgttctggaactcagtttctaatttcagaaaggccatatcgtatacacactgtttactgacacccttagcagagtctgggacagcacccagaaatccatctcattaacatttctgcagagaaacacgtgaacattcatactacgtaggataaagaaaatcaatagtagccttatatcagttcaggtcaggttttgtcaccaaacacattacgagaaaggtttgttctcagggcttttcgtaatttcagaattgtaaacaagggatcccgaatttatattttcttgtatgcattaagtgctacctttgttggactctcagcagctaggactggtctccataaaatttaaaacttaagaaacattttaacttaaagcactttaagcagcactttccaaagtttaaagtatgtaagtaaatctgtgtgagtagataactataaagaacaaactttcagccaatatcttcactttgagtggttactggggggcaaagaattagaaagccactatgtataaaattaaacatttttatttgttcatttctttaaagtacaacttattttccgggagaggaaagtactctcaccaaagaagatttttacagagagaaatcaggtcaacttgaaacttgtttgcaactctctatttgtaacaacctttgtggggttttcataaaaggattttccaagtcttttgtcttcaagaacataaattagaggacactcttaccaggagtacatgcagtttaagtacccaaaaataagtttgtttaccacttagaatcatggagttcaagagaattttcaagtttgcaatcctgggtctctcccagggacattgagagggcagaatcgattctagttttgctaatgcgcctgccaactggtgtcaccatttcccatcacgatatctcagttatcccatctgtcagctctaagagtctttgatgtatttcaacataccatgctttcaggaacctctcggtaccacgttctggtgcttggcagctgtccaggatgaatttgatgtacctctccctgatgcctgccaggagggagttggaggaggggcttaaaggattttctggtaaatccaaatgatcacatatgagctgttatcaatgtgggagaatggaattaggggatagtcttctcattagaattgtgaaaattcaggatggtggaaatactcagtatgaagattttcaggttggctaagtgtatgtgaaatgtcctaatttgaaaaacactttggatttgattgaattagtggtgttaaattagtggggtgtggtgggcatggtgacacggtgctgggcatccttgcatacatgacggatcagaaaaccagcaatccaggcaactctgtggccaatgcggcattttgggtccaagccccttgaccctgtgtctctctccttgcttcatgggaaatcctgccacctggctcagacacaggcctgggggttaaatggagcatgtgctgccaggtactggtcagtgccctcaagggtggagaagacctcttgggaaccacagacaggctgtagggttgtcgtgtttgtctgtttttaagtgacaggctgcttgatctcatcccattagtagtgacgttgctagaggtagagcttgcaaccacccccttcccattaactctaccatcaccacctgccgctaactactgacggctacccaatggccacaaggcacataatattcacggagagccaaagtggcttgcctgtgtcattacagtagctctccttgttaagagtctcttaaccatttccctccttcccacaccccactcttcacacatacatgtacatccctacctgagctagagccctgcttccatccactttcctggccttccccaagctgcctgtgcaaagcctcccttttctgctccctcagcctccggtttcttcctttttctatacctttccccaacaatttcagcctttattaaccttttccttctctaactatcagtcctatcgcttttttgggggggggggcgggaggcaggtgggaggtgtacagctcctcatacttgctgttctgtttatgtatgctctatagcaaactatccccaaatctaacggcttaacacagtaaactgtttccctatcatcactcatgattttgtggatcgggaattccagccggactcagctgggaaattcttttgctcctcgctgtattgaagggggtcgctggatactttcactgggcagatgggtgaactggaggtgattaagatggcttcacatgcctggcgccttggtgggatggctggaaggcatgttcagctgggtgtgtccactggggcttccacacatggtggtctcaaagtagtcagacctctttcaggtagctggcttccacaagagtgagcatttctagagaaaggaagtgtaagtggccaagcctcctaagcctgggcccaggatcctctctgctgtattcggtggttgcacagttatgccgtcctcccagtttttacctagcccccacctctctgtgtgttacaacaaagtctgccaccactattaatcttccacacgtgcctcctccattctcgaatgttcttgaagattatattgctttctccaaacctaaactgtctcataagtttttggcgcttaagacaagtttcaagaaataagaattgaaaagtgttggaggaaagaaagtttccatctctaaccactttctcagaagggcatcagggtttttgcagcaatgtggggatacctcttctgatctcatagcttagggctctgaactaaactgatggccttttctagatttcttcctaggggtgtcaggttggaagtgctgagggactgctctttctccccagggctcagctgtgtcaaggctaagaccaggagtggttcccacagccaggctgggtgagggcaagtttatcctgcggtgcagcacctcagaccagggtctagccaatggtggcctgcaggctgaccccagtccaccacctgtgagcagccaccaccacctgtgtttatactacccatgagctaagcacgattgtcatattttgtttgtttgtttgtttgtttgtgaggcagagtcttgctctgttgcccaggctggaatgcagtggtgcaatctcagctcactgcaacctctgcctcactagttcaaatgatttctggctaatttttgtatttttagtagagatggggtttcaccatgttggccaggctggtctcaaactcctgacctcaagtgatccgcctgcctcagtctcccaaagtgctatgattataggcatgagccactgcacccagccaatttttatatgtttagatgattgggaaatagattttaaaaagaataatatttcatgatacataaaaattataatgacatgcaaatttcagtgtccataaataaagtttctttggaacacagtcatgctcattcgtgtacatggtagctgtggctgctttcacactgtgagagctgggttgagtagttgtgacagcaattattagatgacctgcaaaaccaaaaatacttgctatcttgctctttacagacaagtaacttttttgctgttcttgccaaagaccaaatgcatttttcaaagctggattccaggctcagagttacagcaaagagaacagaaagtatagctcatgattgggtgctgacaggacaagggagagagacgaaaaccattaggagcattagcaacaaatatattttttgccattccaactccatggagcaaatggcttcctaaaagccagcagagaaactaattacctgaactgggagaagaatgaaagactcattgttagaatattcctcagagctgaatcccttctttcagcctactgtattttagtgattcctaataaaagaaaaaaatgtatttttgtcctcacagccaattaatttctgctccaaagcatagaatatgattatttctgtcattattttagtttccagagtcattgatgagacagggaatgacacatacctattaacacactcgcacactcactcacacactcgtgtgggtacatgcatttccctagaagatgtactggaaggatctgactttactttcaggtgccttcatgtcctcgcaattattctacaaatggtttttaagatatttctattgtatttgttgaaattttcctgacattttgacttgtctagacgattattcttgcatccagcacattgtaggaaacactcatttgaaataccccactgtgcttccgggggagctcatctttctggagcatggcgggtccctcatgaggccctctttcgttaaccgaagaacaagctgcagtctgaatgtgagttgttaaaggtatggtattgggagttttctgttctcctgttttcccattctgtaatgttttctttctttctttccttcatttcatttcatttcatttcacttcatagcaacttttgaatgaaaacctccccacagggtttgacaggcaatgaaacttcctcccttgggaggtgtctcagcctgagggaaatggaacagcaccccacagaggattttcctcacttcctccctctctcctttacaaatcaatgttaaagagcctgcatggatgtggttagcaccatctctgccgcatgtgacttttcagtcattttcacccgaaataggatttcattcaccagttactataagctactcgtgccttctaatggactttgcagcagtgattcatccaccctgtgctgggagagagaaagagactttaggtgagaaagaatggttgggagaggggagacaggtaggcagaacagttgtggtaccatcccgccccataagacaataatgatattcagtgttaggcgctttataccaagaaatattccacctgacacattatcctggttgaatcttatgacacatctgcaaatagacattaccaaatacagagggggacttttaggttcagagaggttaagtgacttgcccagtaacacactgctggcaattcgacctgatctctctctttcttccgccttttccatttcagtcagtggcagtgccatctttccacctgcttctgtcaaatgtgttggtgtgatttgatttcttttctgtttctcttgtatcttttaatccagcaataaatccctgctggctctacttgtaagatatacccagaatctattacctccgcccccccaccacccaccttgctccaagcctccatcatctctctcctggagcactgtgatacccttcttcttggtcatcctgcccctgccctgacttccctaaagttgatgcccaacacacaggcagataaaccagatcagacttgtgactgttttcccattctttgggcaatcccattgcattccagataaaagcggaagtccttagagtactgcagtttgcctcctagcccacgttatctctggccttcctttctcactttctccctccattccagccacgttggcttcctgctgtctcttgaatagtcagggcctttgcccatgctactccc

SEQ ID NO: 2747 - DNA, 7676 bp, Homo sapiens
ggtggaacctgggctccatttccagctgcagggacagctcagaactcccatgtttcctcaaaaggttccctcctgctgctcacctgagctgcctgtcccagcacacagccaccatcaccagcaggttccccaagatggccatcaggataaccgtcgagagaaacgtgagcagcaccaccttctccactgacccgaaaccctcctcagaactgaaagacacacacaagcacaaagaattgaatgaaactctgggacacaagaaggaaaattcgtcttttcatcattgaccttcagaaaggtaacttcaccatcagctgatgacacatatatttatcatgcgtttaatgtacaccaaaatctgaaccggtcgcttgacattttatcctggttagctcctacataagaggagtatgaggcttagagagctgaattaacaggttattttccatccaagcacttgtggctttccttcagggcatttagttcaactagcattcagacatatgtagttgatgcctgttttgtgcacctactcaactagattgcaaaagctgagtgaatgaatgatagtaactttgcaactgcaggagcagcccaatttggtccaactttgtgtataaaatggtgagttgtgttttagttgccatggacccccaggttgcaagttaaactgaccaggcccagatgaaccaagcatgcaaccacagggtggaacctaagtgcttggaccaaggcatggggaccaaataaagaagtggacgtctcatggcatgatccacgatccaatcatatagagccctagcatcaccttgtggcataatccagtcagatcatacctcttggcattaacttatcacaagatccaatcagatcacaccttattaccctctacctataaaacctgccacagcccccagctcagggggacagatttgagctttgcctcctgcttccttgccgatcaacttacaatgaagcctttttttttttcctcaaaagccagggccatagtattggcttctataaacatcagcaaggagcccactgcttgctcagtagcaacttgaactggttgttactgagcaagttactttgcattcatacagttacttggcctgaatgcaaagccatcttgttacagtgtcccattccagcccatgcagaagcttctgcttacaggtaggttctcccagagagaaaagattgtggtgtgatggttgttcttacatcagttcacctggacaaattgaattcagattctgtgaagtctgttggagagatagtagccaataaataagctcagtggctcctttcaccaccctgatcatttcttttagtgcccacaatatgtcattgttttcccagttcaaatttgtgttcttgtcaagttcagcatctgatttagtctacaaatgttgccttccccatgtaaactcagcattttgttttattaacttgaaaatgaagatcccttttcaatgaaagcatgatatctgcagattaatattcagaagctatagggattttaaaaacttttatagtataataaaatgttctttttaatgaagtttcaaagaatcttaaaactcttagaccagcggtgtccaatcttttggcttccctggtccacattggaagaagaattgtcgtgggtcacacataacatacactaacactaacaatggctgatgagctaaaaaacaaattgcaaaaaaatctcataatgtgttaagaaagtttataaattgggttgggctgcattaaaagctgtcctgggctgcctgtgccccgacaggccatgggttagacaagtttgtcctagacccaaaccccacatttgaatatgggaaaaccagggcccagaaaagaagagctgacttgtcagagcgtgctagtggctggtctgggagaggctgcttgtcctgtgagcccaccactgagaacacacagttccaaaaatcaagaattctctgtctttcctgagctcttttgactgaaaattaaggtgcatgccctctccagatggaagcagcctgcaaagtcatggctttggccttgtccagaacttctgttaagctggcacagaagacaaggggccaaagggaatgaggaaccagtctggcagcagttggagaatgagaaagtccctccattcagctgagaagtatttttataggcagattgatagattgtttatgactgaagttcagatgaaaagaaattccagatatgcttatttaaatcacccttctacacttaagttctaactatcaacagtacaaatatcagatagggaagatttaattcaatgaggaaaactgtacacttagaaaaaagaccttaataggctgatgtggccaccaaaaattcatttgatcttaggtcatgttagttgagttaaagcactaacaaaggaggtgatggtggttctcttccctgtccttcttagagactaacggcccccctgaaactcatctcttccacccccagggcctctgtatttgaggtgccttcttcctggaatgattcttcagtgacagacttcttgtcattcaggcctcagattaaatttaacccccagttagtgtaccacagccaacaaacatttttcattttctttacagcatttactgttatctgaaatgacttctgttattgttttctgtgccccaattccacagattgacttttgttatctttttcactacaatctccagtgtctggcacaatatctagtctagagtatgtattaatgtacatgaaatgctatgtattaatattacatatgtagatgatgcattacatagtaagtgctcaattacttgctgattcagtgaaagagagatatattgtgctcataatggttatatttattattcaatgtctttgaagcctggttgaaagtatagagatttcacctagagaaaagaaggcccagagatgaaatgcaaaagctacttgcagctatctgagcgctgtcatttgaaataagagtagattcacatattcattcatttaacaatttctgagcacctactctgtgttaggcattgttgtatgtcctagggaaacagcaataagcaaaacagagagaaaaacagacaataaacagatgcatgagacagtatgtaaggtgtcagctgatagtacagtccatggcaaaaaaaaatatctaggagggtaaggaggactggatggcctgtggcggattgcagactggctatttaataaaggatgtcagggaaggttcaatgataaggttatcacaggttgtgaggctaactaagaccagtgggtgaactttaagcagtggttcccagccttacctgcatatttaagttacctgaggagccttaaaaaatgctgattctgggaatccaccctcagaggtgctgatttaattggtctgagttgcagcttggatagagaaatttttaaaatctcccaagtgactctgatgtgtaatgaattagagtcactgacagggaggcaagatttagtaccagataataagagccttctaacaattaaagatgatctgcaatagcttcccggtgttgttttgtgttccctggcacagaaagtgtttaagaataccagaatggcaatgagatactaatttgcactcattaggatggcaattataaaaaataaaacaacgaataaaaaataacaagtgttggtgtgaatgtggggaaatggaaacacttgtgcattgctggcgggaatgtaaaatgctacagccactgtgaaaaacaagtttgatggtttctctaaaggttaaatatagaatgcctatgtgatcccccaattcaatcccaggggtacacccgaaagaattgaaagcagggatacaaacagacacttgtataccaacagtctatagcagcattattcacaagagcccaaaggtgaacacagcccaagtttccattaatagataagtgaataaatagaatgtggtatatacatactacaaaattttatttctctataaaaaggaataaagtttgttgttgttgttgttgttgttgtttttgagatggagttttgctcttgttgcccaggctggagtgcaatggcgcgatcttggctcactgcaacctctgcctcccgggttcaagttattcttctgcctcgggcttccaagtagctgggattacaggaatatgccaccatgcctggctaattttgtatttttagtagagacggggtttctccatgttggtcaggctggtctcgaacttctgacctcaggtgatccgcccgcctcggcctcccaaagtgctgggattacaggcatgagccaccgcgcccggccaggaatgaagttttgatacatgctaccacatggatgaaccttaaaaataaatgaaacaaataaataagtgaaataaatcacacacaaaaggagaagtattgtgattccacttacatgaggattctagactcagaaaattcatagggaaattaaatagaaaagtagttatcagggactgggagcacaggtgaatgcggagttattatttaagaattatagagtgtttggaatgatgaaaaaattctggaagtggatagttgtaatggttgcacaccactgtgaatgttctttttttagctttttattttaggtccagaggtacatgtgcaggtttgttatacagggggtttggtgtacagattatttcatcatccatataataagcattgtttgataggtagtttcttgatcctcaccctcctcccaccttccaccctcacgtaggtcccagtgtctgttgttcccttctttgtgtctgtaatgtactcagtgttcagcccccacttgtaagtaagaacatgctgaatttgattttctgttcctctgttagttttcttaggataatggcctccagctccatcgatgttgctgcaaaggacatgacctcattctcttttggggcttaatatcactaaattatatgcttaaaatgcttattttatatattaataataaattttattatttatattttagcattatataaaaaaagaattcctggatgaccacatatcaaggtactgtacagggctcctatattgggggcaggctggcctggctgttttaggtcgcttttttgtctatggactgtgatttaaacatatccttataacatgaattctccatcaacaccaccaccaccataagaataatctttcttatactgtctttactcttgtaaaagaagaaaacagattcagagcgtctgtgatgaacatctctggctccagagaaggtacattttgaaccaagtgggaatgtcagggttagagagcaccaagttcaatgtaatggttcatttgtggcatgccaattaggagttagaaatagcttaactttaaactaggagtgacgagcaaaatttaagcatagaagaagctttttaaattaggcagaactgtccattgaactaaaagtaagtccagtaatgacaattaaaataaattccaaaccacttctgcaaaattcatgttaggtccttgggttgcctctgacaccctcaagcaatcctgtcaaccacaactggacagctttcatctggctgaagagctgtccactccactaaattggttcgttgacagctattcttatgagaaattttactttctcttcttttttgctttctccgtgatcttttgatccattaataaactccacaaacttgtgggctggttttgccattttctctgctcttcatgaaagaaaatataaagacacaaattctgggtaaatttccacataggttagtatatgtgaaaatggactgtgaatgataaagtatgataaataagtgattattgttattaataatgatagagacaatagcaaaggaaatcttaggttatactttgtcacacacacacacacacacacacactctctctctctctctcatactttctggagagtcaagaacattttttgttgttatttatttatttatttttgagacagagtcttgccctgtcccccaagctggagtgcagtggcacaatctcagctcactgcaacctctgcctcctgggttcaagtgattctcctgcctcagcctcccaagtagctgggattacaggcacctgccaccacacccagctaatttttgtatttttagtagggacagggtttcgccatgtgggtcaggctggtcttaaactcctgacctcaggtgatctgcccgcctcggcctcccaacttgctgggattacaggcatgagccaccacgcccagactttattgttattttttgtgggcttttgcactggttttgttcataaacagctgtatgacttcaaaaaattcacttgacttttctgagcctcagtttcttcatggatcaattgagaaagttagattaaatttcttattcatcaaatatgtattgagtgccaactatataccaaggactgtgctgagtactagattcaatagtaaagaaaatggacaaatttcctgacctcatggggttcatagtatggatggaaacagacataagcaaatgcacaattaaataaataaatacagtttgtgatcagttcttcccagttccatttcccaaatgttaatatttatattaatccactgaggatcttgataaaacgcagattctgattttttttaggctgaggcagggtctgggattctgcagttctcacagacccctaggcattgctgatgctgctggttcctgagtcacaggtggagtagcaaagtataaaaggtgtaaacatgacattatgatagaaaacacgctggcttagagagaagtgtgaggtggttgggaaacactggaggtgacagtcaactgagttctgatgtatgcagagaatttggaagtcagaggaaccaggataagtgcattgcattcaaagggaagagcaactgcaaaagccctgagacagaaaagatttttcatgttcactatcacaggggaaatgagcaagggactgagcatctgagatgagctcagacaagtagtcggaagccagaccctgagggcttttttgtgctctagggagaagtttatgttctattggaagatcaatgagaagacacagaagtgatgtaagcagagtaatgacatgggggcaggggtgataatatgccaggggtttctgcaggagtccaggtaaaagaagatggtagttaaaagtagcatggtggctggggagatggagagaagtgggtggaataaaggttttttggggagtaaagagatagataacaaaaatagattccatgagtgagtgggaagaagcacaaataaacgccatattttagaattgcatatctgaataaatgttggtacaatttaatgagatgggtgaaacacattaagtgtgagatacctataggacattcgagtgaagacgtcaagtaggcaattggatgtatgtgtgtctggagctcagagggatgactgggcaggagatacatgcttggaattgccagcacttctatgggatttagagaactgaggaaggatgtgatcacccaagaagagggtcagggtcttgatgaacagcagtactgagatgtgcagtagagaaggtagaaccagcagaggagactgtgaaagactatccaggatgttctggggacatcagatgagagcggtattttggaagccaagaggaac

SEQ ID NO: 2748 - DNA, 5082 bp, Homo sapiens
gtcaagcacggaggtgatctgggcaagccttgttgagtgaatattgaccacttcactaaggacatcacaatgaagaacctggtggaaccttccctgagcagctttgacatggcccagaaaagaatccatgccctgatggaaaaggattctctgcctcgctttgtgcgctctgagttttatcaggagttaatcaagtagtaatttagccaggctatgaaatcatcctgtgagttatttcctccataataaccctgcatttcccattaatctacatatcttcccacagcagctttgctcagtgatacccacatgggaaaaatcccaggggatgttgcttactctttttgcccacactgctttggatacttatctactgtccgaaggccttctttccccactcaattcttcctgccctgttattaattaagatatcttcagcttgtagtcagacacaatcagaatcacagaaaaatcctgcctaaggcaaagaaatataagacaagactatgatatcaatgaatgtgggttaagtaatagatttccagctaaattggtctaaaaaagaatattaagtgtggacagacctatttcaaaggagcttaattgatctcacttgttttagttctgatccagggagatcacccctctaattatttctgaacttggttaataaaagtttataagatttttatgaagcagccactgtatgatattttaagcaaatatgttatttaaaatattgatccttcccttggaccaccttcatgttagttgggtattataaataagagatacaaccatgaatatattatgtttatacaaaatcaatctgaacacaattcataaagatttctcttttataccttcctcactggccccctccacctgcccatagtcaccaaattctgttttaaatcaatgacctaagatcaacaatgaagtattttataaatgtatttatgctgctagactgtgggtcaaatgtttccattttcaaattatttagaattcttatgagtttaaaatttgtaaatttctaaatccaatcatgtaaaatgaaactgttgctccattggagtagtctcccacctaaatatcaagatggctatatgctaaaaagagaaaatatggtcaagtctaaaatggctaattgtcctatgatgctattatcatagactaatgacatttatcttcaaaacaccaaattgtctttagaaaaattaatgtgattacaggtagaggccttctaggtgagacacttttaaggtacactgcattttgcaaaaaaaaaaaaaaaaagtaatcttttagcaaccccagtattccttcactatttcgcttcctgcattagcaaattttacttacagtcaaaagtgcagatttatactcctgacgtgtctcattcacagctaaataataggccataggacttttggtaggtttaaacttttaattctgtatttcatgattataagtcttgctagaattttttctaatctttagtagatttgattaaataatgattcacagaatttagtaacagaatcaaactaagccatgtatgagggtaatcgagatgaggatattaactcaaaagaaatagggtgatttttaaaggattaataaaattctgaaatgttaagtagaagattacattgtctagtcttgtatttcctccttctgttgctctctttcattcacacactctcagtttctcatatttgtagctcatttatttggttatttcctaagaatattgaaagtgaagcaactatgtgactgtattcttcaggtaaacactgactgcgcttgttggattttccctatttttgtgacttcaagaataatatgccctgctgaatacatgccatttcacattctgaaactgggtagagtggttgggtgttctgccaacaattgctagtggtgtgaattcattcatatttgccagtattgctcacttcaaagaaactccttcatcaagcagtccagagctaggccagatcaatgctacaatcatgaagttctcattgcatgcaattgtgtaggattgacaaggaactcagataaaaatttccagggtgcacttccagaaccagcttcaacatatgtctacattgcccccaagttaataaagtgccaaccctttactctctcatacagccagaaatgttagaaatccaaaatcttggtgcattattttttcataaacgctaaaacatttgaagaaacaatttaattatttaaaattcaagtattttattcacattatttgcaatatccaaatgtttaaaaattcccagataattaactagctattacagatctcacctagagggttgatgttatgaagactccagtggactgtactcacaaattgactggacaccctatgaaagtgggtagacctctcagcggaaaataagaagggcttttacctacagggcaggacagggtcccatgagagcagttctgtggagatataaaaagaatggaagaaggaatgccttatagtgatattgtgacattatatctatatatctacatatatctatctatctatatctacatctatataatcttacatttaaaattgtattcctacacatattagaaactcttctaataaatgaagtaaaaaaattaaaaagaatacaaatattccagccccaaatgagaaatcaaacatattaaaattgttcaagaaaatttctttgaacacttctgaaagtttttggaaacttagaaaagagggaaaaaaatccagtgttactagtaatttccatggtaatacagataaaatacattcttttaattctgggaaattagaaaaagtggggtgatctttccaggaaaaacatgtgtaacatctgcttatcactccagctccctcctcctcctcctctccacgttcccttgagtaaatgtctgggaaagcatgaagcttgatgcaagaaccctgttgtactggcgttttcctcccctgtgaaaacgtaactactgttgggagtgaattgaggatgtagaaaggtggtggaaccaaattgtggtcaatggaaataggagaatatggttctcactcttgagaaaaaaacctaagattagcccaggtagttgcctgtaacttcagtttttctgcctgggtttgatatagtttagggttggggttagattaagatctaaattacatcaggacaaagagacagactattaactccacagttaattaaggacgtatgttccatgtttatttgttaaagcagtgtgaatagccttcaagcatgtgaataatcttccatcttccccgccacacatacacacacacactttttgtttctttcaggtagacaccttttaaaatgcagaactaactgaggcatttcagtaactttgctttcaaatcaataaagtcaaatgtatggaaacattttgtgccctactctccataccccgtgtactcaaattctctactgtatgaattatgctttaagtagaattcagtgccaaggagaacttggtgaaataaattattttaattttttttttatcctttacaaagccatggattttatttggttgatgtgtgctctgtacacaagccatttcaataggatggagctgttaattattttccaaagagtaatagacatgcaaaagtttcaataaaaactgggccattaacaaataaattaataaactaataagcattcccttctaggtttttgccaaactgcctatccaataacaaatttgagaatcgttgtaaaagctagttatatttcagagaaatgattttcattattgaaactgttctccctagcaggccattttccctttttcctgggagtttagcaagtttaggagagaatagtcatgaaaagaaagggaagaaaggggagaagggaagaggttaaaaagtaagtgctcagacctatgaacgtaatccctttgctacaaatatttaagagcagctcagcttggttgaaactgagttttgtcatcttccatatttgcaggaaggtattttctgacttgcaatgcagctagatgtaaaattttattttatcatcctagaaagccttgactagaaaaatgaataaatattgagggtttcctgtccatatctggcttgcatgtgccagaaagcagagaatagaaaatgtaatctccaacatccaagcatcgaaacccaaggggtaggcaattctatgtaggttttggacatgaagtttggtgcatcttggtttatgctggctcaactgctattaaacctctctggcttatagtctcttcattctattagacaagcacgtatcgaacacttgcttcgcacaaggctctttagttaacaatttagcagctactgtttgtgttaaacacacttttcaccaaataggttctgaggcaaacgagagcaatgactatttaaagaaaggctttcccagcatcacttacacatcccaaaactaaaaagatcaactcttccaactgagaaaagactcctggctttgaatggaaacttacagcagagagtcacaggccacggcaacaacaacgacaacaacaaacatttggaatattattctcaactcacgttttaataatacatcttattatttttctagtagagaaactacaaatcagcctcttcaacatttatatacagtttaataagcctcttgcaagttacttgttctctcacctgaggtatttttttcctccccaccttgcccctgttcctcccttcctcttctccctttgcaagaggaaatatttaacatatttgggtccaacttcaataatgtaataattaatacattaaaagcatttaacttcctttctagaaaaatgcacaggctaaggcatagacaaaacaaagagaaatgctgagaaatttgccactggagacaagcaatctgaataaatatttgccaaaagttctttttatgtcatatagtgtcaggatttgaaggagctatttttttttaatgttgcaactagcaactcatcttcggaagacacagccaggagaatgaagtagaagtgaaaggtttataaatccatttgtaagcatttatccca

SEQ ID NO: 2749 - DNA, 3816 bp, Homo sapiens
aagaagtagaagctaagtcttttggtacgatctatttcttcttcaacctcttcttacctcccctttcccccttcctcaagtttgattaaacctctatcttgaaaaataatgggaggctgaggcaggagaatggcatgaacccgggaggcagagcttgcagtgagccgagatcgagccactgcactccagcctgggcaacagagcgagactccgttctcaaaaaaaaaaaaaaaagaaagaaaaataagctcttacctcccaccactgaaccatactgtccattcctgcaagaagctctatttcctgtcaacaaagaaaaggaatgtgctaatgtaagcaaagtgtgtatccctagagtagccacaagtctgggtgggctcacataggttaggggaagaggagagaccagtagtcattgcttatggcaagttttctgtcttctgttaagccatctccactaccaccatcaccctagacattgtccagtgtccagtctctggcactggctggctggagaggaaaacaagaccacctgggcccagtcttcattacaccaggtgtggctgctctctggatctctcagaccgagtgtggctcagcactggcagctttagttgttctggtctggttctaaagtcaggtctcctctttgaggcagtctctcctgtgtgtccctataaccacacactatagcaggactggacactggtggaactggcctcttctttctaaatgggggatctgaaaatagcttcacacctttcctcctctcttgactcgcctgcctctgccattgcataccattatttttacttgattgtagcccatgtttcaagatgactctggtacagggtcttatggccgcaaggtggtacagatgttctacacacagagtagggacactcttgcacaggcctactttttaaaaatacagcttaattaaaatttttttttttttttttcctgagacagggtcttactgtctcctaggctggagtgcagtgccacaatgatggctcactgcagcctccacctcctgggctcaagcaatcctcctactttaatctcctgagtagctgggaccacaggcacacgccaccatgcctggctaattttttaatttttttgtaaagacgggttctcactacattgtccaggctggtcttgaactcctgggctcaagtgatccttccatctcagcctcccaaagtgctgggattacaggcatgagccactgcacctggccttaaaaaattttttgttccacatcatatatccatctacataaacaattaagctactttggccaggtgcagtggttcacgcctgtaatcccagcactttgggaggctgaggtgagcagatcacttgaggtcaggagttcgagaccagtctggccaacatggtgaaaccctatctctactaaaaacacaaaaattagctgggtatggtggcaggtgcctgtagtcccagccactcaggaggctgaagcaaaagaattgcttgaccccgggaggcagaggttgcaatgagccaagatggtgccactgcactccagcctgggcaacagagggaactctgtctcaaaaaaacaaaaatggaattaagaaaccttataatagcaaacatttaacatttttaagttagtgatttcagagtctatctgaaaataaaaatggttaaaataaatttttctttagacatcacattgcttgaaatggcccccagtttctaatggctaaaaaaactgaagatgagtgattgaagttcatccctgggacatacttcttggccctgggagggaaggaatgcatgagattctttagtaacattcatatgcacaagaaatgactactgacataatctttaatagttaggattattcttcagtttattatttaaaaccttatgacagctaaaatgctaaggtataatttataatgaaagcatttgagtgattgaggtatatttcactgagctggtttgtcttatgagttgaaattaagacttgtataaacataaaaagggaaatctttcccaggtttatgtagttaggtaagaatacttaatgtccctcattcccaactgtgctgcagtgccatctgtgcagtgctcagagtctataggcagcaaatctacaggatttaagcgacatttatttttcagtacaacagctgcatataagaccaccagctagcatcacataacaaaagtacatattatctttgagatacacaactttacagtattttcctagtgcttttaaaattttacaatcttagcttttgagttcttttaaaatgacagtaacaaaaacaaaatgaaaaaatcaaaagtgcatgtatcagagaaaaacagcaatactatagtgtgtcttacatcatctgggaaattaggtaatcaatcacatcctccagccataataggctggagtgcagtggcatgattatggttcattgcagcctcaatctcccaggctcaggcaatcctctcacctcagcctcctgagtagctggcactacaggcacacacaccaagccctgctatttttttttttgtatttttagtagagaaggaaggggtttcaccgtgttgcccaggctggtctcgaccttctgacctcaagtgatcctcccaccctggcttcctaaagtgctgggattacaggcatgagccacctcgcccggccaccagcaatgatttaaaaaaactcagccggacgcggtggctgacgcctgtaatcccagcactttgggaggctgaggtgggtggatcacgaggtcaggagaccaagaccatcctggttaacatggtgaaaccccgtctctactaaaaatacaaaaaaatcagctgggtgtggctgcgggcacctgtagtcccagctacttgggaggctgaggcaggagaatggtgtgaaccccggaggcggagcttgcagtgagccgagatcatgccaccgcactccagcctgggcgacagagcgagactgtctcaaaaaccaaaacaaaacaaaaaacaaaaacctcattaatttgtcaccaggttaagacagaatctgctagtgctagaggagtcaaagttcctagcttttcaaataaaatacacaattgatataatttgcagtaacccacacatagtaagaaaagagcatttagattaagccatctctcaaaatatctaatatataaattgagatcagaagcagtctgatttgtggtttcttctccctgccagctaataagaacaatacaattatacatggagccaacaagccacttgtcttatcatgtcatgataacaaatataaatcacgtgttcatttctaagtgaatcatgttggccactgtaaagagatgttttgtattagattatttcctcagtggtggctcatcctcccaaagtgctgggattacaggcgtgagctaaatcttatctagctaaaaaacgatatctagaagtcataaatattagaatatttggtatgatactaagagaacatcctgattaaatgtctgtatgtattgacatcatctagctctttttttttcttttttttttattatactttaagttttagggtacatgtgcacattgtgcaggttagttacatacgtatacatgtgccatgctggtgcgctgcacccactaactcgtcatctagcattaggtatatctcccaatgctatccctcccccctcctcccaccccaccacagtccccagagtgtgatattccccttcctgggtccatgtgatctcattgttcaattcccacctatgagtgagaatatgcggtgtttggttttttgttcttgcg

SEQ ID NO: 2750 - DNA, 489 bp, Homo sapiens
ctctctggtctgctgtgccctccccctccccacacccataaataacagcagcccttccaactctcctcctgatcctgtgctcagtgatgggggccttgcagtgggcagccagggccagcatggccagcatggccaagccctgtcagtcccttccctctgaaggtgaactggacagcatttgttctctttagtgtgtgatttggatttagacaaattcaaaagctgccgtatttcagagcgtgtttgtcactgccatcatcgttcttttgttcaggcagcagtgagaatctgctaagcacttgtgaacactatatgctgaaatgcctgaaaaggctttcctgccctgcagggacccgggctcagcacctttttcagactccaggaagctcatatcccgctgatgaacagctcgtggccattgcagcactatggaaaacccgcagctcctggcgtcatttaactacatgccactcaggcacattgaagtcc

SEQ ID NO: 2751 - DNA, 524 bp, Homo sapiens
gctgacagctgggattgaaacaaggtctgcttcctcaaccagggtgatgcattgaattgtgacacatgggggtcagtgaaattaactatctttcccatgagaaataatttatcattcagcatttgctattaatgtgcctctgctgcaagtgaatgaagacgtataaagtgtatggaaattgtagagcagatgaacactgcataaatatcctttaatgtttatgatgagtacaataattttctcatctgtaaatgggagggatttgggctgcagaaaaagagacgttgataaatttggttgctgtaaaaaaatggctgtaatttcttctatagaagctgtacctctttgggtctaatttgaattttgttttctgcctgtttcaaggaggtcttttaaaacttgtgattactattggatatgattgtgtctgtagaaagacttcccagccttctttagaacttaggaggtgcctctgttctcagcataggcaatattaatctcagctcacattgtctctggatggg

SEQ ID NO: 2752 - DNA, 1825 bp, Homo sapiens
ggaccactagggctgtgaggtgggaacgtgccttgtttacgactgcatttcctgccagctcccagaggagcagcctgattgctgagcctgatagcaggaaatggaggaggtgggggatctcaccaggaactgccccccaactctggcaacctccgtcccatcaagctccctgctaaaggagagaagagaaaccccaaagccaaaagaggcaccctgtctaggtcagaccgtgacacccagggcctgagtggtcatgggtggggtgtggacgggcaggcgcactgccttgcagtgctccactataggtaggcaggcccatggctccccatggggaaaggagatccagtgcagctcaggttctctggagagtaatgcgcaaaggaagggcatgaagaccacttccctggttaatgagggtttgaccaggagttgtctgccttacccaaacttgaaaataacccctagcatgtttaattgcttaaaaatccactctttcatctgatcttcactttcgtttcctccaaatcctatgtcaggctccatgctaagtgctgggaatacaagatgaataaaacccaaccccatcctgaagcagctcacagggagacgacagagctcaggcctttgggaggtgcagcagatgtggttctgccccttgacagaggagacaactaaggctctgagatcagcttgcccagggcctcccagtgcacttgaaccctgacttcccagcacccagcccagggctctttccttcccaacaaagagccccagggagctcctcaagcacactgggaaggacctgggatgcaggaggcactctgaccggtggcatccaggaagtaaggaatatggactaaagggagggccaaggaaaagtttacaggatgtggctgtgcagttggaagatgcagacgcgcctcgcttggtgctgccaggttagatttgcagaatgcagtgaatgctcttgctgacaaaggatggggaaaagtgaactggggaatcatgacctaggggaagccactagctcaaatactgatccctatttaagtcaccaaaatatgctgggcacccactgggtgcccagctctttcccataagtgatcccaaaccaggagctaggccaagcctccaaagacggctgggtagttcattggaatgagggctgcagtgactccagaggagcaggactcaagagaaggagagccagggaagactgaggggatgtgtaggtgaggtggcttttttctggctgagagaatagaaggtctccagcccacaccaagggctccataatggaagggaggcctagggtgggtcctcccctctccccatcttcatcccactcagcccctacctggcctttaacacactgggtgggagaagtgttgctgagcacagcagtgacctgaggccctgggcacccatcccagcttagctccctagggggctccagttgctgaggaagaacatagaacttatataggatgggagagctggaaggaaacttaggatcaattgttacagcctctaactgaatggtgagaggccagtgagagagccagagctagaatccagggccctttccatgatattgcacctcccatctcagccctgtctcttatgaaatgccatattgaagctttatgtattggggaaatttaactgaggctcaaagggacacaaattccctaaagccacatggtgagtcagacagcgaaatgcaaggtttctggtcctttcccagcatccaacaaacatttcttgggcacctactacagtcaggctgggagcactttcagacattctctcacttaaatctcac

SEQ ID NO: 2753 - DNA, 814 bp, Homo sapiens
ggagaatcatttgtgtataaaaaggaaaggccatcctcttacctatcttatcaattaataccatagctaacattttagttatctgggattttatttatgtctgctcagattgcaagtttgaatgtttgagactccactttccttgcaggattcgggctaatacatgccaaggaggcatagatttctttctgtttaattgtaaggatggaagtgaaaagcaaagaaagtttttgtcagttggtggtagttgatttttggtttattttaaaaagctgtctgcagttttcttgatcatttaagaaatttgttgacatggcacttttaatagattatcctgcttttaaagaatgctggcatgggtaatgacctcactggtgggcacagaacaataataaagatagaatttttttttttgtattttcagaaatttaaagttatgaaacatttttagactatccagtggcaatgtgcatttccagtatacttttgtatgatggtgagaagctagggaccttctaatgggtcactaatgaaatggactccaactcccactctggatctctcactcataatccacaaggattaatttaacctgccagatgctacccatttagcaagctgaaaggacacagtgccccccaatgcctgtagccttgtctgctgttattgctattgctggctccattctataagtgagtcagatgatttagatacatatatgtttactaatgcaatgggtagtttttcttggccaggctcagtatattatttgtgttcttgtcagggagagctaccagtgaattttttcctgctg

SEQ ID NO: 2754 - DNA, 1075 bp, Homo sapiens
gatcttgctatgctgcccaggctggtctcaaccttatgggctcaagtgatcctcccacctcagcctcccaaagtgctaggattacctgcgtgagctatagcgccctgcctgttctgggcttcttgcagagcctcttcagctgcagagaagcagctctcctttctccaagtccagagccaacaggacgaataatgaagctgttgggaagatttactgataatacatgtaaagggtctagcacattttaggagctcaaggttggtgccttccctttttctttactctgaaccggatatgaggccttgagaaagaagagaggcgcttgcaaaacgaggtgaggtctcaggcacagtggctcacgcctgtaatcccagcactttaggagaccgaggcgggcggatcatgaggtcaggagttcgagaccagcctggccaacatggtgaaagcccgtctctactaaaaatacaaaaattagacgggcatggtggtgggcacctgtaatcccggctacttgggaggttgagggaggagaatcgcttgaacccaggaggtggaggttgcagtgagccgagactgcaccattgcactccagcctgggcaatagagcgagactccgtctcaagcaagcaagcaagcaaacaaacaaaataaaaaacgaggtcaagtttcaaaagatgtcacccccaacctggcaaaacttctcctcaagccctgtcgttccactcttgtccgccaggaggagaaaaggttccctcgaaggacgtctttgcttgcgcgttcacggagccttgagaacgagtggccgaggggacccctgcggccctgcgcgcctaagggaggacctgactcctttcagaattagcatttcttccccttcgtgggtgctcttgagttccaaagaaaaggaagagaagccttcattgagcagcttcttctgccttagggactgtgctagggggtagatcgaccttaggggaaacaatccccgcttattagaggaggttttggatcagggtttgctttatttgaaatttaacaaatacagaaaagcagaaggaagaaaattgaagtaatc

SEQ ID NO: 2755 - DNA, 2059 bp, Homo sapiens
atccctcttgtcacctctgaagctggtgctgtatctttctatcccagatgctccacagaacctcgccatcagcatcttcttcagaaatggcacaggcacagccctgcggatcctgagcaatggcatgtcggtgcccatccaggagggccagtccctgttcctcgcctgcacagttgacagcaacccccctgcctcactgagctggttccgggagggaaaagccctcaatccttcccagacctcaatgtctgggaccctggagctgcctaacataggagctagagagggaggggaattcacctgccgggttcagcatccgctgggctcccagcacctgtccttcatcctttctgtgcagagtgagttgcaggacaggtgctgagggtagacagcccggtgaggtattcaggttggtgggagggactgaggcctggtaacagcaccttaccttctcctttctcccaggaagctcctcttcctgcatatgtgtaactgagaaacagcagggctcctggcccctcgtcctcaccctgatcaggggggctctcatgggggctggcttcctcctcacctatggcctcacctggatctactataccaggtgagccggactgcctgtctccaggaagctcctgagttccaggtggggctgagctgtcctgccccaggacagctcagccccacctggaattagaactgaagtggctggtgctgatctgaggcccatgttggctctgcaggtgtggaggcccccagcagagcagggctgagaggcctggctgagcccctcccgctcaagacagaactgaggtgtggacacttagccctgtgggacacatgcaggacatcactgtcagcttctttctggaagctcacatcccactgactacccctcttttccttcctgccccataccccttctacttattcccctctgcttgtgagtcttgccccaccacacctgcatccccatctgcaccccatcccctctccacctgcccttctcttccctctccatccaccatctccagccctgtgaagggaatgtactttcggtcttatacccccattacccattacccaaaagttaccttttttttttttttttttttttgagacagagtctcactctgttgcacaggctggagttcagtggcacaatctccgttcactgcaacctccacctctggggttcaagcaattctcctgcctcagcctccctagtagctgggattacaggtgcctgccaccacatccagttaattttttttttttgtatgttagtagagatggggttttaccatgttggccaggtctcgaactcctgacctcaagcaatccactgcattggcctcccaaagtgctggcattacaggtatgagccaccgtgcctggctgccaaaagttaccttcttaacacttgaatttctggtctcctcagcttccctatccatataggcacagagaggcagcatttgttttccagttaaaactctacctcattgtgattattatccaatacaattgttacaaaataagtaaaacttttatgaaacaatacaacataactgattttactctttaatgcctctgtgagagtttgtagacaaaaattatgtcttttttttttttctttgagacagagtttctatcttgttgcccaggctggagtgcaatggcaaaatctcagctcactgcaacttctgcctcccaggttcaagtgattctccttctgtccatatacaagaaggcaatacctgtattgtcaggttctgtgcatcgtataactggaaccaaacatatttgctttagggtctgctttcatttcttcagtgtggttttcccagtttatccacgttgttacacgtatcaatagctcattctcagttttggtggggttttttttgcttttaatatcgtacagtcagccttctgtatccactggttctgcattttccctttaatcacttttgctgcaccacaaaagttttgttatgttgtatttttatattagttcaaaatatttccttctttcccctgagatttcctttgaattcac

SEQ ID NO: 2756 - DNA, 2703 bp, Homo sapiens
caccacgcctggctaattttgtatttttaatagagacaggttttcaccatgttggtcaggctggtcttgaactcctgacctcaggtgatctgcccacctcagctccccaaagtgctgggattacaggcatgagccactgcacccagctgaccctaaccgtttttaagtatacagttttcagcagtattaagtatattcacattgttgtgaagcagatcccctgaactttttcatcttgcaaatctgaaactccatgccaactcgttaacttttcatttgccgtttcccccagcccctggtatccatcattctactttctgtttctgtgaaatttggctactttagattgcttatataagttggtatcatacagtgtctgtctttttgtgactggcttgtttcacttagcatacttgtcttcgagtttcatctgtattgtagcatgcgacaggatttccttactttttaaggctgaataatattccattgtgtgtgtgtatatgtacatacacacacacatatatacacacacacacacacaaaatggaatatatatacacacacacaccacattttttttttcccgagatggagtcttgctctatcgccaggctggagtgccgtggcatgatcttggctcaccacaatctccgcctcctgggttcaagcaattctcctccctcagtctcccaaatagctgggattacaggcccgccaccatgcccagctaatctttgtatttttagtagtgacggggtttcaccatgttggccaggctggtcttgaactcttgacctcgtgatcttcccgcctcagcctcccaaagtgctgggattacaggcttgagccaccacgcccggcctgaactattttataatacagaaaagctcactcgttataatacaacttgctaaatttttacaaacgaagtatatgcatgcagcccacactcagctgaggaaataaacgtttccagtaccccaggagcccctctaatgtctcttacccccataccaagggcaaacactactctgatttctaacagcatagaagaatttcacctatttacatttactttttgaaacttaaatttaggcatattttaagcattaatctattaaagcacggctttatactaggtatttttctttttcttttctttctttttttttttgaaatagggtcttgctctgttgcccaggctggagtgcagtggcccaatcatagctcattgcagcctcaaccgcctggtcttaaacaatcctcccacctcagcctcctgtgtggtaaagtgtgccaccaagcccagctaatttttttacattttgtagagatgaggtcttgccatgttgcccaggctggtctcaaacttctgggctcaagtgatcttcccaccttggcctcccagagtgctgggattacaggtgtgagccactgtacccagcctagatatttttctatacacatacatatatacataatgatgattattatttttctagagatgggtctcactctgttgcctagattagagtgcagtggcatgaatcatagctcactgaaactgaactgctgggctcaagtaatcctcctgcctcagcttcctgagtagctaggattacagggacacaccaccatgcctagcctcaattttaaattttttgtagagataggtctcactaagcaacagccccatctgatctcgaacacctggcctcaagtgatcctcctgcctcagcctcccaaagtatactgcaccaggcccatattatacataactattgacattaaaaatgttcttttgtgtgtcacctacaaacactctagaagccaccttccttaagtaccatatgatctctaagttccttctcaaattaaaattatgtggttaagtttcaagaaactaatttcttaatgatgcagaaggttttgcttgaatgactcttcaaccgagcatctattatttatcaggcactgggaactcagggataaacaaggcatgatctcagtccttgaacatagagtctcgtggagaagaatggcgtagaaaatgcagtgtcatgatgtgtaatcataaaagtagatgggtacacaccacttcaggagaatggcagagggagttaacatcttggcacttagcatttagtatttcttctgtaacacacattccattctattttaatgagcttgcaaacatttttcctgctggatttttgaggatcaggaatgtgttttgttcactatcttatctcctacagtccttggcatactgccctacaaatcagtaaatgtgtttatatgactcatatggcaaaaggcaatttttttttttttaataagtgaggaatgttccaaaagccaatgctattaacattgaccagcttcttctagtaaggagaggagacagtattttttcaaagtgcggtcctaagaccacctgcaagagaattaattacatgctgggaatgtgtagattaaaaactcattttcctgttctccatttcagacctactaaatcagcctcagagtgaaggaagcttcatttttggtgtctcaagtgattctatttgaaccaaggcctgagaacactgcagtgaggtgtttaggccagcgtcaaatcacctatttctgggcagaggtgcctatccttagcaatggggctgaggctggggtggagtaatcttgctttttgttgattttaac

SEQ ID NO: 2757 - DNA, 3628 bp, Homo sapiens
cagcagccatccccagggagccttgccagatttttctgccactatctctaataccaccaccctgagtgacacccccactgtagatgccgccagcactccgccacagctgacacctcgggggctctctcccagagtagaaatgacccctcaccttctctgctttggaaagaaaaagagaaaaaaaataaacctgcatgcatgcagatcacacacctggattccattatctctctgacttccagcccagggaaccaaggaagcccagaatctttgagtcacatcctcttcctcttctctgcggaacccagtggggctctctcaccaggaggagggggttgagttgcagagaacagcatgggtgacacacttcactggacaaaaaatggaagggcatgactgaacctttattggaacaaaatatgggctcagccagctgcggtggctcatgcctgtaatcccaacagtttgggaggcccagtcaggtggatcacctgaggtcaagagtttgagaccagcctgaccaacatgacaaagccccatctctactaaaaatacaaaattagctgggcatgttggcacatgcctgtaatccagctactccggaggctgaggcaggagaaacgcttgaactcgggaggcggaggttgcggtgagccaagatcgtgccacttcactccagcctgggcaacaggagtgaaactccatctcaaaaaaaaaaaaaaaaaaatgtgttcaaggaccttcacccaggaatgcaaactttctcctgctgcttcctatggatactatttaaaatcaaatgaagggggcttttttcctattatatatagactgaatctataaaaggctatgaaacacccaccagaaggacaacccaaaagaaatttaacaacaagtacagatctacaaggaaaagcctttgtaatgttttccaaggcaccacaatttttgaacattacatgcaggaaaatattatatggaagaaatgtcactttacaagccttcagatgaggccttttctattttaatgagtgtcatatatgaggaaatgtttgatataacagcatttcactgaactgtattgttggtataaactgcagttactttggactttcagctttaatcttgtgagaaatagatttctaaatacctttggcaagatgttcaaggtctatttctttcccagtgtggattttaattcaaaagatccagccatgctcacatttgtggtattcctcaggttcactaaaggtaaacaaattaacaaaatattgaatgaatggtaaagatgtttccgttcaattattcttaaacacggaaaatggggtacacatgaatttgctcagttttaaattacccttatcatttaaaaaccacctggatgggttcaagaagtaatgtgaggctgagaaaaatatgaattaatgaagaacacattttggtgataggcctataaataaaaattgtttctatgagtatagttggcacccacagattgaacagtaatgcaggcagacacagctttctactgtctttttatgtaaaaattggttggtttctgctttctttgctatgctaataaatgccagggaaagtgttagctgcattttaactttttgtttacatagttgcacacatactgagcaagttcccacggaatacagcttaccacacctacttaaggggttcaaactcacacaattaatcacgcctttaaaaaaatgatttggtttcccacattcgagataataggcctttgttatttttaacaattttggcatatgagatatgtaacaactgcttgaatataacagcgtaggctttgttacaatcaatcgttcaatttaataggtctggatagtaaaagactgctgattcttctagatgggaagacatttctcccgggaagaatgcagaataaaaaaacccaaaagcaaatttctttgaattttcaacaggagaagcctacttacattggtttattcaaaccaaagcatctttttcagattggaaaactgaaggcatcaaattaaaaagaaaatactaaacagttggagtgtgaagcaatagccccacttcctaaaaacagcaaccaaagacctctttaaaatgtagcagtagtagagagaaggctaacagaaagtcacctcatctatagtcaatgtgctttcacattttctcccatctgatgtccctcatgataacccatgaggaaggtgaggccagccccgacaccgagaggctgggagcaagactccaaatggaagcacaggtgtctagatatttatattttacacaagctaacaacctgtttttaaaaatatttggctgggctcagtggctcacgcctgtaatcccagcactttgggaggctgagatgtgaggctcacctgaggtcaggagtttgagagcagcctggccaacatagtgaaaccccatctctactaaaaatacaaaaattagccgggcgtggcggtggcgcatgcctgcaatcccagctactcatgaggctgaggcaaaagaatcacttgaactcaggaggcagaggttgcatgagctgagattgagccactgcactccagcctgagtgaaagtgagactttttctcaaaatagtaataataataataataataaaagatatttaatatgttctaattgaaatgtttctaagacaaagaaatgataaatccttgaggtgatggagacctaattaacctgatgtgattattataattgcatgcctgtatcagaacatcacatgtacctaatgaatataaacacttattatgtcctcaaaataattaactttttttcaaaattgaaaaatatatgtaaagctacagtttatagataactgaaagttgacaaaatagcaaagaaaactgaatttaacttttattgtgtatatctgggtgtttataaagagaactgaaaacagcagtattgttcaatttgtcctaatctctcttcagttgaaatgataacctgcgttctaatggccaaaaaaaatagtctattaaatttagtttggagactatttgtacatgaatcttttcctgtagagccaatgaaacattttcatttctccttgtaatttccatgtatttcaatggaatgttgcatatatcacgtgcagtttcttgcaatttagaaaaagcattttttctaaaggtatttatttagttatttagttatttattttaatccttttgaaaatgaagtagccacacacatttggagtggagatggtcattatcttttgttaatattattatgagcaagcaacatggatagtacatattcataattaaattcataattcattttctaataaaaaccacaatttgctttttatttgaagaatgtctcagtgtgacttttgaaatatttactttttatatgtttttcccccactttcttatccaataagttaatgatctaatttgaattctccatcccagatagaagtcgtatttttcattatttttaattcataactacattttcagccattctattaacaaattggaaattatctctactgaatctaaaaagcttttattttttaaaataaatattaatgctacaataagcctcattgtgtgtttttccaaatattatacaca

SEQ ID NO: 2758 - DNA, 294 bp, Homo sapiens
atccaatgcatcaattaatctcacaatatttgtcatattactgctactagattttttatttaatgattactcttattttgttgtctcatacataagtgtgtagaagtaactgagaatatttttaaatatactaatgtgcatcaaaaccaattgtcttgataagcaataaaagaagatgatttattaaaaattgatttataaaggaagctattgtttccaaggtacctactaaaagatgagcttcaagcaatcaaaaggtgactgaaagaacaatataaatagatggatggcttt

SEQ ID NO: 2759 - DNA, 3254 bp, Homo sapiens
gttatggccctgagtccttaaattataggctctcctgcagtttcaaaaagctaattcacactactgtgtgcattagaaaggtggtatatatgatattccactaagggaaaccctaggaacattaaactcctactagtaactggtcacgagtcagggctagaactgacactagtcatttttcttcactgacaagttttcattatgtggctttcccagaacaatttagaaattgatctgcaactgatggaagctgggatgaattgggcgcataagtgaacccaaagcatcagagcaaagtcaaagcgaacatctggctccagctttgagtacaagattaataaaggagtctctccatatcctctctgtccacgttcgttgtggacggggtcaccaggaagatggttcctgggtgatgagagtgtccaggacattgtcttcggtggactactggcacagggacctgaataagacactgggatttacaaagtggaaaagaaatcactgagggatccctcaagccactgaaaacatgtaccatttgccataaaacagcattaaacattaagtcaacagattgcacatgaatatcaacaatcctgcaaaaaaagccagtcccttaagaaacatcaagattgacagttgtcatcagagaaatgatgaggaccaggatcttcagggtaccatctggtgctgtgtttgaagaaaatgagaatgagagatatttcctcaatagatgaaactattggccccagctccaaattcacacttgttgcagcagttaattctgcaaaatcacagaaggaaaaaaagtcaggccaaggttctgccttgctctttcttgaatcacctgctctggaggaagccagttgcatgggaagacatccaagcagccatgggttgtgtagagagaaactgaggcctgccatcagtagccagcatcagcctgccagccatgcaaggagccagtgtggaagccaatattccagagccagtcaagctgacttcttgactgaaactccaggagagaccctgaaacagaaggacaaaaccactcctgagttcctgactgatagaaactggtataaaatggaaagcaattgagactttgtaatcgaggaagtaacaagttcagagctgcattgggagatgactgcaatgactgtataagataaggatgaataccgagggtgtataacaagatcagcgagaagaggattgccattgttccacctggaccaggttagtgaccacagggaggggaagcagggagacttaggagtatattgtgatatactagggaagagtatctcagtgttaggaaatgtcagctttgtaagtttttatcaagcagctcctggtatagtgtatgggttcagtaagacatggaaacagattagttgtatgaagaagggggcattaaagatgaggttaagatttaatggtatggggaatgttgggatcattaatatgaagaaattaggaggaggggtgttagtgaataggagcaccaatggtgagtttttgacagtctttgccagcttaagtttgtatctagccacatagcgagatgaggcattaacttataataaagataaatcaaaagctccccatgttccatgaatatctattctcatatcccggctgtttaagactttcaccaaaatttcttgtttatccttcatatagatctcgcatatttttcaggattaattttactcctacatatggtaatagtttctattgagatgataaatgaaatcttcgtatccattataaaatgataagtagttattacaagtctttaggaaagctctcattttttgtgtgtttcacatgaatcagtgttctgctctattgctctgagtatggctggcacagaaagagttaagttggggaggaaagctcttggtttctatgttttttgtaaaatggcattctgttctattgctgtaagagcctagcgggagaaaaacaagcagggccagggtgcaacagcggctggacagggagaaagcagcagtcaaggagcattcagggcacaaggactgtccgtaagtggaagcatctactgaggcttagacgaatataaccatgaatatcaataagatccttgatccttctcagcatagtgattccccccatggattctctcacattctcttcataaatccatgaactcctagagaatccttgaggtagagtctcgcctgcctacaatcagttcagtaatttaaaggtgatactgagggaaggtaggaagaggttggatgtgcgcatgaacttccaaaaactttgctgttgtgctggaagataacctgaagatcctggagatgtacaaagaaggaactcagacatgctgccccttcaacacaggcagcaatagataaatgggttggtttattgattccaagtctgggggttgtttggggcattagcaacatgaatagggttgtgtagaaatcagccaagggcagagcccaggagaaatggagatcttctttcaaacactgaggatgaaacatcaaccagaccatcttatctccaagatgatggaaaagatcttaggactgattgccagaagtagtaaaatctagaaaggaaagccagtattgacctaaagatgggattctctaagaaaggagggacttagaaaggatcagaaagctcagaacgcatcctggcataaaattaggggatgtactggatggaggaaaggccccatctcagaaactttacgggagttaccagaaagccatgatggattaagaaagaagttaattctcacaggtttcacaaatgaacccaatccaaaatagacatcaatctaacatgccaaaaggttggggatggaaatcagaaaatggtcatcactggccacgaatttctaagttgctggaaataaagatcttaataatcaccatgttggtcacatggctttggattcattaagaaaaccataaatccagttctggggcctagaaaacaaattcctcaagaatcaagggtgggatggacgatgaatgccattgcacgcataatataagcattttcaccatgcagcaacgaggagcaactttgtggtttccagtaattttcaaactcccccaattgataacttgctgattggctgccacccaaatgcctgtccataccagaaagcaatattagggatgagaaaaataaaggaatattaggcaaagaaacttttagcatttagaggaacaagaaatgtgaataagctgtctccaatctcc

SEQ ID NO: 2760 - DNA, 1223 bp, Homo sapiens
taggacttgatttaacagtaggtttaaaaagctgtttcaggcagacttgcaaaaacctgagagtccaagggggaagttacagagtaggggatgcaggagtgagtgcagagtgagaaggcacctgtgtgcctgtttcagaaatgaaagtaacttcctaaactctgctcatgccaagaaaagtatgggtactgtgttgctgcttattaaagacaaaataaatcactgttccaaggagacacttcttgccttttcttgctatcctatgtctacttctccatgattcaggtgctgacgaggactttcacctgggagaagagctcattcttcctatcgtttccctgggaagaacatggctgaaacaacttactgtacagaccacagaagtgagaccaaaaacactgagatgaggaagaggtgtggcaaaatggctttgttgtggtggaagatgaattgtcgtctcaagggggcagaggactgcctgtgagcttccttaacatggagcccgaaaccggtgtttgcacagtccttgaggaaagggtttgctcagcaaattaacagtgtgaacaagactgcaggagggaccatttacctacctgagaacaaactgttttctagctcttcagcagcaccacttacgcacaattttcatgtgctaatggcaagtgattattacctagttagtgaatatacgtggaagacataaaatagcctttactatcccctggttgagacaactcgctaactcagacttgccaggtgctctgaattagagaggtgctacaggaatgtcctctcggatttttggcgttgagcatgcatgcatgtgagcagggtgccatttcttcagaagaaaaataaatgacaacattctgttttggggcttgaaactgcatgactgaaaacataaaggtgacaactgtgatatgcttttttaatgagggcagagatgtcaagagaaaccagccttctaggaacaaaagaatactctgtcaggtgcagtggacttaagacctttttctctcttggaataatgtccttaaaaataaccaaattttccattcaatagaaaaatgttcatcccttcctccccatcaatatgaattgttgtcttggagcatggggcactagcaagccatattgattttggaaattaaaatgggaatgttgaagagcgttttcaaagaattatatgggattttagccatctgaatggctttcttttt

SEQ ID NO: 2761 - DNA, 338 bp, Homo sapiens
agtcatgagtgctgaaggttagctacaaaagaaatgcagatcactttcctgaccttcataatgtctgaagcctttaactttctgtgaaggactgagaataaaaattattttgcagatggggctaccagaggatatttgtcatgggcttaagattatttcatgaagattcacactgaaacacagctcttcctgggtcatgagcctgctggtcttcagattggaactacactatcagctttcctgtgtctccagcttgctgactgtgaatctttggacttgggacttgtcagcctccataatttattgagccaatttggtataataaatctctctctccc

SEQ ID NO: 2762 - DNA, 1166 bp, Homo sapiens
gatcccgcccccctcggagcgcccctgtggtctgacttcagcagcactttccggcaggagactgggcactcgctgtcacccgcgagctgcctccctcagcgagatctgagcatctttccggaggctaacagacctgggcttcggggtgaccactgtgcttgcctcagtttccttttctggagcaggggaaggcccggctccctgcccaaaggcggctgtgcgctaagtggcagacgctcggggagagccggcgcggggcggaccccagcgccagtagtgacaggggcgaacgccgccgggagactccagccggcgggcgagcaggcctgtcgttgctggtggcggcatggtcttctgtctgtcgagcgaggagccgcgccgcccgctgcgaagcgacatggtccacttccaggcctcggaagtccagcagctgctacacaacaagttcgtggtcatcttgggggactccagtgagtgcctcttctagggtgacgcttccagtcccacaccttgcagcccgttcagtgtgtctggaccatttgtttccatctcacatctcttgtctgtcttctggtctgttccgtccagtaggttttctctttttatgtcccacacatcttccacaggagtcctgacaggtgtaataacctgtgcactttttagcccatccttgctcagcatttctcgccctgacagctccccataatttccatcacgaaagcgttgcattgtgtagtgtgtctcctgggtgacttggccgacttaatttctgccaggtgatcttgggtcactgtatactgctggccaggaggcacacagaacagaggcaatgccaggactttttaacctcatcttttctcctgcgtctaagtcaaccacagagctggtgtcgggcacctcagccctgggaaaatggggtcctggacttggaaggagctggggcaggctgaggtctgcctcagccttgggatctctgtctcctcccagttcagagggctgtgtacaaggacctggtgctcttgctccagaaagactcactgctcacagctgcccagctgaaagccaaggtgagggaagcttggtggccatgtcagtggtgggtgggcacagaccctggcctggcagggttctcctccctggcatgggtctgaccagtagggtggggg

SEQ ID NO: 2763 - DNA, 2831 bp, Homo sapiens
ctggcgtgggcgaggcggggctcggggctcgcggtcgctgtagccgcgcggggatctggggtttctctgggacagcggcggcggcggtgggcggaccgtggcgcggggacgagcggccggttagcggcgtgtcggagccggtgtcacctgcgggagaggaaggcgagagagggcagcggctagtcagccttcggagagccccacggcggcaggggagacctcgccggggccgtcacctgctgggtgccttggaaagttagggtcaccgggaaggttagggtcacgtgcctttcaggttgcgggcccttcccccacatccatgaccccacacgccacaggcagcacaggtaacgtctcgcttccctcaagacataccccacctgctccctgcccggcccacgtctccccggacagcagcctccgagttggttgagggggcactcagtgggtgccaagcagggcccttgagaacccacaggagaccccacccccccaggtcccagtgcccctggtccaatgaccgagctccctcctggggcggcaggagccacccctcccttagccacgacgcctgtgccccgtccccacctgcaggggagtcggacgctgtgtccttggtgacactagccaggaactcgatccccccactcatctcctcatcatagttggggggctcctcggtgtctgaaagttccaagtctggggaagacaggttggggtgaggactggggtcactggggggctgtcctcacagcccagtcagcagtgtccatcagctctgtgcacagaggtgcaggcagtcgggacccacagagaggagggctaaaccgcagggctggaggagggaccccacttagagggcagtgtccctggaaccccatcctgggtgggtctgcagctggggccctgaccatgcctcccctgcctgggtggctggagggtccccagaggggaaggtcctgagaggggaggttcccgagccgggagggctggggctgggaggtggtggctcccagtcccagcgttcctgcagggcccccagcgcacctttctccttgatggtgaaattctgcgcagggctctccatgggcagcttcccattggggatgctgctgtttctctgcggagcaaacgtgaagctgctcacaccccgacacagccacacccagccctgactgcccccgctccaggccccagccccgccaagcctcctggtgacccagccttacccgcttctgggcacgctcccgcttgtacagcttggccgccttcttgttctggttgagccccagcttggtcgacttgaaggactccaggcgcttccgcatggtcctgtggaagatttcccggtcctgtttctcgtcctccgtgggcgtgagctcgtgtcggctgtacagatgcttgtactgcgggatcaggcacggaggtcacagctgtgcccaccgccggacattctcgccctcctgccgcaggagctgagcacggatcccccgtggtcccaggaggggacgaggaagccgccccacggggtccctgcggggtcctccagcccccagcccgcagtgcccacctcctgccgcggcttgtacaggccaggagccaccacagccctgtctgtgactctcagctcccgaggctgggctcttccccagggaagctgcatgaccatggccacatacaggaggagaccctaaaactccattggcctcatgtccagaactgaatcagccagtgccagagcctgctgcagccccgacccggcagagcaagcggctctgctacctcagccacgtagctgatggcatccttcaggttcagctcgtggaagacattcaggatccggtctcgagacttctgggccgaccgtctcatgaggaccctgctgaggaacttcctgtcgaagtgggaccacctgtagggacagaccttgggtgtgagcctcaggtgacaggcgccctagagcccgccggacgcgtggcccggccccttctctcctgaattttgtttgctatagtgaccctgtaggcgcgtttaaaatgagggaagcagcccctgccacacgcccaggccgtccgccgttctcccgcctgtcctgttggatggaggccgttagacgcatatgaaactgcatgccgcctcctccagagggtggctcaggacacggtgggtgtcaggcctggtcaggcaagggggctttggccacatggggggcaccttcaggtgcacaggaggaagggcaggggcggacagacaccctgagcccttagacttgtgggagccaagctgaccagagtgaggttttttttagcctaacggaattagagtattcgctggttatccagatcagaagggacggtggcctggccggacttagaggaaactctggggcacaaggaggtgatgcctgtcacttggacatgggtgcagccgccagagccgccctccagggcacagggtgggcccgggtgagcttgtgtgctcacacctgggcaggccccgcggcagcaatggcagctctcctgtacaggctgagtttcagccacaccaagaagtcaaagctaaccgaggctgtgccttccgagacccccgggatggcccctgggaggccaaggagtcggggactgggtacccggagcagagtcactgtggccacggagaaccgcagctgagctttatgaagccacgtggccacacctcccggtgcctccaccccaagcaaacacagatcgctcagaaaatgggaacccagggcaaattgtatgtgctccttactgggtttattataagtgtcacatgttttttataataaaacataggtgatttcaccttaa

SEQ ID NO: 2764 - DNA, 6720 bp, Homo sapiens
tgaactcacatccctggttggacctgaagcatttgggggcaggagctcccctgcagctttttgcttttggcgtttgctgctagtgggaggatcagtgcacatctaccttagggtacctgtaaaattacaactgcggaaaatatccatagtggtgttgcactgtatggtagccactagtaacttgcacctgttgaacacttaaccgttcctactctacactgagatgtgctataaccttaaaatacacactggatttcaaagacatagtacagaaaaagaggctgggcacagtggctcatgcctgaaatcacagtactttgggaggctgaggtgggaagatcgcttgagctcaagagtttgagacaaacctgggcaacatagcgagaccttgcctctacaaaaaaatacaaaaattagcctggcatggtggcacacgcctataggcctacctatttgggaggttgaggcagaaggactgcttgaacctgggaggttgaggccacagagagctgtgatcacaccaccctccagcctgggcaacagagcaagacactgtctcaaaaaaacaaagagtaccactatcacatgaaaacattttttattgatgacatgttaaaatattttggatatattgggttacacagaatatatcattacaattaatttttcctgtctcttttttctttttttctttttaaacggcgccttgctttgtcacccagactggagtgcaatgcactgcaacctctgcctcccaggctcaagtgattctaccatctcagcctctggaattatgggactacaggtgcacaccaccatgactggctaattattgtgtttttgtttgtttgtttgtacagatgagaaatctcatctctacaatcatgaggtttccatgttgcccaggctggtctcgaactcctgagctctagcaatctgtctgcctcggcctcccaaagtgctgggattacaggcatgagccaccgtgcccagccctttctatttctttttactttttgacatggctactagaaacttttaaattacagggtcttgccctgtggtagctcacgcctgtaatcccaatactttgggaggctgaggcaagtggatcccttgagcttaggaattttgagaccagcctgggcaacgtagtgaaaccccatctctaccaaaaatacgaaaaattagcttggcatagtggcgcacacctgtggacccagctacttgggaggctgaggtgggaggattgctgtagcctgggaggcggaggttgcagtgagccaagattgtgccactgcacttcagcctgggcgacagagcgagagcctgtctcaaaaaaaaaaatatgtggctcgcgttatgtttttatgggacagcgcagctctgtaggattccttatgacgcattcactatctcggtcatgagaatctttaaagcagtaaatgctttgcttttgtccgtcttgctataatcaaaactgactcaggacctgcattaaggctctttttttttttaacctcatctcttaactttttgatgcaactcatcttagtgaaattgtggtctcctcctacagcaaccctccctcaaaaaaagaccgaacacgcaattctcatctatctaactctgttaacaatcatatgaggaggaaataatcacatgataatgagtggcatgaaaccctgtgtctctaaattaagcaactcactgtacttgatgagtacatcagtcttcctgccccaagcttttgtgtgtcagactggaattaaatggaagcttacactgcagctgaattcctagaagccctggacttgtcaggggaaaagcccatggggggaaagcccatctctaggctgggcaatgaacttggagactgctcgatcacacacactcataagtaacaaaaccattaatttcttttcttttttttggtggagggacagagtctcactcttgcccaggctggagtgcagtggcatgatctcagcccactgcaatctccacctcccgggttcaagtgattctcctgcctcagcctcccgagtatgtgggactacaggcacccaccaccacacccagctaattttgtgtatttttagtagagtcggggtttcacaatgttggccaggctggtcttggactcctgacctcaacaaaaccagtgaatttctgaagtctcagcatctaggacttagaagaaggagaagcctagcatttcctgattctataaataacaacactgatagtctctagtagatgtttaacagcagttcgaaggggaggggttctgatttgtagtactggccaatttccacggtgtcagtacttgctctgtgaccaacgatgactcacaaacattgttgtaaacatttgacctacattaattcttttaccctcacaagaatcctgtgaagatctactatcattcccagattatagatgggaaaaactgaggcacaatgaggttaagcaccttggccaaagttatgcctcgtgaatggtggagctgagccatgaaccaagacctctgcctccagtctgtcctaacccctataagctaatgcctgtagatggttttttttttttttttttttttgagacagagccttgccctgtcgcccaggctggagtgcggtggcatcacagctcactgcagcctccgtctcccaggctcaagtgatcctcccacctcagcctcccaaatagccgggatttttattggacagcacagctctgtaggattccttatgacgtattcactgtctcagtcacgagaatctttaaagcagtaaatgctttgcttttgtccatcttgctataatcaaaactgaccatgcccggctaattttttattttttgtagagatccctatgttgcccaggcttgtctcgagctcttgggcacaaatgatcttccccccttgacctcccaaagttctgggattacaggcgtgagccactgtacccagcccctttggatttttaattgttcaaactggtagtcatagtcccacttcagaggagagaaccatatatgtgaccagaattcttgggggaaaagtaagaaactactcttaaaagttccttaaagggtagaattctcttttctagaaagagtagcctagggttgtccaatcttttggctttcgtgggccacactggaaggagaaattatcttgggccacacattaaatatgctaacactaacaatagctgatgagctaaaaaacaaactttttttgatcacacaaaaaaaaatctcataacgttttaagaaagtttacgaatttgtgttgggcctcattcaaagccatcctgggccgcatgcggcctgtgtgctatgggttagacaagcttagagtagagcatagtgggtgagagaagaggcttcagatgcttctggcttgagttcaaatcctgactctgccactcactagctgtgtgacctttggcaagtgacttaacctctctgtgtttccatttcctcctctgtaaaatggaaataataataatgatacctgtctcataaagtggtcaggattaaatgagttaatacatataaagagcttagatcagtgcctggtgcctataaacactccagtggtaactgttataatttgtattatctcttggtgattcccataggtcacaggcattgaaagtgctcaaagggccaggtgcagtggctcacgcctgtaatcccagcactttgggaggtcgaggtgggtggatcacctgaggtcaggagttcgagaccagcctggccaacatggtgaaaccccgtctctactaaaaatacaaaattagccaggcgtgttggcgcatgcctgtaatcccagctacttgggaagctgaggcaggagaattgcctgaacccgggaggcggaggttgcagtgagccaagatcacaccattgcactccagcttaggcaacaagagcgaaacatcgtctcaaaaaaaaaaaaagagaaaatgctcaaatgtaataaagacagtattcatcgagcgttttctctgtgccatcagtgtgctgagtgctttacctgcaccatctcatttatttcccgcaaaccctcctgtggtttaggtgctaccatccccatttggcagaagtggaaatggagtcccctagaaggtacgtagcttgtagaaagtcatgtaattagtcaacatcgtacttccagccactggccagcagaagcttccccatcaattcaaatccattgaatcctaatggcaatttaagaggcctgttttattttataggtgggtgtttgtgtgggaaaagggctaccaggaaactgactccgtggtcagctccgttacgaccaaggtcaagggcgtggctgtgaccaacacttctaaacttggattccggatctgggatgtggcggattatgtgataccagctcaggaggaaaactccctcttcgtcatgaccaacgtgatcctcaccatgaaccagacacagggcctgtgccccgagattccagatgcgaccactgtgtgtaaatcagatgccagctgtactgccggctctgccggcacccacagcaacggagtctcaacaggcaggtgcgtagctttcaacgggtctgtcaagacgtgtgaggtggcggcctggtgcccggtggaggatgacacacacgtgccacagtgagtccagccctagggaaggaagtgcctttttgttttgttttgttttagacacagtttcactctgtatcccaggttggagtgcagtggtgcgatcttggctcaccacaacctccacctcccgtgttcaagtgattttctgtgcctcagcctcccgagtagctgagattataggcacccaccaccacgcccaactaattttttgtatttttagtagagacggggttttgccatgttggccacgctggtctccaactcctgacctcaagtgatccacctgccttggcctcccaaagtgctaggattacaggcgggagccaccacacccagccagaagccaccacacccagccggaagcaccttcaactctgcgtgtcagccttgaacagagacctgcttttttaaaggctgcagaaaacttcactcttttggttaagaacaacatctggtatcccaaatttaatttcagcaagaggaatatccttcccaacatcaccactacttacctcaagtcgtgcatttatgatgctaaaacagatcccttctgccccatattccgtcttggcaaaatagtggagaacgcaggacacagtttccaggacatggccgtggagggaggcatcatgggcatccaggtcaactgggactgcaacctggacagagccgcctccctctgcttgcccaggtactccttccgccgcctcgatacacgggacgttgagcacaacgtatctcctggctacaatttcaggtttgccaagtactacagagacctggctggcaacgagcagcgcacgctcatcaaggcctatggcatccgcttcgacatcattgtgtttgggaaggcagggaaatttgacatcatccccactatgatcaacatcggctctggcctggcactgctaggcatggcgaccgtgctgtgtgacatcatagtcctctactgcatgaagaaaagactctactatcgggagaagaaatataaatatgtggaagattacgagcagggtcttgctagtgagctggaccagtgaggcctaccccacacctgggctctccacagccccatcaaagaacagagaggaggaggagggagaaatggccaccacatcaccccagagaaatttctggaatctgattgagtctccactccacaagcactcagggttccccagcagctcctgtgtgttgtgtgcaggatctgtttgcccactcggcccaggaggtcagcagtctgttcttggctgggtcaactctgcttttcccgcaacctggggttgtcgggggagcgctggcccgacgcagtggcactgctgtggctttcagggctggagctggctttgctcagaagcctcctgtctccagctctctccaggacaggcccagtcctctgaggcacggcggctctgttcaagcactttatgcggcaggggaggccgcctggctgcagtcactagacttgtagcaggcctgggctgcaggcttccccccgaccattccctgcagccatgcggcagagctggcatttctcctcagagaagcgctgtgctaaggtgatcgaggaccagacattaaagcgtgattttcttaatccctgtctgttgtctcatagcatgtgctagaactttccttcctacccttttacgacaaccagtaaatccactattccggctcactgtgctcagaaaaggtccatgggatggtctgtttctggcacttatgcacattttcccctacttctttatttatttattttatttttgaggcagagtctcactctgtcgcccaggctggagcgcagtggtgcaatctcggctcattgcaacctctgcctcccgggttcaagcgattctcctgcctcagcctcccgagtagctgggattacaggtgcatgccaccatgcccggctaatttttgtatttttagtagagacagggtttcaccacattggccagccaggctggtctcgaactcctgacctcaaatgatccatctgccttagcctctcaaagtgattggattacaggtgtgcgccaccacacctggcctatttatttttttt

SEQ ID NO: 2765 - DNA, 936 bp, Homo sapiens
gggcgatcagaagcaggtcacacagcctgtttcctgttttcaaacggggaacttagaaagtggcagcccctcggcttgtcgccggagctgagaaccaagagctcgaaggggccatatgacactcctcccggacccctggacacacacagccctggagactggagccttggagcatggcaagtccagagcaccctgggagccctggctgcatgggacccataacccagtgcacggcaaggacccagcaggaagcaccagccactggccccgacctcccgcacccaggacctgacgggcacttagacacacacagtggcctgagctccaactccagcatgaccacgcgggagcttcagcagtactggcagaaccagaaatgccgctggaagcacgtcaaactgctctttgagatcgcttcagctcgcatcgaggagagaaaagtctctaagtttgtggtaagcagagattgggaaatggtggagcctctttcactctgcttccttcctggccctgaataagtcttgtagagcctcaggtttcccaactatgaaatgggtcaacacactaactcacagctttcttctggagaaaatggccaaagagcaagatttcaggctcagcacctgctagggtctgtgaggattcgaaccatataagtcatatttcttggtcccaagaaggaaatagcccagtttaatcccatcttatcaggtgtcagtcacctgtgtcctttcttcaccaattttgccatatcactgtatctgttctaattattattacttatttttttctttaaattggatcactttttaaaaacatgaagcacatttatttcaaagagaaataccttaaatggaaaaccaatatcacatggcacaaagcaaaagtaacatactagaaaagtcgatacaaggaaagtcaatacaaggaaagcta

SEQ ID NO: 2766 - DNA, 902 bp, Homo sapiens
gggcaggggttccggcaagagctgggttccagcctgggttgccaccaacagcgaaagtgactgccaggtggcagtagggtgacttcaccagcttaagtgcttagcgggcaggcgagggggcggagcaagagaagaaaacacaaagggccggaaggaagccggggagacaggtggggtactcgggaagctggagcgggccggcggtgcagtcacgggggagcgaggcctgctgggcttggcaacgagggactcggcctcggaggcgacccagaccacacagacactgggtcaaggagtaagcagaggataaacaactggaaggagagcaagcacaaagtcatcatggcttcagcgtctgctcgtggaaaccaagataaagatgcccattttccaccaccaagcaagcagagcctgttgttttgtccaaaatcaaaactgcacatccacagagcagagatctcaaagattatgcgagaatgtcaggaagaaagtttctggaagagagctctgcctttttctcttgtaagcatgcttgtcacccagggactagtctaccaaggtgttatttggcagctaattctagatttggatcattgcccaaagttgcacttgctggtctcttgggatttggccttggaaaggtatcatacataggagtatgccagagtaaattccatttttttgaagatcagctccgtggggctggttttggtccacagcataacaggcactgcctccttacctgtgaggaatgcaaaataaagcatggattaagtgagaagggagactctcagccttcagcttcctaaattctgtgtctgtgactttcgaagttttttaaacctctgaatttgtacacatttaaaatttcaagtgtactttaaaataaaatacttctaatg

SEQ ID NO: 2767 - DNA, 2463 bp, Homo sapiens
aagctctgggctggcatgagagcccacgtggtatctgcaccctccagtttgctgctctcagcctcttgaattcttcccagtatctgctctgaatccccagagctacagctccttcgaaatggcattagtacaatcaatagaaatgagttgcatgactatggaaatgagagtgaccttgggtcatgtagctgatcatcttgtatccaagaagtatttctctcaagttctcctaattacagattcagcagcgggtctattgtgactcctgattttagagtgcattctacctgacacgcagtttctcttacagtaaccaggtacccattgtgctgtgattgtggtagtagcatggactggagaaatttgatgatgtgttgaatgctagtcatttcctcagaaaaatggccaggcgtggttccatttgcaggggtggctgtgtttcatctcacatcatccacttaccctggccaaagcgagttgaaccagagtcaccaccagacccaaagacagccatgtataggccagcagctctgcctagtgggaaccacatttatcaatggtccacccaatctgcaacacatgatgtcctgatgacttcctctctcctggcactctgtctgctcttccctctcctaacgccctcgcagccatccttcaaggtactatccaggcttgctttctctggctcccacactgtctttcacggggatatcatgaaagcccttatggtgtctttgctagaattgggaaaacacacccctctcatgtaaaatagtcttatttaatgcattaacctcattgcacacctgcacacgcagcagcctgtgaagtacatgccactctcataaccacatgtgccactcacatcgtctagaagcaaaagcccatagggtaccgtgagctgagtggctggtggtacttcctaatattactaacataacgattctctctgaaaccccagcctcgccccagcccactgtgtgttccactccaggagtcagatctgattctaggtcctggttttttcctgtgtgcgctgctctgttgtagtggctgcacccatagctgaccacatcacagatgggtcacatggagctctggacaatactcttccccagctgatctttgacaaggtccttcctttcatccctttatcaataagattggttacgtttgaagctgattgaccacctatgcctaaagaagagtgatttatgtatcacctggaaggagacacccgaggtcacgccacaggtctctcctcagccctggccatttcaacgtatttatatgcaacttggacctagagctagaaggcaggctattaaattttatgtaaggcacaaaacaagaaggtttggttatttaatgaatgagatgaatgacagaaatgtctcaaaattacttagctagacaagaacaaaagtcaatcacacataaaatgaactttaacaggaataaatcaaattttcagaaaatacacaagtgcaggatgggagagatttggcctgaagcacttcctgagacaaagaaatggacaatttagttggcgataatgctgaaacagtggaggtcattgtgcgtctgcctaggagaagtctctcccactcattcccatctgttctgggggccactgtggaggaagcgtcctccaagagcaggcaggcgaaggggagtgacaaggagggtgagaagtcttagccagcttatctaagaagaaatcattgagggagatatatttaggttggagagagaagaattgggaagctgatgcctctctcaggaggcacagagagaagttatattgggtagatcatgtctctacacatgagaacttttaaaaatttgaaatgtccccaaaatggaattaggtactttctgagcaaaaaatgaacatctttgtatgtcaacaaatatacctctacaacagaggttcataaatacatttttttgtattaatatgtacaaagcgatgtagaagacattcctccactgagggacaggttagaacttgcaaggtggcttatgccacacaacatgggccagctcagctccgctgtctctgaaactttcttttgtcagcagagcaagagtagatttatctctcaggggaaaaattacgttaattaggctcatgagtgaatgccagcttaatatagtataatgaaaaatatggcaaaagaaccataatgggaagccagataacaatcaaagttgcaggggacacccccctcttggaggttctggcagattaattggacatataataagtaaggaaaaacgtttagaatgattgaggattcagtgaagtttccagctgtaaaagaaatcttaataaaagtttcaacttttctatacattagctataccccattaaaatacaaaacagaggggaagaaatccactatgtgatgatcacaacactttactgacataaacaagaagacttgcctccatcatgct

SEQ ID NO: 2768 - DNA, 8937 bp, Homo sapiens
atttatttttattttatttaaaaaacatattgaggtgaaagccacataacataaaataaaccattctaaagtgaacaatttggtggcacttagtatgttcacgaggttgtacaactaccacctttatctagtttcaataaatttctgtcactgtaaagtaaaaccccttactcattaaggagtttcttcctgttcccccttcccacaacctctggcagccaccaattcatgtcctgtctctatgaaagacaatttatttttaactttcttatttgtaaccaattccttccctgacactagtggtctgcccttttagtgtgataatgcatctttttccgctctgtgaactaatggtcagaagcaagggaattagactttaaaaggtcagggttaatggctgaccaatgaagagaaggcagtgagtagagctattgccatgtaatgcctgagagtaacttttatttcaaaaggatgtatccaccattatgccattacgtggtgcttctatcctcatgagacagggacaatgatagggaggaagaggaagggaggaatgggtgaaggataaaaggtaacaaaataaatttgtccttgttttagtcttgtcatctcagacatgatctgccctccgcttaactggtatcactgaggcagcttagttagatgataattttctatgtaagcagcatcaagcatttgccaaaattttgacatgtatgttggttttgtgaaaggaaaataaatctgggggggttcccaaattgctaagctaaagggaaaagtcaagctgagaactgggtcatgcaagcctgcctctcctttcagttcctaaataagatggctacaagatgaaaagctatatgcctcccccatattttgcccacatggaaattcctagtgagctccaagatctgtaccctaaggtgtttctgttaaaatttcaccatagcaatgcaaattgatagcttatctttacaggtgcagtcaccccgcccccaccccccccagacacaaatgaatatctgattgttctcctgccccactctttctatattatctgctgtaaaaatgcagattccctgcattattcctctgccccatttgtctgtgtcacctgatgtaaaaaaaaatgcagattcactgagccagacaaaggcatgaatgactatttttccctaccctcctcttacatgaaaattgtgtacttctcaatagcctgccctttcccttttaaatttggagccctcaaaatcaccttcggagaaaggcatagacctgtctcctgtgtgcacatccttaactttggcaaataaacctcataaaatgatagggacttgtctcgttatttttctcgattgacagtttttaagcaaaagagccaacagtcctttctgtataatttctagagttcatgcaaattatttactgtctcttcctttgctacatttaggagtagctgctgacttttttcaggaacacagcattaatggctaatgaaaaatttaaggaagagtgaatatggactgaaaacagaataaaaattgttacacctcaaccagaccttaatcttccatttacatattttcatttctcttatatcaaacctgcttcctccaaggagctagagatacagttgagaggatatacccacatattaaagaggtatatagcaggtaggatgttactcacttagttgtagaacccccgtccctactgctaaacgaacccttaatagcggctacactgttaggatgtcctgatccaacatcgaggttgtaaactctattgtcaatactgattctagaatgggattgcgctgctatccctaaggtaacttattccgttgatcaaattattgggtcaatgtgtattaactcactaagactagtgcgatcttagtttaggttgtttggaggttgaattatgctccaagttcacccctaccaaattttttaatgcaggaatagtaggctagggcctgtaggcttgtttgagtttttatttgcattaatgaattaaagctccatagggttttctcgtcttatttgtttatatccgcctcttcacgaataggtcaatttcactgattaaaagtaagagacagctgaaccttcatatggccattcatacaagtccctatttagggaacaagtgattatgctacctttgcacggtcaggataccgcggctgttgaacatatgtcactgggcaggcagtgactctaatactggtaatgctagaggtgatgtttttggtaaacaagcggggtaagatttgctgaattccttttactttttgtaatctctccttagagcatacctgtgttgggttaacagtgtaaataatagggtgcttattatattggttattaatattaggctgttaactgtcagtgggttattctggtctgatgtaagcttatgcaatggagaatgtcttcatgttacttacattaacattattgcttctattaagtaatagattagtccaatgtgatgttaggagttcagtagactgattagaatttaagatagttagctgttgagcttaaacgctttcttaatcggtggctgcttttgggccaactatggtggtaatattttttactctctgtaggaaggttgtttcctagggtctaaagagctgtccctctttagactaacagttaaacttacagggagattaagtaattctgtgggtaagtttaaagctgaactaagattctatcttggacaaccagctatcaacaggcttggtaggcttgtgaccgctactcatgcatcttcccactattttgccacataggtgagtgtgctctttcagctgttcttgggtagttcatctggtttcgggggacttggctaaagttctctgtgtatagttatttctagttaatacattatgcagaaggtataagggcttgtctttgctttttagtgcttgatacagttctttcatctttcccttacggtgctatgtctattgtgccagggtaaaaatttctatcgcctatacttttgtctaaggtaaatggtttaagatagttgataatatttttagcaaggtttggggccagagttggctcaaagtgattaggtcatgatgaaatcttctgggtgtaagccggatgctttgggttaagctacattttggtatgtccaagtgcaatttccagtacacttaccatgttacgacttatttcctctatacttgcgtagaaagttattagtaatagtgatttctagagtaacagttgaggagggtgaccggcggtgtgtgtgtgcttcatggccttattcaaccaagcactctgctcttggtttactgctaagtccaccccccagtcaaatccaacagaccataagaccacggaggaaggatactttttgggggttctgatgcgggagctacagaaggaaaggctgcagagtggaggtaccatcaacagtgaaagcgttgaacattaagacagagatgacatttaccatcaaatccttggtggtgcctttcctttccttagtcctgtttgttgaggagccttggagaatgaagttgtggttaaatgttttaatggtagtcactgaagatgtctcaattttttcagctaaaaggaaataaatgggaaaaaatgttacccagaagatggactgattgattgttaaggaaaaaacaaggtggccagattactcagacttttgttctagacttggaatctcattcctgtactgtgtttgattgactatgggatctttttgttttgtgtttatttttatgatggacaaataagtcagggcatcattgatagctttctgtggaacgatagctcagagataacccagtacagttcataaatacttatgtgcagtcctgaaatagaaaaggttctaaaacttgcaaatttttacaactttggagccaaaagaatctgattataaaacctgacctgaactgacatgaggccatttaatgtccttgtccatctcatggagtgcaaatgtttttgtgctctgctgtaaggatattcatgtgtttgtttgattttcagatgctgcctagatgccatggggggtgtaaagaaatatacagcacgtgtactatattacctttctaatgcccaagaaattatgaagcacatagggacccaagggtttcaaataaaggactgtgaatctgtgataaattttaactgcatacagttttgtagattataaacattcaataaatgtttgttaaatgatcaatagcagaaccaaggcccaaatgcacatttttggactttctcctcctctaatttgtaaatctaaatttctagtttggtatcacccttttgtggcttctgaacctggggcatttgttgaaaatgtccattagataaaggcgacatgactggcattgccagatcatttctagattggacactgtggcagatacttttggtgttctgttcacttctctttgacagtcaccattccagcatattccaacagatcctacagcaagtaccaccactctgtcttggctcatgcatggggcaggtcagaagtaccagggagttaatacctctagaagtaactctcagccagagatggatgggagttttagaacaaatatcccatctccctgccctttgggcagaaaactctgaggtgcagccaacattgtctcccagaggtcaccaggaggacttagctttatttgcccaaagaaataactcctaattcaagtaccctgtattgactgacttaatttctttctctgaatcatttatcttcttctctagcagtgcaccttccaaacaagctactttcactcctatccttgtcccagggtttgcttctggggggacccaaatcaagatagacaagagcaattctgtgtgagaacactccattagatctaattctcaaactcaggtctctttgttacccaaagtaaatgattcaggcttaattttttggtagctttgtggttttaatttagcatacctttcaccggtggagcaggcagtttcctcctttgctgccttgatgtatctatggtttgtacctacaaacagaacacaatgagcaatatacctttgcagagccaaagatattttgtcttctaaattttccaagccatgtaacattccaacagagggagaaagggacaaacacacctgggtcctttgcttctgatcccgtcttcttgtgaagcgcacacatggtgctatgtttaatcctgcaatggtcagggctgaaatccggctctcaatatctgaaatcttaaagcaacagaaagacaagattggcagggagaaaatacggaaggggaaaatatttcttaaaagtgttaagaatttataaagacaaatctgctttgatgtatgctcattcattcattcattcattcaacttctaccaaacactcctctatctagtgtgtagcaagaaaataaaacacaggcctttctttataagtttaaatttctagtttgttagctctagagcatgtcaacaatcctgtcagagtatgcctggggataaatgaaagcctggggacacgatggggaccctggcccggggccacctggctcagcatgggggtgagaagtggtcagggaagtcataggatttatatgtcctgttatagtcatttatatgtcctgctttcttcttccataacttcatgaatccaaaaccacagcaccaggttttagaagggaggcctagcggtccctggttcaagtccatctcctccattaagaagccaaccagccttgagaaactctctcccctctctgggcatcattttcctaatttgtaacatgggaaggtcaagagagagctcagattttctttcagcagagtctgaatgcagaaatggaaagtaagaacccacttagtgcccagagagaaccctggtcctcccctgtctccagaaatgaagatattgtccctgctcttagaaaagggcattattatgtgccaggaaccatgctaagtgttttaaataattctatgaagtaagtaccattatcttggtttcacagataaggaaactggctcaaagggacaagtgatacacccatcatctcacagccaatctgggcagtgcatggaattcatgtcagtggccatgctctcgtcacattgccacagtctgagaggatgtgccaacacccggtatgggggacgctggaaaaggcagggaaaggctagcagagtcaagggaagaggtcaagattctgctgagatggtacattctgagtgttgttagggaatcagacaataagctgatggtagaccctagccaatgtgtgtgtgtgctccacacatgaggtctccattgcctctcagccctccacaattctgtgctactcaagacaaatttgaattctgctgtcatttactgagggcttctttgaacaaagtctactgtgataggagctataggaggtacacagaaagattgaagggtcagcaaatttggaagatgcatcccctacccctgaggggtggcagtcatggtcagaaaaggaggaggaggtaggtgaaggccaagtctgtggcagctggtaagagaattacaagctacccagtagccagccccagaaggcaccacttgagtccttcccttcctggtccccagatgcctttctgttcttaatcttcaaatttcacattaagaactgcattcttttggtttatgaaccaacaaattacacaagcctctgagaaaagttgcaggctaagcttttaccagtcataagcaactggtgtggattagatgctcacattcttccctggaagcagttttgatggagggccttgctcagagggccctgggaaagacaaggtcaatgggaaagcaagctgctgacctcttcatttgtggactatcaggttctggaataagaaagggctaatttttcaggtttcagtccataggacaaaggacaaagaaagaggaggctactgagggctgattttgcctgtatcttctctctctatataattatgtcccacttctagaactgcatgtccaaggagctatacatttgctagaaggggatgaccaattcagctctgagtttcctgggagccaaagccaagagctccatgtccacaagatcgaagaccaagtactcagaagaacagcttttcctgatactaggagttaagagaagctttctccaggaactctcatagagacaacttgcatgatgcagtggacagcacccttagcatgctccacaagggtcattctgcagtctctttcagcactggataacggcactctgtctcaaaagtagactctaagacccatgtgggcagagaggagagttctcacctggagttcagcatggtggacttgggctgcagccgtggccacctggtcctccagatccgccagatgggtctcatcagtgccactgtggatgcagcgggcggcatcttctagctcagtcagctgggtctccagtccatacacagtgcctgctgccaggtatacctgtagagacagtgctacatttgagttcatgtctgcagacttgggactggttgggggtcccttgaggggaccccagcaattcaggggagtgagataactggacttcacattgcaggggggatgttatttttataacatttataaacgttcttcacacttaaatgtgtgaggtcttgacacccctcactgtcaaccacaccttccctctcccacaaactttcctgtaagaaaaagcatttcaaagttgcttttgttcaaatagtacaaaatacatgacatcagctatgcgaattgtgtattggtccagtgactataaaaatgactataaagaagaaacaaagagactcatgatggagttttgccaatacaatttttggttggcatttagtaattgagaaaaaaatcagaaaacaagaaagaggggaaataatttaaaataattacaaattttgagtgaattctctctgattaattagcttctgcatgcttcaacgaggttaagggaattaaaataaacctgaagtttgtaatagaaaaatatttcttagaaaatagtgtgatgttaagagaagcatgtatctatttatctgtcaattaggacaattgttgagagctgttaaaaataagagagcaagtctgataaagaaatttaagaaaaagaaacattttttacttacaggtttataaggttattcccataaaagtgagcaaggtgaaatccttgaaataattcagactaagggatgtgggccagggtgaatgaaacaaatacccccccatcctaatcaatactgtgatgaagcaaccaacaacataagaaatgagatgtatctaaagaaagtaattacttaaagagaggttcttgaggtttaatcaacatatataaaatcctaaacctgtaatcacagcaatttagagttgatttgaatgaaacatatggccaagactttaacagtttccttaatttgagttaaaaatatagcagagttgaagatgagtcaagagctcaggtacactagtcatgcacttttttttttttttttttacacttagtgatgctgtgttggtgagggaaagaagcctgagatgttcccactctgtcaattccttggcatgattcactcatctgttttaaaactggcaattttacaaaacatttcaaggtggagcaaaggcaggtacaggtttgatgaaagcaaatttgcgcatcatcatcaggcataattacctgggctgtgggagctttcagcagtgactggtacagaagatgtcacatcaaatgattcaccagtcatacaggggccatgaatcaaatgtctgatgggaattgccacacttcagtttatcttttgttttatatttctttattatatgctgaatatgtaattctgtttcatacagagaaattctgtttctaagagatcttcacaatttaatcttag

SEQ ID NO: 2769 - DNA, 126634 bp, Homo sapiens
ctcaaaaaaaaaaaaaaaaaaaaaagtgaaaggccaggcactatggctcacaactgtagtcccagtattttgggaggctgaggcaggtggatcattgagaccatcctgggcaacacagcctctgtctctacaaaaaaataaaacaaactagctgggcatggtggcatgtacctgtggtcccagctatttgggaggctgaggtatgaggatctctgaaggccaggagattgagggggcagtgagccatgatcgggacactgcactccaacctgggcaacagagtaagaccctgtctcacacaaacaaacaaacaaacaaacaaacaaacaaaaaaaaggggttttaactctcagcctatacaaaaatgggctacagtccaaaattggcccatgggtcacaatttgccaaacactaatttagagcaaattgtatatagaaaaatgaacttttaccaaccaaaatttttatttatttactcaagtttttaacacattttatgtaagattgggctgactgtgtggacactggcaggccatgttatcctctgaacctcacttttcctcctataaaataacggaggtaccattctatgacctcttagcagctttcttttgctaatattttgtgatttaatggctctgaataacctacctctgttggagttcatctttacttatatgtgatatataaaattagcctgtgaaaaacattctcccggcaagcttttggcttctattttattttatttcactcttttatttttatttctttaaatttaaaatataatttattgtccatatttgatatatacaacatgatgttatggatacatatagatagtaacatggttcctagagcaaatcagatttacatatccatcattgcacatcgttgcccatggttttttgtttgttaatgtcaagagcagctaaaatctgcccattcagcaaatacagcacacatttattagctgtagtcctcatgttgtaccacatcctccagatctgctacctcacaacctatgacctacatcccccatttccttcccccattcccatcccgtgcccctggtaacctctgttttattctcatctctgtatatttcactttttttttttaattctacatataagtgagattaggcaatatttttctttctgtgtttggcctatttcacttactggcctccaggtttatccattttgtggcaaatggcaggatctttttcttttctaaggctgaataacacttcattgtatatacagtcctaccttagtgtctataggggtttggtttcaggacctcccaagaataccaaatccacagatgttcaattctctgacataagatctacattacttgtaatatctaatacaatgtaaattttataaaagttgtttttctgcattatatagggaataatgatgagaaaaaagcctgtacatgttcagtacagatgcagtttttgtctcaaatgtttcccatctgtggttagttgaatccacagatgtggaactcatggagggcagactgtgtataccaccgtttccttatctatttgttgatgatggacacttacattgtttccatatcttggctattgtgaataacgttacaatgaatgtggagttcagatatgtttacaaggtggtgagttcatttttgggggcgtatgcccagaggagggattgctgggtcttgtggtaattctattttgaatttatttggaaatctccatactgctttcgataatggttacgttaatccacatttccaccaatagtgtaaaaggcttctcttttcttcacatccttgtcaacgtttgctatctcttaactctttggtaatagccatcctcataggtgtgaggtgatatctcattgtggttttgagttacatttcccggattattaatgacgctgagcacctttttatatacctattggtcatttttctgtcttctttggagaaatgtctattcaagtcctctgcccgttttaaaatcaggttatttgtttttctactattgaatggtatgagttctttataaatcttggatactgatcccttatcagatgtatggtttgcaaatatttttttcccaattcataggtttccattttattttgctgattgtttcctttgtagtgcaaaagcattaaatgcagggaaagccagaagtgaatttctacatcttttagggttcagtttgccttggttcggaagtttctattaaattaggtgttttggatgtgcattaattcttcaatgcctcctgggaatcatttgggacactgccatgttattactgcacagcctagtgaatctgatccgtgggatttttcccatccaatactcccacaaatgtgggctgtaactcatgctaaatgagcacatctataaaacagagaactaatacctaccttgtgggcatgtggtgaaacttaattagttaatgcttctaaagaactttcaaatccgtggataaaatgtattattcaattgctaagagctatcattgtttattatttcctctagtatttgccagtgagtgctttactgttaggatataatggcagtaattttgaaacaagctggcatttgactttgtttgcagagtgcatgaagctacaggtaacattttaatgaaatctttccctcttccccgcagagtcattaggtacacagatactgcctccttctcttaaagctttacacaattgagtagtatttaagtaacatcatcattgctataaaaagaatcaaaagaaagaatctttttccaactaagaccaagtgatttagtaacttaatccttgtttataatttttttgtcactaaggctatgtctaatggaaggaagaacaataagttgtattcaataattcactaatagttgtaattgaccttttatgttggtcagcattatagtttagataagagtcacttgagacaggccctaagttactctgctattatttatatatgtacatatatacacacacatatatagacacacacaaacacacacacacatagctttggcaaggcttaccatttttagatgtcatgccatttaaggctcacttgcaataatgtgaaagccagccagcatgttataatatgaatagaaagaacactggcctggaggcaagccacctctttagagactcagcttttccccttcttagcaagtttcttttctttctgcatttcaggtttcttgctaaattggacgattatacttgattttcaaattgtgctttttggaatttaaggcttagaacagatgcttcaaaatttctaccaacagttaagtactttccaacaaatattaaagacttatatgcccaagaaccctcatttattattttttcttatatatattgtttccttttacacttttatctgaagatttttattacttaggaaaagaattctattctgtgactcaaaagatcccttccagttctggcgtcctataatctttactctcaaaagaagctaaacaccacaaactttgacaagacttcctaaaaatacagctcttagcacagagcctatggtccatttaacagagaaggaaaatgaagctgaatgcagagaggtctaccttctgaaaggcacatttggtaagtggcagaggtgaaatttgaacccaggcaaatgtactttagtgcctgaatgcaatgtcaatgccatattgcctatagatgtttggggcaccatgctaataactgtcaggggccacaaatatgatacaaattttgtcctcctagagcttatggtcataatttaagctgaaaggaaatatgagtgaaagcactgaaagaaatgccaggcggcctgcacgtcggtggccagaggagaggtgcagaacatggctattctgggcgtcctgagaagagggccatagaagcttggcatcactgaagtgtcattataaaaccagccaaaagcattgtcagcattccgcaagatttccattgccttatccaaagaaataggagcgagggagagacgctataaaaggaagaataaaggaaacatctatttatcagctgtgttctcagtcatccctcacttggctgagctgacagcctatgataatcaggctaaggtggattgtcaggtaattctgtgcaggcccatagctctttggcttcctatcacctcccttctcccacctccctaatcagtagttaacactctcttcattgccattgcccttctcctctcatggcctttcttagtaccctggccacactgactgtatccttgtttccatttctgcttttaatttagtatgatacacatatagcattttggaattgtcctctctgataacatcgctgttgctctcctgagtgcctgagtcatcagggagaagtcccctgaagtcacctctgctgaccagtatggctaggttacctcatggcacagaaggattcagcaggcagagtagccaatagctatgactcttcctcaaactctgcaccaattctgatacatacacatgtacccacacccattttcaggggactagacactgtcatatccttgactcatgaaggagaaaagaagtaaagatgtagcatgacaccttggaagagatttatgaaactatttgttaagaattgacttgtgcagatttcaacatgatgaaatggtggtagtttatagtggttgttgaaatttgttcagagaactttctgcagcgatggaaatgtcctctgtctgggctgtctaatatagtggccacatgtggcatttgaaccctcaaaatgtggaacttgaaataaaaccaaggaaataaatttcaacttttatttaatttcaaacatttgactagtggctaccacatagaacagggtagctatggatcaaagtatccaaatattcagaactgacaatctagggtgatctagtgtcttcctagttatataacatataaggtgagtttctatacattacatgattgtatttgagcagaaaggtctcagtacatcaaggatttctattctataaatatttattggaagaacacatatgccatttatcctccagctccctgtctcagtctcagaatcttcctcagtgcagtgtttcgggtagctagtgtcaattggttgtatttgtgaagagagagacacctgatttctatctttgaggtgcttgagacaacatatattgtgtactttgatacagacatcatcaattaagacttgatgaccaaacgatctttaaggtctgatcatgagattatatgattccatcaattaaaagagaatcagttctacatcttatccagacttctccatagaacttcagaagagaaaccacctctatagcactaacatatactaaaaggatggacctctacttccaataaactccctccccacacgtaaaaaaagaacagaaagaaaaaaatgtacagcaagattttaaaccatctattggttgaagtgatatcaaataactgattgttttctctggtttctggattaatgtatacacggtgtcaggccaagtcataagcattataaaaacttactacggtcaagcacttttaggtgctggtatagtacagggtttaatgacaagttattaagtattgtaaagtgacgtagcaaaatcaacaaagctttaccaggttgtacttaagttaaacagtaattctctgtgatatatgcaataccatatatatgtatcaattctagcatcaaaatgtacatgtgtatatgtagggatttcagtgatttttaaaacacaatcaggttggcctaaagcaagaagagttatgagtaaagaggtacttgaaaaaaattaaaacattctaaacactaacacgggggacaagtgattctaaatcatgttatagctctatcttttaaaactgtaagaatgtcttacaattattatgtgattatagtaatagatcatagtattttaaaaattattctccgtcaggcgtggtggctcatgcctgtaaccccagcactttgggaggccgaggtgggtggatcacttgaggtcaggagttcgagaccagcttggccaacatggcaaaaacccgtctccagtaaaaatacaaaaatcagccgtgtgtggtggcacgcgcctgtaatcccagctactcaggaggctgaggcgggagaatcgcttgaacctgggaggcagaggttgcagtgagtggagatcatgccactgcactccagcctgggaaacagagtgagactctgttgcaaaaaagaaaaaaaattattctcatccctattgtgaacttatacctaaaatcagttattctttttaaacactcacagttattttcttcttaaatatataaattaattaatttagctaattaattttaagtaatttaagtttctataaagtcatttaaatatataaagtaatttattcatttattagtgatttattgtacaccttcttggaacaaagtatactgcagtatacactcttgagagatagtaaggtatggggcttcctctctcagatgtcggtttcttcttttggaattaggtggatgtgaatgtgtgtgcatatatgtatatatagtcatccctcagtatccatgaggacatcctgtggataccaaaatccatggatgcgcaagtcctttatgtaaaatggtgtagtatttgcatataacctatgcacatcctccctgtataatttaaatcatgtctaagttacttttaatttctaatacaatgtaaatgctatgtagataattgttatactgtattatttttaaatttaattttattcttattgtattacattttaattttattttttggatattttcgatctgcatttggttgaatccatggatgtagaacccatgaatatgagggctgactggacgtacgtgtatgtgcgcatgtgtatatgaatctacgtgtgtaggcatcatgtgtatacaggaagaaaaagatgaaagagagaaaaaaggaaaaaagaaagaaaaaggaaggaagaataaagtatgatgaaaattacattttgtttcgtatcctttgaagcaaagaggtagtgctatggtaattgaggagacagatttatatctgcactgggcctttaggaatgaatttagacctaaatggattttgagcatgcagatatgacctgagcagacagggatttcaggagaagcaacaacgatatacagttataaaaaggtggaggagatgcaggcacctgtctaattcaccttggtttaacataaaggcgcatgaagggttgttgagatgtgagagaggttactgaaaatgatggccaggtgtccagttcgggtatcatgagcaacaaaaaccctaaactttcagctgttggctgaagggagttgagcctccatataggactgtcacagatagttaatcctgtgctgattattgtaaattaaaagaagttgaatgaagcgggggcttttgcagggtgatacggaatgactccagtgctacagcagcacatcctaacttctctgacttgggcagcataatgttatagaaaaatggagtgaattggataagggttgaatatacttttgttgtggtcttggctccacatcctattacttgtgtgatttgggggaatcttttaactcttccgtagtgatgaatcgtgttttcccaaattaatgtccgccaagaacctaaggatgcgatcttatttggaaataggatcctgaattaagatgaagccatattagcttaaagggggtcccaaatccaatgattgataagacgaggagaggccgggcgcgagggctcacacctgtaatcccaacactttgggaggcagaggcaggcggatcacttgaggtcaggaattcaaaaccagcctgaccaacatgatgaaaccttgtctctactaaaaatacaaaaactagctgggcatggtcatgtgcacctgtaatcccagctactcgggaggctgaggcaagagaactgcttgaacctgggaggtggaagttgcagtgagccgagatcatgcctctgcactccagcctgggcaacagggcgagactctgcctcaacaaacaaacacaacacaacaaaacaaaacaaagcaaaaaggagagggcacacagagaaaaatgccaaagtggggatgaaagcagaggctgaattgatgcatcgatgagccaagaacaccaagtattgcctgcaaccaccggaagctaggagagaggcatggaatagattcccccccagagcttctagaaggaaccacccctgcagcacgttgatttcagagttctggcttctataaccatgagaaaatgcatttctgttgttttaaggtgcccctttgtgctactttgttatgatgaccctaggaaacaaatacaccttcaaacctttatttacttcattgtaaaatggggatgatgatttttacctctgagagtttcgataagaattaatgaaccagaatcaaattaagaatacatttatcacatttaaagtgctctacaaatatctgcgaatttaaaactccattttctagtgttgggaaatatatctaaccattactgagcattaactgtgcatcaaccaaagcattaagcacattatgcctgctctctcacagtagaattagcaatatttagttgtcattttacctgcttggcatttgaagcttgatgtcaacaaaattttgtaagtctttacttactgggggaaaaagtgagtgcagtggttaaaatgagatgattaatgcatttttactttctggcagtggttttttttagtcaaaatcatttctttttctctacagataagcaaaattgctatgctatggtttaataagtaaaatatgtatatcaagttaaaataaaaatttcagtgggtgttgaattccatgctctggttttcaattactactcaccctctcttaggaaagtcacacttctcatttgccttggattagatggggggaaggagctccatgtaccacatcgtaagtgtaatatggaattccaggagaaaatgcatgtgtaaagctatttagctcagttcatttttagatgatttggcaactgttggctaatttgtttgcgttgctctcctgagagaactatgagttgggttcttttgtaacatggaagctgaaatggagcagttcagtgatttactaatatgtaaaaggagtagatattgctgctggagctggactcccaggagtttagggctctactcattgatgagcttcccccactagcatgtgaagaccccaggcagcacccacaaactattcctgaccatgctttaaatggccaaataatttttctaggtttatagtatatcacatattgcaaaacccatttgctctgtctttagccttccagtttccattccactgccttatatgcagaaatacaatgataactataatggggtatgccacctgccttcaatgtgtcatgtctagtaatggagagaggaagttaaatcacagtgtgtgaagtggcatgccattttttagagctccactttaaatagacaaggccacttactttcagcaagaatgtggaggaattatgtagaccaaaacatccaggtgctaaacttgcccactggtgtggtacaaggagttaggaaaattatccaggtgtggctgcaaatgagggctcaatgtggtgaacaaatgatgttagcaagattttcagttatagttaaacagttgctgtgggaagccaggagtgctatactggatgaagtgacattacgttccagtagttgggctagatgtcgtgatggatgctagaggagtgtgaggacacagttagtctcaaatatccagacactggcatcagagtcgtaggacctagtgtctagcctgaagtttaggaataggactcttctctatgaaaggggaagtgaaaagcaaattcgggccagcaaatagatggaggacactgaactctgaagcaggttagcaaaaaaagatccttctcataagaacaaaggcaaaaaaagtggcaatggctcaggaactggagaaagagataaggaataagctgctggcaaggacttgatacgtttgaactccagaatatggaaccggagacagtttagtaaattgtgttatgaggcaaaatttggggggaaagccagaattggaagtgcctgcagatgtgaaacatagctttagcctcagctgttggggggaagaagagtgaagaagtttggaaccagactaggccataatatagtttttctaagaaaaaaaaaagtgggccgggcgcggtggctcatgcctgtaatcccagcactttgggaggtcgaggcgggcagatctcgaggtcaggagattgaggccatcctggctaacatggtgaaaccccgtctctactaaaaatacaaaaaaaaaaaattagccgggcgtggtggcgggcgcctgtagtcccagctactcgggaggctgaggcaggagaatggggtgaacctgggagacagagcttgcagtgagccgagatcgcgccactgcactccagcctgggcgacagagcaagactccatctaaaaaaaaaaaaaaaaattgaatttttttatagcaacaatgtgtcacacagcgttaagagcacaggaagcgtggaagagttctagttcagcctttgttaggtatcaggggcatgaccctgggtaattttttttttttagccctgatttccgtatctataaaatgaaagcatttctctatattaataattcccaaatagcaggccatgggctgtgtgttaggctgttctcgcattgctataaagaaatacctgagacttggtaatttataaagaaaagagatttaattggctcatggttttgcaggctgtacaggaagcacgatgttggcatctgcttggcttctggggaggccccaggaaacttacaatgatggcagaagccaaagagggaccaggcgcatcacatggccagagcaggagcaagagaggcgggcagggaggtaccccacacttttaaataagcagatttcttgagcactcactcactatcacgaggacagcaccaaggggatggtgtgaaaccattcataagaaatccaccccatgatccaatcacctcccactgggccccacttctgataccggggattccagttcaacatgcgatttgggccggagctcatccagactatctcaggctggcactaagttgctaataaggattacctagggagcgtgttaaaaatacgtgttcttgtgttatatcctcgcagattgtgcttgaaatagtcgcggacagatcccagaaatctgtgctttgaacaggcactccacgtggttctgaggtaggaatggagatgagactaccttagagaccgtgaagtctctgcaacattctgtttgtagtattttctcttatcatcatttgcctttgtacttttttgtattcatgaattgggatgatgctcaaagatccaataaagaagtttattggcacactctttccagcagtcacttgaagtctgggagccaaataatgcagggaagttagtttttattgcttactcagccccagcagcacaaacaatcaaaagtccaatctagaatctgttttcatctgacttctgagcccatttttgcagatgcagaagtttgcattcttgagatcgctggtttcctttttctattttatgaggcttttctgaagcctaactagtaatatctccccaacattttaaactctttagagaaaaagttttcataaataaatataggatcagtcatggtggtgattaggtgatttctgcagtaatgcaggacaagggaaaaactttctggagtttgtctcagatgaagtaaatcaacttgctgtgttcagtgggttacttttggagaacatgatatgctctagggcccacatgttaccttgttctccaaaaatagcatttcctactcattaagcaaattaattctttgtctttcagaagataaataatttacagattcttcctagattctaaacctcatagtcagtcatgatagtctgttttatcttatattcatataaagttaaaattaaacattattagaaactttgtagtttacagaaaccatgttccagagagaggaaatggtttgctcaagatcacacagtaaattggtggcaaaaacagtctcagcctctggttcttagctctgcattcagtggccaataaaaataataagaatattctccatacctatattagtcagggttctccagagaaacggaaccgataggattgtgtatgtgtgtgtgtgtatatatattaatatctatgtagaaagtaatggtaaaaaccacaattacttttgcgtcaacttttatagtaaaaagtatatatttatgtatatatgtgtatatatgtatttatgtatatatttatgtgtatatatacataaatgtatatatacttttttaatgtatatatttgctatatatacattaaatctataatgaaatcacaggctcacagtgtcctccatctatttgctgccccgaatttactttgtatatttatgtatatatatgaaactttggttggaatgaaaaatagtatatatatatatacacacacacactaatatatatatacatatatgtctgtgtgtgtgtgtgtgtgtgtgtgtgtgtgtgtgtgtgtgtgtgtattcctttggttggaatgaaaaattgtatagcctctctggaaaaaacaatttggcagtttttatttatgttatgctcttgagttttattccagaaaaacaaaagtgtattcccacaagaacctgtatatgattgttcatagcagctttatctaaaatagctctgaagtagaaacagcctaaatatcctaaaacaggagaatggtttaacaaactgtgttacattcataccatgaaatactactcaacaataaaaagaaacaaactattgatatctaacaacatggatgaatctccagggaattatactgagtgaaaaaagccagtcaccaaaggttatttactgtataatcacgttcatgtaatgttttttaaatgacaaaattttagaagtggaaaacagattagtggtttccagaggttagagatcagttggtagggtgggaaaaggaaaggagagtatgtttataaaagggcaacataaaagatacctgtgacaaaactcattttgattgtggtggcctccacatgaacctctacatatgataaaattgtatataactaaacacacacacacacacacacacacacatgcacacacacagagtacaagtcaaactgaggtctgtgaattatataaatgttaatatcttggtagtaagactgtaatagttttgcaaaatattaccattgggggaaactacgtaaagtatacacgggttctctctacattatttcttacagttgcatgtgaatctgcaattatcttgtaaaaatttcaaataaatgatatccctactaataagcaagttagaaaactgttagtatttttcttgtgcctcaaaaggatatttgtatgcttctgttgttgtcaaggacagaggaaaatagatacttctatactgtactgatgggagtagaaattgctgtacttttaacaataatttgatatatttaatcctttggcatgataatttcacacctgtgaaattgtcctaggaaaataatcagaaaaatgaataaaatttacatataagtgtttaattatagtattcggtatagtgtattatgatagcaataaaactaaaaataacctacataataaaatatagtattttatatgttttattaaaattatattttccaactatatttgttaattggagaaatgcccctgagacaatgttaagtacaaaatataagataaaattttatttattatattacaaactatatatcaaaatagatatctgactcctatgctactagctatgtgatattgggtgaattgctaaacctctctatggacttgttatctgtgcaaaggaatacaataggaatcgttcattttcttttttaattaaatgattatagctcttccaagcatatcctagcatgtagatttttaagctgataataaatagcagttgtatttggttagtagtaatacgtctcatatttacactcttctgtattttaaaaatctttaacagtgagcatgagcatgtgatactttttgtttaaaaataattagtataggccaggcatagtgctcatgcctgtaaccccagcacttagggaggctgaggtgagaggattgcttgaggccaggagttcgacatcagcctgggcaatgcagtgagacaccacctctaccaaaatttgtttaaaaattaactggacatggtggagcacacctagctactgaggaggctgaggtgggaggaccgtttgagcccaggagttggaggctgcagggagctatgatagcaccactgcacttcagcctgggtgacagagcaaggcccattctctaaataaacaaacaacaaacaaacaaattggcatgtatatgtagcgtttaacttattccttcttactctaatgatgactaattcctgtcgatatttaatttatatccaaaatgcctacagttagtccatttctgagagaaaaagacatgcaaatgtctacccagctgaaattttccttatagattctcttggatagtgacagagtctttgaatggagtatttaatttttaattttaactatgcccaaatatagggtgtatacttaaggaatatgatttgatcctgaagagcagaaaaaaaagcgttgaaaaatatttactgttaattttggtagtagataattaattgactgcctggaaaattaatcactgatgagaccatgaaataaataacatatgctaattatttcaaaagattgagatgatacattggtgattggcattgaaacctccaaccacttactgggtcaggttatgaagcatttaatcatttacttattcttggtgagcatttaatttgtgttaaaaatggcagtcattatagcagccgtgagaaaattttgtagactttatgcattgcagcactgtcagagcaaagagcaatctgaggaaataagaagctacagaatgtgggtcaacagggactgtctcatctttctaatatcatctatttatctaattttacccaacaagctagctatcaatttacttttaaccctttaatcctaaccttgggatcttgggaaaaattgcagttcatggtattaggtttttaaagtttagaaacatgacatctaataactgttttgcccattatttgtttccatttgtatttgttcatgcccttttccttttgaatgtattttgtgtttttcttttcaatattttattacctaaataccctttgggataatctagacacctagtaacaaagtacttgaaaaaatatgactttttaaaaaaagtttattttctgaaaatagagatttttcctttatgtatttgctcagtttttaagaaaaaacctagaatctgtattgctttctgaaaagcattagtgtttgacactaatgtttcttgtttaatttttaaaaggcagtaacagcctgaacttattaggttctcatttttaaatttttaatatagaaaaataatttcaaaacagaaaacattcaagtggctattaaacatatggaaatatgctcaatctcagtcttaataagaaaaaagcaaactaaaaattaaacatcaatataccatttttaaatccacaaattttcaaagatgagaaaattttataacacactctattgactcagttgcaaggggaacaggtactcataatacaagtatgagaattggtataatatttatcaaggacaatttggcaacatctgtcaaaattacagatatacatattttgatccagcaattctacttccagaaatttacctcagatatcctgggacatgtgaaagatgattatgtaaagtaatacatcatagaatcatctataaaagcaaaagattagacacaacctaagtactaactaaatgatggcacatctataaaatgaaatcctatatatttgaaacataacaaagcttttaatgtgctatatggactatttcccaagcttgttaagtagacagagcaaaggtacaggactatgacagtagtctgtaccctatttgcttcttattaatgttttcataaagtatctctggaagaatgcagtaaaacatgacaaaatggctgctctatggaagggtactgatggatcacaaataggggatagagacttttaaaatgtatggtctcttacactttcggtttttaaactatgtgattatgctacctaatcacaaaaataaattaattttacaatcattgtatacacacataatatatagtaaatggaaatgtttaaaagcaactttctccttgctacgaagctaattttttcctaatatagtcctttaacaaggaagatgctatataattattttataatactgatgaaaaatgattttttaaagtttaaagagaagaataaagctttgcagcattgaagtcagtttattacctctacttgtattattcacatgagaaaaaatataaatgaacacctaaataagtgaatcactttcccccttctccttcctcctcttctctctgctcctcctcttcatcttcttcttgtctagtttatctgtagcattcgctggtattggaaggattttcaaaatacattcacaaaatataggtatgtgcatgacaattgtaaattaatatttagatattcatctaaattatgtttttcctatgttgatataaatagaaacaggcctaactgcctttctgcacataccagccttattttaatagggattttattagtttttcattcagtttcatgtgggatttttttttttatctaagagattgttccgcatttgctactgggttgtatgccctatgtatatttctatggaaagtattagcaaatttcactaatttttgctattaccaactctaaagaaaatatggaaaaaaggaacttaaaccacggagcctcataatgtcatgtcatctcaatctagttcaagatatggtgtgttttcacatttaattaaccttctgtcacatcctgtgataacctagtcttaaaattgattatacagtcgagcatgtttttggaggctccataaactaattactttttgaaacatgcagttttggcaactagtcatgattacttctgaggctcctgtaaggggctgtcaaagaagggctcagctctgatgcaccatgaaaaaatccaacagggaataatagccgagagagaggtgaagttggtgaagttattggacttccttggtctctggctgattttcttacagcctctcctccttctgctgaatctgcactgcagtgactcgtttatgttctttacacctaaggaggacagcattctactgtaggcaaacgtatgaaagaaactaatggaagtctggtttccttcattcatagagccttgctctttctgcaaaacaaaaccaatacatctggataaaaaacagaatacaaacaaagtaaacaccagggactatgtacaaaacaaaagagcaatcgcaatttttagggcattatatttacaggattatgaagaaattcagttgaccttgaggcatcaccccccaaatctgtattagtagcagtttacactggcattcagataccaagcatcaaaacgtgtaattttagcaaacattgtaatcccctgatcagaaatcccatccagagctgttcacaaaaagcatatttggcttgcttaaatttttactttctgttgtctcatcagaaaaaagatgatacccccctctgtgctcttgtagtccatttggtactgacttcacttttgccttgttattagttgctttcatgtcaacatgaacatgaacatgaacaaacagaggacaaagaccatgttatttctatctttatctaccataacctctagcaggggacctggcttatagctgttacatggttgatgtttatttgatttaattgaataatgagtgacactttgattatcccaacgtaaacagaggggaaaggaagggagatatgccaggtttgatatagaaattggttttatttctaatatattaagtgcttgctgcaaatgtcataatccagaaagattgttctgtggtccctggatctaggagagaagacgccactgacttgctctccttggttgtccaggaaggccaccctaagaaaacaacaaaaccttgatttctttagccacgtgtgtgtgtctgtgtctgtgtgtaagtgtgtgtgcatttgggtcctcacctgatgaagaaaagtgagaaatctgtttatttgtgggtacaaggtgtttcacagtttatgaaatgcatctgtgcttttccatgatcatatttaatgttcaaaacggtatgagaatactttgtctagtttacaattatgtaaactaagcttcagaacagttaagtgatttgcctaagttctcctagttagtaaagattggaaccaagactggggtaaacttgaattatgtggggacctgccttgaactccacagtgactcccactgactggtggtccctgacccctccttttcctagtcactgtttccatgagagaatgttgtatgtcttgggtgtcttagggtactgtgaggattggaaatatctgatccaaggattggactcctagtttagtggtttctgctcagggcattctaccaatgacttacctactgtctcatcggttcgatgataactctagaatggctccatgtgaggttgaaaggagcactcctggatgactctgttcccgcatgtctctttctttccctttggactgctccatagccttcctgtctctcagttgctacattttgcttgatacccttgggctgagggagggcatgctgtggaaatgattacatctacataccagttggcacagagaagccatgctgtgcgtatttatttgtgcccatgccatttgacaacagcaaaatttagtacttggcttgcatttgtaaagaaattggaaaagaggccttttcctcagtgggctactcaccaacaactggaaagatctgagttctcaatcctggatggctgcaactttcttcatatacatctggcattatttgacttctcgtcacagggtaaatatttgggatagaagatatgtaccaatttcccttattgcccccaaagaacttgcgttgtatcatttccactagtggcattggagcacagtaccaagcgtcttgccaagctttccagatttcttgaggccccttctggttctgagagcaacagttcttagggctggaggcaggaggatgtgtgcaagtgtatgttccttttttttttttttttttttgtatttgtatcttgcctaagatattgctgaaaacttaatttaaccctgctacttccctaaacaaaagacacaattttctcatcaataagaatatctactttttgacaggcactatgctccacgagtcgtctatattatctctactctaaaatagccctgcagagtgggtgctattattcccaatatgctatgaggaaagtgagggactccatattttctctaagatcacagtggcagaacttcaattccaaatggctcttgtcgggcttcaaagcccatgctttttctggtatgcattactgcatagctgaactacacagaaacttagttttacaaaaggtgacaattaatttcacacagtaacttttacccaacctgctacctatgggaaaaaattctggacagaaaataaattatacaagaaaaaagaatttcattgaggaagtacatttctctataaaatttttgaggaaggaaatttatttatgaaaattaaccagctaaatgcaggcaggaaaggtgagggaaaagcgcacatatcattttgggggtgggtgaaaacaaaaacaatggtttttaatggatttaaagtcaacaatggattgcttgaagagaatgtaaggttgaggggaggagatgtttgaaattttcaagtcatatagaattatattcccttaatttacctgactaaaaatatataagtagtatgttagagtcagatgatgctgggagttaattctccaactttacagatggaggcttatgacctggagctcatactggtatatacgtagacctagaacctaagcttactgagctcgagcccaggtctcctttgtgagctgccatgataggctttggtagggaagtagatatcccagctctttcaacttgcctcaaaaatgaatccagagctcactgcattgatgttggggggctcacagctgggtacatgacagttcagacattttgatcttaagaatatatctggacaattctgaaaccaaatagacctcataaagaaaataagagtgagtctagtgaatgatatactcagggaggacacagcacattaggtttcagaacgtaaaagctaaataatatggactcttgatcagcagcttgccaggcaagaagcttgggcagcaggttggtggcatgctggctagcttagacagggtggcatttttcctaccgtatagtttttatgcagagcacactccaagcaaataattctcagcagggaaggatgcagattttctctagtatgttacagccactggggtagatgaaatatgggccctggaagcctttttggcaaactctccgattactgtaaggagtgcttataaaaggaagaagaatgtgggctcttttttagtctattgaaaccttgaaatatttttcaggtttgagtgtgtgtgtgtgtgtgcgtgcgcgcgcgcgcgcgtgtgtgtgtaattgatcttgttaaactgaatcacgaattttttttgtgaattcagggccagaatgtattttcacgtccccctcgatgaggaggatgagagtgaggtcggcaaaaatggagtgttgacaggaagtggatgccaatgggagtgaacctgtgttgtgggggatttgaataagagttccagtaagctcttctcgcccactgagcacaaatgaccacagggtatcccggtctgaaacaatcaataggtttctcaataagtatttttgtcctctcaacccatctcagctacctgtccccaagggttaaggagaagctgtcaacttgttggtttgggaactgattaaactccattgctaaaatccattcttctgctccagctgaaaattcgcccagcaggagatggtttcctgattgaagatatgacaaaagaaaacataggtctaacaagtattcctaattattttttcaagatgttaagaatttatggccaaatacgtttggaatagagcaatgtatctccaatttcgcacattataggaaaatcaaacaagcaaaatcaaagaacttcccatagagagtgtcagaattgggtttactacttggattctaaaatctcatacctgagcaagatgcagaggtaacagtcctcaaattagtgccagcccaaacttgccaataaaagttctgaggtcagtaaaggccatggctatgataccaaatgtttcaaagatgtcagcaggaggtgctcgggggaagcttggctagagcgactgatgggaacgccagtcaaggcccagatgtacttcttcagccttgtcctgcaccttcctgctatacgcactagtctaatcacctttcccagttcctgcccacacttttcacttccctttgcttttcatatatgcttttgttttctgtgcctggaaatgcttgctccttctttgaggcccagctcaaacatcacctgttctgtaacatctctttcagattcccacccatcaggggaggaaggaggaataaatttctctttcatctcatctcatttgcctgatagaggttacaggcagccaattaaaaaatctaataacatgctaaccacttaaaacaggactactaaaaaatatgtatatgtaaattagcaaatgtttaccaattaaattagcctttaattagctaatttaattagcaaacatttaccaatcccttgtatatattacatatatattatatattgacatatatatattttttataggcttattttaagtggttaacatgttatatgattttttaattggctggctggaacctctatccgactgtaagccaggtcttgtctgtgcattcccagtccctagcaagtgtttctcacttagtagggattggtgaacgtttgctaatttaaggcggattcttggaactgttctcacccaaagagcaaatcctcttactgttttttttttagtattataagatagtcgaactttgatctatgaaggcagaagccacatttgtaattgaacagcgttattacctttctttttcatctgtgaatctgttctggaagacttagcagcttcaaatgagactgaaattaaaattttgaagcagtccatttctgagccagagttttagagagaatatttttagctttaattctgaggagaaatcggtcaaatttattattgatatgctgccattttaatacattaactaactcttctcatcttgtctatcatactgtaagtctcctcccttccttccttccttcttttcacctagaagtgataatttttaaaaatcaatctatttattatcttgccttacatcaaatggcactaatctgccagaacttgatggacttgagtctgaggtcatgggatacacattgagcttagagacctgtaccagtttggaatgcaattctatcagcagtagcattctctggttaacttagcggacttcagaattttttttttttttttttagttccccatgatatctctttataaaagaatgtactctttttcaccttagtgattccattataaaatcagaaaaacgtacaataagaaaggaccttggctgtcacttcaacaagccctctaccattcctgtaagggttgcttatgttcatcttgaatacttccattccaagcgatttattatcttccaagttaacgcattcctttgttagtcaacctcaattcttctttgccatcctgggtatacagatggagtcatatttatatcaataacccaaatttattttcctttcctatatatatgttcttaaaatacctaggatagctggagtactcccagcgtttctgggtatgtctggattgtgtgtggagggtatttccagagtattcataaactaccatgtgggtttcggaccctgttcagcatctacccagtttttcctctcctacttagcattttccttgtcaatttcttctcatctcaataatctctactaaaactcttctacctggtggttgttggactagcactatcaaaattacgtgatagctcatttgaaaggtggaatcttgggtcccacctcagacccactgaattggatcagcattttaataagagcctcaggttggttgtattcttatgtaagtttgagagggattggtctgtctaaatagtgccttatgatgcctgtggctttgcccattcttataacaccaatttcaagactgaaagaggtgcttctggctgatttccaaaccagaatggtcaagttggagaaggttctgcacagaaagtgggagaatgacttctccaattttatgaccccctttatcactttgtagtgtcctaggcagccatgtcctgaaccccactctctccgtggagcttttcataaaacttgatcctccaacctcccacctcccccactttccttctgagggatcctggaaatgctatctacaccattatgttttttccaatgactttttcaaacttctctttaggttcttaatatatccctagcctattctccttaagtctgaaatttaaaagcttacctagaaatcagttggtgccaagacccttgtggacccacatacatcacacacatgcaaataagcctgaattccttctggatttaactggaccagcccgtattcatttctattgtactgacataccttccaaaaacttcttcattttctaatttttgtcttccgaagccatgaaaaaatatacttttaacctctcttccatgtatctgttctttaggtatttgaaggtcatttttatgcctgtgtcccccaaactttctcatttctgcactgcacattctgacatctctcacatttttctcatgtttgatttttcagttatttgtccagaatatagcttaactctctaaagagtggatgatacaagttgatcacaaaataaattgatgatcacaagcaggagatagcagaaggcagagaataacaacacaggacattctcatatacatgagggtgtacataatgccgtagaagatttccacatgcaaccaagctggaaaagaactctcttactttactacctctcatgcatcaaacagatgagctactcatcttctcttctcaaaatatcactgcccatattactttttttcaccagtttatttatattctagattttagtttctcagcacttatgctgagaactcttcaaacaacaaaattctgagagtctatgcctcaaaggctctgtgtgtccagggctactcaaattattggatgttaaaaacaataggcttaggaatcataataaatctgatgtaagaaatgttgtgatggctgaggcttttataagttgatgaggtatatacctaaataaacaataaactaacttagattcataggcttcactgatggtattccatttctcagattgtagatcgtaagactttagagacatactacgtttatttgttttagttaaacaaataaaaataagttaaataaaccataagtgattttgaaacttctctgaggctgtgacaatgtggcacactttcttttctttgccaatgattccaataaatacaacttaagataattttttcagtaaaatttgctctattggaatttattacatgtaagtatctataaaatatattagttgttggtatattacatttgaggttatatgtgttagattttaagaaaaaaattttgtaagcataaaactaataattattgtagaatttttaatgctataattgattatatttacaaagaaattaaaatcatccataatcccattacttgtagataaatgtgatattttgatgtacttttttcatttttaatcaatgaaatatataaacatatacatgagtatggttattgactctatgcaatgtcatattctgcttttatcacctggcataaatttccatcttgttaaatattctttgtctttaattcttgcataacaaagcagcacaagaatatgccatgctttgtttattttaccattatcttcttgccaaacatttagatttcttttaacattttattgctttcactggaatgcatattcttgtatatatattttgagcacttctgtgattatttccttataatggattctgtgaattggaatcagtgagttaaaaattatggacatgtcatacatatgttttaaatgtgtaggtggtttagtttgtccattaattaaaatgccacttgggtggagtggatagtgtgtatggggtctggcggggctggtaaggggtgaggaaatggagaattggagttacatattctcaaggaaagaaaaggaaaatcatttgttagtagatgattcaagatcttagctattaagtaattctaaacactctaaaatgtgattttataatgagaaatcttaattctataattatagagaagggagaatttcgaatcttttcatcttctaatagaataaaaaaacacacacatttaaagtgtgtaattagttgtttatcttggcataacactgagattgtataatctctttaaaatttttttaaaaggtttatattattttcttcctgtcataaaaggaaagacacacaaaatcaatactgtaaactccgtgaaggcaaaagatggcggctgtcccaggggctctgcatctcagtcccccatagatctcttgacacatgaagagtacacagtagatatctggacagtgtagagaatctcttccttgtgacttctggagtattaaatagatctggtcaagatgattttattttcatcaaaattcttagagagtgatataatggagaaaaaaacccctgtaaacaaataaaacaaaaacagtatgtaaaggccattctgaaggttgaagtacttagaaggctggaagtgctcctctgtctagagattgcggtagatgggatttttttcttaaccaggaaagtccaggaactcacagaaaacctttctctctctcacttttcaaaggccagttacctgaaactctgtctctctgttcttcctttgccttattacagcataaagaatactaaataacaccttcagaaatgtttccttttaaaatgtagtctcctacgactgagaaaaaaacggattagagttttaaaaaatctaaattctaccatttgtagcaatacaaagaaaacacactattctctgttcatgtatctaaggtaataagcaaatttaaagaataatacagaaaaagctagataaattaacttgaatgaaatagtttctttttttcttgaaatggctcaagtccttttcaaactaccactgaagttttttagaagttaaaaaatccatggcaggatataggtttcttccttcttgtcccaattaaaagcattctgaatactaaaactctaattttattctcttcactttcgtctagatgtagaaatacaagggcagatgagcaaaggatctttgtagcagattgtttgaaaaaaggaggatttaaaagaaaaaaattagctttaactatagaaaatgttgacccttaggaaaaaatttgtaaatgcaattaaaggaaaaaaaaaggaaataaaaatttagaaataaaatgatctgtggtagggatatacagagtgctacattgaacacacgttttcacccctcatactcctggagcaagtatatgttcaggagagatgaataacaatgtcttcagtgggaagcaatggggaaggacaagaaatgctaggatgccaggggagagcatgctcttatgactttgattcaataagaaacccatccatcattccaaggttgatcattcttaccactgataaatgaattaatttacattcctttgtgtaatggccttattgcaattgtaaatttataagtgatgttttaggatcttatgcataattactgaaaaaaaaagtttgcatttttgagcctgtacacagggttggaattttactaatcaaagatttcattttggatgtttccaataatatgagtgtaagtaggaatgtgtcttggtagtttgcttggtgtacctaggatcattcacctttgacttctcttaactgggaaaattgatcatacctatttttttctttgaacatgccaagactcttggtaaatatttgtaaatttttataaaatatctggaaaattgtgttgaaggtctacaggtcaaatagcatttgttccacagaagagtcctttattggacgatttatttattacatgttctccgaacctagatataataatctattcagataaaggtaaatgaagtaagtcctatattgttttgctttcagtctttagtgtcatatttttatagcaaacactttctcatcgtactgttccagaaaataaaacagagcaagatatctgtggtatacctgtgagggggttgtctgttacaatttcctctatcataaaagcaattcctataaaaatgctcataaataaaatgagaaagggtttggaggcaatcaataagggagaaattatacaataaagttactaatctcttttcagagataattttcatcaaatgaattgtacaaaaagtcttcaaggaataattgacttcaacaagctttccactggtcagcaagactttttgctttgaagtaaaacaaaataaaacaaaacaaaaaacagatcagaaaaaaaatggtaaataagaagtagtgcctacagatcttcccaccaagaaaaatgagcagggaaaggtcaccagcgtgtgttttcaggattatttgtctatcccacagtttgtggttccaaagtatttttatcagcattaatttgtttttgccttaaaattgtggaaacattcaactcagaagagttatgccaatttaaatctcaaagaaaaatttgggcaaggagcatgtttcttggaacagggggtataaaggaaaactgatttctatttatttggtttccattaaaacaccacaagttattggcttaaatgtccctattttttatgttttgaaattaatacatgttcagcttagaagagttggtatgaaataagcagaatatgaaaatatatagccctaataatgttatttcatagctataatttgtaggtcatttttatatcagaagtagctttgtatcctccaccctcacatttttttcttactttatggtgaccattttcccgtgacatttcccattctgcaaagtatttcaccatctaggtttatcataatgtatttaatcagcctcccttttagtagccatttgtctatttattcttaattaagatgaatatcatcaattgaatatgaagtcaaccatgtaagccaaacacagttatgaaattcagatgtgtgttatagatcccagttcggcataataaagcaaaacttcgtttctctgtcttccaagtgattcatttactttcaaaaggctaacaaaggaaatgatatacaaacctagtcaattaagaagtgcaaaaatgtggagaaaatataaaaaaaatccaggtagataggagcacccaaagtccagggtcatagaaggaaagcagaggatacttcatccagtcactataaacctttaaaaatagagccatttctctactactgtgactggtttgttttcgtggccaagaactggccttggttgcaattctacatggctaagataaatgggtatatagagagtcatgtggtggcatgaagcccaagtagtattataatcccagagcctctgcaggcctgtttaacagggttgaactcatcaatgactctccgtagaatgtctgcctcatctccctcaactcacttgagtgcagagagattccctaaaacactgaatctccatgaaatggagaatgaataatttcccaaatttatttgaacgtggggctatttactcacctaaaatagctattaacctttcacagatgactactgtcctttggaacatagtttgaggaacatagctctgactagacagcattactctttctcgtactcctctagcacttatatctgttgctccttcagtatacatccttttaatatgacagcaggagtaaaacctggagtgaatatgacagttacgtgggaagtacttaagaattcctctgttcttctttctgaaaccaggtcccaggcagtggtttggttttgagtttcttgggcaattctattatgaagctgtgttcagaaccattgcctgacggtgcactttttctttatgtattttacagaatacattcaatacagcttcagatatccttaaggctaatgcaaggaccttgtagataatagattctcaatagatatttgttgaatgaatgaacacacccgtaaaacatgctaatgcaaacagtatcaaagtaagatctaaaatcaaaattaaaaagacaatccctgataacagcctccttttctgaccactgtgtatgtaggctttaaaagctagaaataattccaataagtagccatacatgcttttcaaggatactctgatcttcccagaggcttaaagagttttaaattctacaagcaaagcagaaagcagagcttctaggtatgtagcttccacgtatggcattgcaatggagctggccctccatcttttcttcttttctttcttctatagctgattattaagtgattaatatgtaatgaacactattgtaggctttgagattatgctagtggacaaaacagacagaagttcttgcccttacagaagttaaaatgtaattggggaaaataaagatcatgataagggctaaagaggaaagtaaaacagaaacggttatagggagtataaatgaggctgcaatttttatataaggaggctagcttaggccctgctgagaaggtgtcatttgagcaaacaatggaatgaggtgaaggaatatttgggtgacaacgttctccaggctgagggcacagcaagagcagaggttttgagacatgaccacacacctggtatattcgagaaatagccagggtattaggagtaagagatagtcaaagaagaaatggggaagccagatcttgcagggccttgcaggttctaatatggacattggctttaattcttacagagatggaaagtcattgaggcttttgaataaaggagtgacctgatctgacattttaacaggatcactctggtttccatgttgaataaactgaacaaggtaatggatgtagcaaagagaccaggcagaaagcaattgcaataatccggatgagataattgtggtttggaataaggtgttaacaacgggagataaacagtggccagattttatgtgaatcttccctttgatctgtggaccaatataacaagactggagagaacacacaatttcctccctggatatacatcatcactgttcatattttcttggagctcagtgtacacttctaatggcttcctttttataattgcagacaatgtacaataaaagggaaatttgattcacattcagtaagctctcagcttcttttgcttggattctgactgaccaatgagtgaaagaatctgaagaggagatttctgtacccagcagcgggtggaaatagatgaatgtgagcattctttctaattctgagattctgtgattctgtgatccttagtaactctggaaattgaatgttcaaagactgaaaagttatatatgatagtggcaccaattgtcacaataaattggaagcaaatactaatgatcatggatgtatttaaaatatttcacacctgtcctagcacagaccagtcagaacagatgccaactgtaaacagcaggcacagccatgcatcaggctgaatattagttgtgcttatgctcaggtacaaatcaaattatattttagctgacatggtctgacaaagttctacgtctgtttgaaccaagtcaagtgagcaagtgcagtgaacacagatgttttgcctaggtttgtgcctgatattttgagaaaaatattaaaaggggtataaaatacagttatgaccttctgagtgtttttaatctgtttcagaagacaacactttgcactcaaaacaaattaagaatgttgcaacatatgaggccataacaactattttacgggttcttggctcccagcagcttgcccctaacacggtaactgtgtctttcctgagatttcagagtagtgtaataatgaaagaagaacaagcttacttgcaagatattaggaattgttgacttcatgatgcttgctggcatcttaagaacagacatgcaatgtctcaagccagcgttcaacacactaacttaggcaacagccgtataaggcaatatatcttttccatattcatgatccctccctcctaccctggtttgggtgcttcccagcactataagaaccaacaatcataagccaaagtatatctggagagtgggagaagcagtcctgcaaatgcagccttttcacacgcttcaccccccgtttatgattggcttcaggaaaatctgtgttgtatggcatctgatcaagtatggtcaaggtctgcctatgcatcatctattcagcatgtaacacagttagctgggtagagggtgtgactaccgtccagaatcaacacaccaggcttatataacaaatatggagagtttgcagaattttagtttatttgacctgttgaacccccgtcattaagaagaatctagaggaagaagagaatgatcacagctttatccagaaggaacacagaatttccaaagttagctaactacagattctgtcccttaagctggatgcccattatagctcagccaaatgccttttttagtatcctcctctttaagcctgcctcactaagctggttaagtgccagaatatgtggaactgaccatgcacttcttctgcattaaatatttcggagctggtaaatttagaacaacctaaagagtcatgttatgtctctctctactgcttatcaaattggcataagggttagagacttaaaactgggggctggattttcccagagggctgaattatttaaccgtcagcaattttgaggttcacagtaaagtagcaataatgaaatcatctgcttctagatgtaaaagcatcttctcggaaggccagaaggagtttgcagctttttctatctgttgggtgttctgggctctgcctaatacacactgtttatctgacctgaaatatgagacgattctgccataggagaataaattccatataaatttaaaagggagggtctgcatgtgctgatggctccttataaggggatagtttgtcaaatttggtacatattcctctccttttttaatttttaatttttgtaggtatattgtaggtgtatatatacagagcacatgagatattttgatacaggcatgcaatgcataataatcatatcaaggtaaatggaatatccatcacctcaaacatttatcacttctttgtgtcacaaacattccaattatactcttttagttatttttacatgttcaataaattattgttgactgtagtcactctgctgtgctgtcaaaagctagatcctattcattctatctaattatattttttgtacccattaactgtcatcacttcccactgcccccaccacccttcccaactctggtaaccatcattctaccttctatctctatgaggttcgattgttttaatttttagctcccacaaataagcgagagcatgcgaagtttgtctttctgtgcctggcttatttcacttaacaatggcctcaatgatccagttttctcatctgtaaaatgggcacaataatggcaaggacatgttcctaactgggtttttgtgatgcggaattcagtcagaagagggactggctcaaagtaagtgctcagggaatgttaactattcttcttcttctttttttttttttttttttttaattttcagtgttctctgggtatgttaactatttttatttgctcatggtgaaacgaagagagctgacaagaaaatttccaccaacgaactttttatgtcctttttaaaaattgtcaaagttctattgaaatacatggggagcttaaataaaattaatgaatcatacatcagagtaacaagagtaataatcattgtatttttaaaacagtcaattagaaatgaagaaaaccttttactccaacaaaggaactgacatatttttgaaagcgtgctatatgtcaggcatttgtaatggcattgacatcatatttagtcttcccttcaccctggcactactatcagcatgtaataaagaaactaaagctctagttaacagaagctctagtggaaagcaggatgaaaactcaagtctgacacccctgaaactcctcctcttccactaactccaaataccaccacattcttcgttcttccttatgccaggcctcaattttctttctgtggtgttgaagcaccttctctctgtgctcctctcttctttgctcagcagaacggctttctgatactgctcctgaacacatggggtttcctggataaggtggatttcatgggaactgctgcaggatgtggcagcttcatgtgggtttttgtccaactttagtcaaatagcaagcctcttatgtccagtagtcaatggctaatgactctggttgtagctgttaaataaacaacagtgaaaacatttcaaaagttacagagaatcagtcagagcataaatggtaaaattgtgactgaatggatagtgtacctgcgtgtgtgtgtacctgcgtgtgtgttgggggagggggttgtccttgaagctgtctctgcattcttatgaagttccagtaataaacatttgtattcacctggcttattcaacatgctgctgcaattactttaagatatttcacgctgtttggaagagggggatttatacctgggagtcagggggaagactgaagtttactggaggtgtggagcagggaattcccagttggaagctgtttgatagcccagacttgagaatagaacagatccaggttcaaatccttgcactgcttttaaataactgtatgaccttggacagcttacttaaccccttaagccttgtttcttcctgtgtaacaggaaaataaccatatcaatgttacaagattctctgtgatgatcaatgaagtaatgagaatcaagtacatggcacataaattagatagtgcctagtgaacagtgattattaatgtgcactaatttattattattattttaaatttcaacttttattttagatgcagggggtgcatgtgcaggtttgttacctgggtatattgtgtgatactgaggtttggtgtacagttgatcccatcacccaagtactgaacataatacacaatggttagtttttcaacccctgcaccctctttctccctcctctttctggtagtcctcagtgtcagttacggccgtctatatgtccatgagcacccaatgtttagctcccatttgtaagcgagaacatgcagtatttggttttctgttcatgcattaatttgcttaggataatgatctccagctgcatccatgttgctgcaaaggacatgattttgttctttttttggctgcatagtattccatggcatatatgtggcacattttctttatccagtccaccattgatggacatctaggttgatttcatgtgtttgctattgtgaatagtgctgtgatgaacatatatgagtgcatgggtctttttggtagaataatttatttccttttgaatatatacccagtaatggggattgctgggttgaatggtagttctcttttaagttctttgagaaatctccaaacttctttccattgtggctatactaatttacattcccaccaacagtttataagcattcccttttctctacagctcaccaacatctattgtgttttgactttttaataatagccattctgactgctgtgagatggtatgtcattgtggtcttgattttcatttctctgataattagtgatgttgaacatttttttcatgtttgttagctgcttgtatgtcttttaagaagtgtgtgtgttcatgtcttttgcatctgtatttttctgtttttgttgggcctttttaaaatgagattatttgtttttggcttgttcaattgtttagctttctcatagattccagatattagacctttggtggatgcataagttgtgaatattttctccctttctgtaggttgtctgtttactctgttgttagttgttttgctgtgcagaagctcttaagtttcattaggttccgcttgtcaattccacttgcttttgaggacttagtaatagattctttcccaaggccaagccaatgtacaaaacagtgtttcctgggttttcttctaggatttttttttttttttttgagacggagtctccctctttccccaggctggagtgcagtggtgcgaccttggctcactgcaacctccacctcccaggttcaagagattctcctgcctgcctcagcctcccgagtagctgggactagaagtgtgtgccactatgccaagctaatttttgtatttttagtagagacagggtttcaccatgttggccaggatggtctcgatctcctgacctgatgatccgcctatctcgacctcccaaagtgctggaattaaaggtgtgagccactgcccctgaccctcttctaggattcttatagtgtgaggtattacactgaaatctttaattcagcttgagtttttgtatatcatgaaagacaggggcccagttttactgtggctagccagctatcctagcaccatgtattaaatagggaatcctttccctattacttgtttttgttgactctgctgaagatcagatgattgtaggtgtgcagctttatttctgggttctttactctgttccattggtctatatctgctttgtacccatactatgctgttttagttactatagccttatagcatagtttgaagttgggtaatgtgattcctctggctttgttctttttgcttaggattgtttttgctattcaggctcttttgtggttgcatatgaattttagaatagttttttctagttctgtaaaaaatgacatttgtagcttgataggaatagcattgaatctgtagattgctctgggcagaatgaccattttaacaatattgattcttccagtccgtgagcatggaatgctttttcatttgtttgtgtcctctatgatttatttcagcagtagttcgtagttctccttgtagaaatctttcagttccttgattggatgcattcctgttgtgggaagtcagggaccctgaacggagggaccggctggagctgaagaagaggaacataaattatgaagatttcatggacatttatcagttcccaaataatacttttataatttcttatgcctatctttactttaatctcttaatcctgttatcttcataagctgaggatgtacgtcacctcaggaccactgtgataattgtgttaactgtacaaattgattgtaaaacatgtgtgttcaaacagtatgaaatcagtgcaccttgaaaaagaacagaataacagcgatttttagggaacaagggaagacaatcataaggtctgacagcctgcacgtgcatgcaaaaagagccatatttttcttcttgcagagagactataaatgaacgtgcaagtagggaagtatcactaaattcttttcctcacaaagactattgatattaatactctgggaaaggaattcattcctggggggaggtctataaacggccgctctgggaatgtctgtcctgtgtggttgagataaggactgagatacgccctggtcttctgcagtaccctcaggcttactaggattggggaactccatcctggtaaatttttggtcagaccagttctctgctctcgaaccctgttttctgttaagatgtttatcaagacaatacgtgcaccactgagcatagacccttatcaggagttctgccttttgccctttgtcctgtttcctcagaagcatgtgatctttgttctgctttttgccctttgaggcatgtgatctttgtgacctactccctgttcagacaccccctccccttttgaaatctttaataaaaacctgctggttttgaggctcaggtgggcatcacagtcctactgatatgtgatgtcacccccagcacccccagctgtaaaattcctctctttgtactctttctctttatttctcagccggccaacacttatggaaaatagaatctatgttgaaatattgggggcaggttcccccaatacatccctagatattttactttatttttttgttgatattgtaaatggaattgtgtacttgatttggctctcagcttgaacattattggtgtacagaaatgctactgatttttgtgcattgattttgtatcctaaaactttactgaagtgattaatcagttccaggaaccttttggcagagtctttaatgttttctaggcatagaatgatactgtcagcaaagagatataatttaacttcttattttcctatttggatgcctttgatttctttctcttgtccgactgctctggctaggacttccagcactatattgaataggagtggtgagagtggacatcatgtcttgttccagttttcaaggggaatgcttccaacttttacctattcagtatgatgttgcctatagatttgtcatagaaggtcttattattttgagatatgttcctttgatgcctagtttcctgtgggtttttatcatgaggggatgttaaattttattgaaagcttttcctgtgtttattgagatggtcatatggtttttgttaattctatttatagagagaatcacatttattgattttcatatgttgaaccaacgttgcctcctaggaaagaagcttacttgatcatagtaaattgactttttgtgtgctgctggatttggtttgctagtattttgatgaggatttttgcatttatcttaatcagggatattgacctgtatttttctgtgttttttttttttttgggcctttgtgcactaatttaattagaagtgccagatactcataaacagcaacgttttcctgggtcccacagtggtatcatagatcttttccttaacaagtatctattgaaactttgctgtttagaaacagttgcatacacactgtggcagcaacttgtacatgcctgagagtggacacttcttatcagcgttaattcaactacacttcacagctctgagaggatgtgtaatcatcaacatagaatttgatggataaggtggtagaaggatttgcttagttggatccttctcattttttaggttttgcacaaataccacctcctgggaaggagcttccctgaccatgatgtctcaaatacccctcaccttacccatgacccagccagctgtaatctgtcctctttagtattatttatttgcctactaattttttacttcttaaataatagactttatgttttgagccattttaagttctcaggaaaattgagcagaaagttcctatatatcctctccctctcaccacatacacaatctccccactatcaacatcttaagccagaataagacatttgttagaattgaattggtgaacctacattgacacatcattatcatccaaagtccatagtttacattagggttctctctaggtgttgtacattctatcagtttaaacaaatgtttaatgacatgtatccacctttatagtaactaacatgcagcatacagtcagccctccatattcatgggtgctacatctgtggattcaaccaactgtgaaacaaaaatacttaaaaaaaatggacagttgtgtctatactgaatatgtacagacttcttttgttttccttattccctgaaaaatattgtataacaactatttacatagtatttgcattgtagtaggtattataaagaatctagagatgatctaaagtacatgggagaatgtttactggtgatatgcaaatactacaccattgtatgtggattttggtatccacaggggttctggaaccagtcccccaggaatactgctggatgactgtagtttcactgtgtttaaagtcctctgtgctttgccgattgatctccccatcttcactaacccctagcaaccagtgactttttttttcttttctaagctgacctataataattgtacatatctgtgggggtacattgtgattttgcaatacatgtaatgtatatgatcagagaagggtaattaagatatccattatctcaaacatttatcattttcttgtgttgggaacattcaatatcctccttgtagctatttgaaactacatattattattaactataatcacactacagtggtatggaacactagaacttactcttcctatctagctgtaatttttatgttttaacagatctctccctatttcccctgtaccctactcttcccagcctatagtattctctgttctacttttaacttctatgagatcaactttttcagcttctacatatgattgagaactttaactttctattcctggcttatttcatttaatgtaatgccctccacttccatccatgttgctgtgaatgacagattttattcttttttatggctgaatggtatttcgttgtgtatttatatcatatgttctttatccattcatcagttgttggacacctagattgactccatattttggctattgtgaatagtactgccataaacatggggtgcagatgtctctttgatattgctaatttcccttccttgggatagatgctcagtagtaggattactgggtcgtacagtagttctatttgtagttttttgaggaacctccatactgttttccatagcggtgttatgagtttacattttcatcaacagcatataagagtaaccttttttctgcatccctgccagcatttgttattttctgtatttttgattacagccattataattggggtgaggtgatacttcattgtggttttgatttgcatttccctgttgattagtgatgttgagcatttttttcatgtatttcttggccatttgcatatcttcttttgaaaaatgtcttttcagttcatttgcccatttttaaattgaattgtttgttttttgctgttgagatgtttgagtttcttgtatattctggacattaatcttctgttgtatgaatagtttgcaaatattttatttcattttataggttgccttttcactttgttggttatttaatactacccaaagcaatctacagattcagtgaaatctctatcaaaataccgatgatattcttcacaggattttttttaatcataaaatttgtatggaaccacaaaagaccccaaatagccaaaacgattctgagcaaaacaaacaaagctgaaggcatcacactaccagacttcaaaatatattacaaagctgtagtaactaaaatagcatgatgttgttataaaaacagacacatagaccaatggaacagatgacagggtccagaaattaatccacatatctacagccaacatttaatttttgacaaaggcgccaggaacagtcattgtgggaaggacaatttcttcaataattagtgctgggaaaacaggataactatatgcagaagaatggaactaggtccctgcttctcttcctacacaaaaatcaactcaaaatgaatcaaagactgaaatataagacctgaaactgtaaaactactagaagaaaacatagagaaaacaattcaggacactggcacaggaaaggattttatgaataagacctcaaaatccaggtaacaaaagtaaatataaacaaatgggattgtatcagactagccactaactttactatctccacactttttttctctataatgtcatatagttggatactttatttttaaaacatatatatcactatttgtattatttacatgttttattatttatttttttctccctctagaatgacagctgcatgaaagcacagtcattctcttactttttaaatgtcgtatcctcagtgctagactatgattgtctcagaaaagtcctcaataaatatttattagttaataaatgagtaaatcttccctccattataattactctcatccttctgctaacattagaaactggtcgttggaaatacttacatagtggcaataacaatattggttgtcatttttattatcttatagatgccaggcactgtggtatacattctaagtgcattattttattcaattctcagaactaccttctgaggtaggtaacatttaacaggtaatataggtagtatataagtagtcgagatattttttaggtacaaaaatgagattcagagaagttaacttactgaagatcacatatttagtaaattgcaaagttaaggcctaaattcaggactgtaggattccaaaggtaacagtctttattattattattattattattattattatacttcaagttctggggtacgtgtgcagaatgtacaagtttgttacataggtatacacgtgccatggtggtttgctgcacccatcaacctgtgatctacattaggtatttcttctaatgctatccatctcctagtcccccaccccctacaggctccggtgtgtgatattcccctccctgtgtccatgtgttctcattgttcaactcccacttagagtgagaatatgtggtgtttggttttctgttcttgtgttagcttgctgagaatgatggttttcaacttcatccatgtccctgcaaaggatataaactcatccttttttatggctgcatagtattccatggtgtatatgtgccacgttttctttgtccagtctatcattgatgggcatttgggttggttccaagtcttcttaaactgtatgttggaatttagagtgagaggaaagtgtatagctaatccactccactctttggatttgaaatacggttgcttaatctaagtgccttgatatttaactctagtccatttaataattacacatctactatttgctgtgccatgtgctctagggttatcacctgacttttcttagaaatgcagacttttagctgtactccaggcctactgatgcagaacctgcatttaaacaaaatctccagcagctttgtatacatgagatatgtgtgtttgagaaacactgccctctaaggaatatcaagacccaaaactcccatgtccttgactagtgagcaaacaaggatcttagcttttagaataccttgcactttaggaggggtcatagttactcatgcttatcacacttgctagcactaatacacacccagaattattataaattatacaagcaatgaactatcagccagctagtaaggcagatagtgttgctgagggtgaacaagccagcctctagcccctcgacagtataaaatattcttttccaataatgcatagacaatgcaatttctttttctcttgctgtgattcactggtggcgtgggcatttggtgtcatgttagcttttctaactgtagttgtgtagagttctgttataccagttagactgtagtacatctgcaattatgcagtaatgtgcattgccaggaagggctgatattttactacaaatcacagaagagctactgcatgtccaccagggaagttgtgggtggtcaatcttagcacatcttgaggctgctgtgttcttacaatagggaacaaagtgttgactgttttctaacatctctggtccaaacaaacccaaccttcgttacccactttacagtttatgagcatttatttacacaagggaaaatgaattttgatactccaggtatgccatctatcccagcctgtctgcatcaaaatgccagattgtcatctccagtttaggccccctctttttctgctgtaagttgtatttcagtctgaggatgaattcagcactttaatcagtgcatttgttttctgctttgtcatccacgtaactggcaagtctggccagggcactgtttgcagatgaaatctgcctgtgtctggaatgcagagtggccagtttctccgacttttcttctctttctcagtcaacacagccactctttccatttgttcccagttctatgcagactataattatgtatatttcctttcatgccacttacacttgtacatttctgcactagggtgaatgcaattattccattttctccttttttcccctttgtggctcaaactgttgccttgttctttctcattgattcctgcactgcaaaacagtcaaatggaaatacaatatgttgcacctgacattcatttaaatcacctgccatgatggtaatacatgctggtgatttcttagtgtactagtcaatggaaaactgtattagtattgcaataatatgcctatatttgctttttctggaatatactgtggtttggtgcgtgaacgattcaatagaattttgaggatgtagtgggaatgagtaataacacttcactcaatatgttctttaatgttcaaatcctaacagtcctagcacatccttttgcccttccaataagttagggtaggaattaactcttattgtgcactctcactactcaaggccctggactaggtactctgtatgtacattcttagtttcacatatatttttgcgtaatccttattagagattaaaattttaacatatacatatactttattttacaggcaagggacttaacattcatagaattaaggtgaattttttcaaggtatcatagctggtcaatgacagaatgaagatttgtttgactccagcatttatccactttctacacactatcttcctctttgcaaagttttaaattccagaaagtttagcagcctccttgctatctgatgctgattaattgggtggaatagagtctattttttaaatctcactcaaagtattcactgcaaagctgccgtgtgtaaataattgtgtgtgtgtaaaatagatgctttctgtaatttgtgagtaatgtattatgggtccaattgcattttaagaatcttttagcttatcctaaatcctcatggcatttttaatctagttttcattgtgtgtcagtaaataatcctggtgagcaagactaaagatcaagtgctagccctggctttgccatatatttgctttgtatcctagggaaagacatgtcaagcctctaaaacttagcttatttatctgtaaagtagagtaatacacataccctattcacctcacaggattgttgtatatgttgaatgagataatgaatatgaaaagcttaggaaaccacagtcatacatagaaatgtatcattgtaagtcaataggtgtttgccaggtccatagcattagcctacgttagacactgcactgaggaggctactaggatttctttgccttcaaagaagttaaaatgtagacaaacaaaaaaagtagtcattgaacagtcttgacgtttcaataaatttacaaaaattactcattgttttcaatatcatcagcagttaattctcaagtagagtaggcatcatgagaaatgctattatctaatatgttgtaattcacattttaagagtatattatattatattatattatattatattatattatattatattatatttttgagtcagggtctggctgtgtcaccaggctggagtacagtggtacaatatcggctaactgcaacccccgcctccctggctcaagccatcctcccacctcagcctcccaagtagctgggactacaggcgtgcaccaccatacctagctaatttttatatttttggtagaaacagggtttcaccatgttggtcaggctggtcttgaactttagctcaagtaatccacccacctcagcctcccaaagtactgggattataggtgtgagccactgtgcttggctttcaaagttttttaaaaataagtcttactttactatgtcttgcattcaacttgtcaaattgttacagtgaaaaatgccttctaatctaccaagaccaagttcaaagcctaccacttactacaacaatgattttccaagtgtggtccctgcactagcaacatcagcatcatctgagaaattgttagaaatgcgaattcttgagtctcaccccaggcctactgagtcagatactctggggtgtagcccagcaatctgtgttttaataagccctcctggagattttcatacatgttcaagagtaagaaccactgctctactaaaacctcaaggtataagtcagacgttaagaactcaaaggctcaccgaggccaagaaggacacatgaatgagggaaaggactggaaataagattatcaggagtgggaggaggaaactgtgttgaattggagagctgcccttgcttaatgggagcagctagtgattattctagacattggttcccatttaggaatgtgaagcaggtccaaatataattttccaaaagctgaaagaaagcatgactgtcttacaaatatacagtgaacgtgtcaaagattaatttaactcataataagaatttagtaagatgacagctggttcaaaggagaaaatgagaggctggaatatttatacagtcaacagaaataagaatactgagagaaaataaagttagttaaaaaattggttaataccctacaaggaaacaaaactgttacctatggagttatttattctattgtacaaaaataatttacaatcactcaatcttctacaagttggcatctaactttatagacttttaactctaatcagtagtacacagtaaatgtaacaatattgcatcactagagtctagggcctagacaattgtatgagtcttaggcaggtatcttagtccattttctattgctgtaacagaatatcacagattcggcaatttataaacaaatttatttcttacagttctggagactgggaagtctaagactgaggggttgcgtctggtgagaaccttcttacggcatcataacatggcagaaaatatcacatggtgaaaggacgagagcatgtcagctcaggactctcttgctcttcttataaaaccaccaatcccatcatgggggcccaactctgtttaggatcagaccttatctgatcctaattatctcacaaaggcctcatctccaaaagccatcaacgtatgaatttggggattacgtttccaacacatgaaacttgggggacatatccaaaccatagcagcagattttttagacaatattctattatgactgaatgagcatgctgtagtccctttgtctcatttttgtcttatttccaaggcctgggtgattttttcttaacaagcaagtgtggcagaccttctacttttaaaggaaaatggagatcaagatttatatgtgaaattttttctttaacaaatataggctaaataaagtgtgcttgaggactggcaactgtggattgccaccttgcaaaccaggtaaaaccattattgagtgaatgtgtggactctaaaactagcccattcatcatgtgatgacactcattctattcattttatccattgtgtccagttatgcaccccgtgtttcactatcaaagcctgttatccaacttttgaaaataggcagtctcctgttcaaatgtccttaccagacatttcaagccccagctccactacgttctttggaaaattttagcagatttgctctttttgcataactttactctaaccgacaagctgcttaccctcttaatatttaagcaattcaaggcaagactaagaatgaaagtgtctagacaaagtaagaccaaaaccatttaaatccttattacaatattctcaggcagagtaatgcaatttgaggatttttataaaaagaggaattttttttcctggtttttcctttgttccagagccttctaccgtttgagccagtatctttcaagcctcagagggagggcagaagcaacccagaacaaagaaatcaatgcctagctttgaattgaaaaatgaacttttaaaagtgcaccgcagaaaaaataattttgaaacccaatgcaggcttcttgtgagattgtttttcggttcgtttgtttgtttagttccaaagattgactttgctaataaagattcaaagtttggtgaactcccaatttagagtttgttcattcattcattcactcatcctacaaacatttattgagtatctgtaaagtgccaggcactgggtattcagtagcaaacaaaataatgtgttctcatggagtttatgttccaatgggtggaaatgagcatatatcagcaaataaacaaatagtatgtcaggtgataataagtgctgtggggaagaagaggcagagagaaggagaagagggtcacagagggcatagggttgctattctacgtatgatcatgagggaagagggtcacgcaggtgcatggcagttgaccagacctgaaggcagtcaggaaaaagatatctggagtctaagcaatggggacagcttgtgcagaggcctgaggcaaaagagcagagtgttagagaggaggcaggaagggcagataatatagggcttcctgggtcaatatcagagctttggattttattaagaatgaaggggaaaccaatgaaggattttgcggaacagaagaatgatgctatgttacttgcattttaaagggatcacatggctgctgttctgaatataggttctagagaatcaaaagaggaagcagatggaccagtgaggaggcaatcacagtagtacaggtggaggatgatggtggctcagaccattattgtaatggcaggcaggtgaggaattatcagcttctgtatgtatttatcatagtcagtcagaaacgtgtgacatcaaagcagacaattttgtgcctaatgggcaggaaatagcactagaggagctatgagtcgagctgaggtgtactgagtctccatgaaatgctcaacccctcttccctttgcttgataccaagctctggagataaagagaagatggagacccttggagaaatttgagggaattctggaaagtggttttgtttttgttttgtttttttctgcaaggacaactatgccctgtgaagtatcctgcatcctgcatgatattatgatggtagaggagcaacaactgggcgaggagcttgggaagatggacaagagtgttgcttctcaaattcctatgcatcccgcatggtgaacaactaaaagtttcccataaccctaagaaagaaacaacgataggaggggaaaaaaccagcagaaaagaaggatctgtgactaggatcaggaggacacagtttgcaaataccactttaccaggacccgtgaaagggccagagatgctggtggcagtagacaaataagattggattccaatacctagaaccaggtagtctgaaatgtgctacagtgtacaccagcaaagacaggggcaaataacgaagacataatctcttctcccaaaaaggagggtttatcccaacagagctttgtaaaatgtgtgcaatcttcatcaacaagacaatactgataaaacaacttcagacaaaatgtctgtttactctatcaggcccgagttgaatggggagcaattataattctagaattttgaactaggtaaaagtatccaggtatacagggctacttgtcctaatagagatttttttttccccctgcctaacctatttgtattgcctacacagcctgtagcaaaacagagtagcaagagtagtcacttataagtagtttttcttataatttttttttctggttaaaccactgagattatgtactgtggcaaaaaaagaaaaaaaatgcttagcttccaattttatttgtggtaggaataatctagtcccagctttccctctacccatacccttccacccatccttccccaaagtcttcagattctccatctataacgtgaagggcttgtgcagaaaataattacagttcctttaattctaaacatggtggactttctattgccacgtaagcatttccaactataccatcccctttcctgtcactcacctcagtgtctggcacaatgccttgcttatgttgggtactaaatatctttttgccttatgagtaaatgatgcatgagaaagaagacttcagcctgagcccactgtagggccttgttgaggtaaagggcttgatgggccttggcctgaactccattggaaccagattataaataagccacaaccagcttatttcctgtctctttttcctcagtgccaccacttagctactttctggtttagtcctttaggaaaaacaataagcacctttctcatttcttctcttttccttcactggcagctgttttaaggcattaaaactgggagccgagcatgtccagaagtgaaagattctctcatgatgacaaattgagtctctatttttaaaaaatgtatgtaagagtgctccaactggtcatcaaaagggctaattagaaacttccaatccccaggagcactcaagtagaagacggatagaagacacttcttagagcaacactgctgctttggtccgactgtgcctatgaaggaactgggttttgcctggtctccatagataccgccttcttcactgactttatcttagactcacactacttgtttccaatacgagatagcaaagcatatgaatagaaaatgaagagaggtgacctgattggactgaggaaggcaaggccccttgaggagacagacagtttggtgttttgttagaaagtgatatgcatgggaggaagagggagagagagaactattcagagaactgtgtgagcaagggggagcagaacaaggtttatgtcaagaacagcaagctatcaggtcatcactgtggctggagctgtttttttgtttgttttattgggacagaaacttaagttgatggtgccacttttgagaggtttaaaatctaaggccaagaagtctgtatttcacaaaatccataattcaagaaaatgtggcaaggtccatgtgattatctgctagatgtgtggtacagagaggagtggaacatgagtaattgtgatccaaacctccatctttggccttgaagcaaaaggaagtcattcgttttaaagatggatgtagaaataatttctgttgataatttttgggcagcacttgacttctatggggtttttgattcagaataaatacttacctacataatttcatttatttgttctgctgaaaaatattgttttcctgctaaaaagaaaaaccttcaagtgttcataaacctttctgattatctgcagttctactgatatgttcacaaaaaaatagggataaatgaattcgaaatgtaggaatttaatttcctgagaactatgtatgttttctgaatgaattaactatctataaagtatgacaatgtgcaatgcagtttaggctttacaaatttttttcatggtttgaaatttttctctttatctgtgttctgattttatatatttccctggttccatacatatactggttctagaatgaatcactatggtgtctagttttacactcattaatgcatgaatttgatatctgaagcctgagttttaggttaaatatggtggtagggtggaaagagcaaaggactttgagagagaagaaccaaggttgggatccccattctaccacttcagagtccagtggcccttgagcaattaaaaaaaatctcccaagatcatttttttctcatctgtgtagtagtaaaaacaataccaacctccatcttggtagagaaggaagataagagtttctctcacaggtgctgaacaatcactattcttccctcttctttttccataaaatatattacttgcttgcatagtctttctcctaaaaattgtcattttctctgaaaagtcctcctaccgtgtgaccttaagaaagtgatttgtgtcctccgagcatcagtcactctttatgtaaagtgagggactaaaggagattgccaggggaccttacttcgattagtgtcattcagtgagtttgggggatttcatctacttcttgactccactcttccttgactgtccatttcctccctccatcccatgaatcctatagggtttcagtgtgacttacataatgggtgttctatatcagacatcctggacttgctgatgagatttaagcctagaaataagttgatagaatttgatgagacctactcatggagcaggcagtgtttttcctcttgttagctaactttcttttccattccaaaacattgtgatttgcaagtctttaagaattttatatcttctgacaatttagcacaacctgctcgtataaaatggtgttatacaatccagtagcagttgttttctttttttaaaaaattttaggacttttttttttttttgagatggagtctcactctgtcaccaggctggagggcagtggtgcaatctcggcttcctgcaaacttcgcctcctgggttcaagtgattctcctgcctcagcctcccgagtagctgggactgcaggtgcgcaccaccacacccagctattttttgtgtttttagtagagatggggtttcactatgttggccaggatggtctccatctcttgaccttgtgatccacctgcctcggactgccaaagtgctgggattacaggcgtgagccaccacgccttaaaaataagcttaaaataagctaataaagtgtgaaattcttgaccatgctgatacagtttctagcgacctctgtcacacacatccctattagtctcagcacttgagtattctgttatggagctcaagaagtggtcacaaatacatacaacaggtaataaggtaagatgataatatgtttcattcttttactctctagaacaaacattataattactaatttacctctcacctaaagaaaaatcccaggaattccagcgtgctttaatgtagtggaaagtgaactcaaataagaagacctgggtataaatactgtctcccagtttctagctgtatagccttggtgagttaatttgagttaattttctgagctttaacatcttcatgtataaagtaggaataataaccctggtatcccaggatgttgcatggattaaaagagttgatatatgtaaaataacactgtaaagtctaaaacacaaaaattagcattattataaaataacttctttcttgttcctaacatcgttactattattgttttaattttatttaatttttttatccagatgctgaattctttaatatgccactgttttataaaagaatttctttcttgttcctaacatcattactgttttaattttatttaattttttatccagatgctgaattttttttttctttttttcttttttttttttttttttgagacggattgttgctctgtcgcccaggctggagtgcagtggcgcgatctcggctcactgcaagctccgcctcccgggttcacgccattctcctgcctcagcctcccgagtagctgggactacaggagcccgccaccacacccggctaattttttgtatttttttttcagtagagacggggtttcaccgtgttagccaggatggtctcggtctcctgacctggttattcacccacctcggcctcctaaagtgctgcgattacaggcgtgagctgctgcgcccggcctggattcttaaatatgcccctgttgttaaaaacttctataaaatacaaggaaatcatagatgatcaaagaaagtctatagagtgatgaaataactaaattaggtaaccaaaagtgaaggcaaaaataaaagtattatttgtctttttcacccatgttttaagaaggtggtgcccaaagttttagaattagaaattctttttcctcacattttcagatttgagagagattacgtatatatgatgagaaagagggtctccctgtgtcacccagctggaatacagcgatgcagtcatagctccctgtaaccttgaagtcctgaactcaagcgattctcctgcctcagcctttcaagtagctagggctacagctgtgtgccaccacatctggcaaatttttaaaaaattaaaaatacagtgatagggtctcactatggtgcccaggctggtctcaaatttctgggctccactgatcctcctgcctcagcctcccaaagtgctgggattacaaacatgaaccaccatgcccaacctgggagagtatcttgagttgattttcggcatgaatttatttctttgttattatatgtaaacataaggctgacatttagctgtcatgcttgttaaaatattacaatatatccatattctgctgttcaaagaccctcctactaccaccacaacctctgccaggagtgcccgctccacagcccagcaataaagtgggtccactcctagaataagtgggggcctctagaaacttgcttgatcacaaggcattcattctgattgatgaccctgcagaactaactggtaaccgttttgagtaccactcttaccaagttctacattgaggattaagtggctccattactaccagaaggtaatgtcttttcattaacagaaatgctagatggagcagttatgagcagcactttcccttcaaatgccttgctggcattaaccttagagatttaattcaattcataaattgctttaaactatagcttttatatatatatattctgagtagaccccccggggtcagtgattccaaaaaagtgtaagaattatcatgttagactctttctaaaataatacattattaggtttataatgtagagacacagggggaaatgtgtacaaatggaaaccacactaacaagaagtacagttgtcagcagtttaatagaaagaattttaacaagacttgaatgatttttttaaagagtaaaaatgagtgtggtctagtctgcagcaggacatatgcacatttccaacataaacaaatggatctctatggcgttacctagacttacatttatatttactaaagcctctctacaaaaatgagaggatgaaatttagtctttgatacccacttctggaggaaaatagagccttccttgctggcttcttccttgctatccagttcaggcaaagttatattgcaacatagactgtgtcagaggcaattaagctctttctggagacactaataccaattttccaagcactattttggaatgatttaattatattaagatcaataacaatagctgattgtataactacatttactatttgtcaggtactatactgagttctttatttacattctttcattaaatcattggtaacaaccaatgagatggatattattatggcccatatatagatatggaaattgaggtttagagaaattaacttgcgtaaatttccagagttcattaggtagctcataagcaggaatccagagccttcataagctcatgagcagaaatccagtgtagggtaatatactgtctgcttcagtatttcatttgttccaggtcttcagttttaggagatgtgatttacctgcttgttacccatgcttgtctcatctgggttatatccccacccccctgaaaaatcacaagtgcacaagaagcaaagactcatacctttttattcagtttgtgtatggtggctttcacatgtacacttggttaatttttatgtttagtaatcattataacaatgatttttttcttttatggactattccccactttccagtgtcaagttattttcttttgaaaaattttttcaatacaatattttctcttcatatattattactgctactactgtatgctttcttcactagttcttagatatgttgctagatttcaactaaatgtatgtaaacacattcgactaagtataagtaatcatggggtttcatcggtgaagctaaactcttagacataatattacattgctataaatacagttatccccttccccacctccattcaagacaattgactattggccccagtcttccacctattgttgttgttttgctggttgtgggtgttgaggggctcggggagttcatggatggcaagataaggctgagcaggaaatgtcacgcaacccctcctcagtaagtggggagaaaaaaattgggtcctggagtccccagagttctacaggcccaacctccttgggtcaagctggtgagatacctaccagcttgttaggtgtctagaagtttcagccaatcactgagcctagaatctcttatggacattagagtgggagcaggaaacttgccaccaggttgtgccaaaccacaactaagtgttggatatgatctctactgagatccctgaaactgctcccacccctcactcctgcttacagctggaaagaggcacaaagataatttattatatatggtagaacatataaagatttatagttgaagagacctgggttatatcctgttgcttccaaggtttttgtggagtctaaaataagacagtggtgagtgcaagcaggcaggaagcacagtgtccagcatttaccaggcactccatagtattgtttggacccgacctagaaagaattgacttggcatgcagtttgttccttaaatattgaattcacctatgctattgccacattactttattgaaagcagggtaactttttctcacttgatgttgaatgcagcagaataaacctgtttccagaatgagaatttttttatctgaaaataactgaaccacatcttgtctttaaccaattcactggcttcagcaaggcacctagctagggcctggcatacactattgaaaagcagatgtcatatcccagagatgtctagagatggggatggcattctttatggaggggcagagttttgttggcagctttacagtaattcatcaatagaggaaaagcaacattgcataaaagcccaagagaagcttgagacctgaggaaatgtcttagccaagcagagagagcagagaaaggaaaaaatcttagaagctgatcacaggatagcctgaggatcagacaatacagggcagcctggcacaatccggaaaggtaggagacaggagtatcagattttgtctacaaactctggtgataaggccagggatgaaggataaataaatatagaaaatgtggctgacattctggtatgcaactaaaagagccaaacctctatgtgaaatcgtctgaaagtatctagggcaacagtaggcagcacattgagaacctcaaactctgaacccatcgcagtctgcttcagggatgcctctgacttgagataaggcctcagtgtatctctggacctctctgggcctctgttttccacagggatcgctaatatactagataaaaattcttataattatgttatcatgattaaaaataagactgcaaataatattcttaattggtgcaaatttacaaggccgaagaagatcggcatacaacaaagaaaacggctatggcttttccatacttgcaagtatagagttgtgccctcaggaaatgcccagagatttcaaaggttaacaaaggtatcaaagaaacagtaattactaaggttaatctgccagtaattattcatctcttttgctccttctgaaacagagcataggcaatatcagaggaaatgaaggtgtgggatgaagccagttccacgtctcttaaatggctccttattgaatttagaaataccggaatcattaaactccatgattccatggtagatcagcttgatgttcctatgtatttctaaagaagattatgagctcagattttttttaagtcagcagaaccctattcttcacaacagctcagcaggctttgtaaagctagtcagactgaatttttttccaggatttaaattaacagagaaaaagataaaacgatcatttcagaagcagccctttaaggcctataaaacaagctaaattgaaagtcagagttaggagatagagcctttgtgaaatatgtctgtagagatagaaatctagttactgatgcctctcctagacacctgtctgagtgtggaagcaccaaggaaacaggtcagatgtcaagactgtgacgttgctcttcaattgtaggtaggatgaagtcagggggtctgaaagtcacatttttttttctgatccattttagaaagattcacatttagtattctgaaactcaaaactgcttcagtctttttctgctattatatgtgacttaatatccaagtcttgagtttttgaaactgttcttgtcaattcagaagggctgaaaagtaccactaaagcaaatcaaagataggttcactctcactgccaaaagtatttttttaggaccggtaacagtattttctctagaaaaggaagaacatcatattgtgaagatgcttgaaaagtataaactattttgtgcaataatatcattaaacgattcgcatcgctcatctgatatcctatgtaccttcaatgttttccaccctacactaggccccatggagaatataagagagcacgaagccagtgatattcaccgttgacctgcagagaaaataaaggtgtgtgttatttgaggcagtgtataattagatagcaaactggatatcatttagcaatgcataaaataaagatttggaaactggagaaatgaatgagaactaaggatctcttcatggaggagatgtgatgtgacctagctcttgaagaaaggggatggtctggaaagattgaggaacagataaaatctcatttaggccaggctatatgtgatgagggggaagggaaggaggaacaaaatgagcaaattatagagccaggaatgaaaagtgcacagtgtgcatgtttgtgttgaggctagggatgtgaggaagggaaacagagtggggtaggcctggggagtacctgccgagagctcaggtgtggtagggtcaaatgaagctgagaagctaggcacaggcatttgaactgcctcattcatcttcaccttgatcctggttcatacccagacctttatatctatgttcataatgacagtaagataaggatttttttttttcttttttttactagctgtggaagcatttcctgctccattttctaatcaccaaccaccaggactgaaattctacttagtttcaaagctattcaagtcagtttagctcctgacccttaggactgctctcacttcttacatggcatttgaagttttcttttcatttctctttgtgctggaccagatctcacagtgcttagtagctggaaggcttcatccttgtcaaacgtcagcccatcctcttcataacttgctaaactatgtattaaggtaggaaatagtaatccagtaataacaatgagtgaacgtgataaagatacaaactctaactttcagttagagttcccctcctttataggctaacaactcccatttatatttatagtatgtgctttggaagaagatatgaaataaaacataaattttttatgttaacagtctatggcagattagctacaatcctaaaaataactttatagagattctaaatacacagccacaattatttttgaaagtttaaaactatttttaaagctgccataatttagtaattctgaaataaaatgcaaagtgtaatgcaacggtgaaccaggttaacatctgtacagctatatatagctgcttaatatatcaagagtttggaaagactctactttagtgggcctagaataattttattttcccacaaatcctgaacaagtacaagtgttgcagaaatattgtcaaagagtaaaacattgagtctatcaggacatttgagtaccctgaagagagtaaggcattcattgttttaagcatttttatatgtatttataatcttttaggtaattaaagataatgatattttagagataactgtgctcagcacattgagtaattaagaattcaccatgccatgtagatttggatgcaggaaaaatttgaattacagtgtatttagataaaaaagccatcatgccatttgggttctaaagaatggaaaaatttgaagtcctctaaaatattttcatttacattttagaaatcttcaaagtccacaaagagtgatgggagttgaatatttcaatggaaggaaagagaacacttgacctcaattatagagagcatgacaaagtcaagaaattttagaatctctaattgtccagagttaatatttttgacatttttgcatgtattcttcctgtatatatatatatatatatatatacacacacacacatatatatacatatatatatacacacacatatatatacatatatatatacacacacatatatatatattttagagaggtgaggtctcatcatgttgcttaggctacagtctcaaactcctgggctcaagacatcctcctgcctcagcctcccaaagttctgggattacaggcataagccactatgcccggctgtattaagatgtgttgaaatatattttaacatgctttgagtcttataattctctacatactttatttatttagtaataaattgtgtttattggcccacatcattgaaagtcttctatataatgtttaatgataacaattatctatgaaacaatgatttcataattaaccattcccttctcactgagtatattatgtccaatttttctctattataaaaatagaacattttaatagacattttatgcatatctgattatttccttcatctcaaattgctgttcaaaatgcatggacattttaagacttttcatatgtatttcaaataaatctacttcaaattaaatcctcacaacatgtattagtgtcattaaaattctttattgaggccggaagtggtggctcatgcctgtaatccaagcactttgggaggccgaggcaggcagattgcctgagatcaggagtttgaaaccagcctggccaacatggtgaaaccctgtctctactaaaattatctgggcacagtggtgcatgcctgtaatcccagctactcaggaggctaaggcaggagaatcgcttgaacctgggaggcggaggttacagagagctgagatcgggccactgcactccagcctgggtaacagaatgagactccgtctcaaaaacaaaacaaaacaaaacaacaacaacaaaaaaatctctttattgagaaggattttttgaaaagccccacatgtgggacatagaccaattttcctctcagacataaactatgtggagctataccttaggatcccggtatctacatattatgacacatttccttagcaagctgctccacagttcagcggtcactagatgtttcctaaaaaaattattgagttggatttcagggagagcttgaagcagttttcatctctaatcattttttataagggatttcataacatttgcaaaaaaaaaaaatagaaatgttgactccatgataaattccagtagcttcttctaataccgcacattggctgtcacctttatggccagtgagatagcacacaggaacttgaatcactgcataagatcttgcataaagtgcctcagaaaaataagtaagtatataagcaaataaagagtaagctacaacgttgtatgtcttggatttctaaaaaaagaaaaaggaaagagcaagcactgaattaaaagtcaagaggaccctagtctgcctccctcccagattgtaagttatttgaggtcagggagcatggcatctgtcatcaccatttctctctactgcctatgagaatgcccaggaaacggccctcagtaaaagcacgttacctcaatgaatgagtgaatagataaaagaaataatgaatgaaggaatactgagcttgaggctcttagaagaataacatgtggggccaggtgcagtggctcacacctgtaatctgagcatttggggaggccgagatgatcggaccacctgaggtcaggagttcaacaccagcctgggcaacatggagaaaactgtctctattgaaaaatacaaaaactagctgggtgtggtggcacacacctgtagtcccagctactcgggaggctgaggcaggaaaatcacttgaatcccagaggcattgaaccccggaggcagtggttgcagtgagccaagatcatgccactgcactcgaacctgggtgacagagagagacttcgtctcaataataatgataataataacatgtggtttacagcaacatggaaacagtgcttgtgtgtcctgagcttacctaccctccaggggatattttcatggagatacaggaagtgcctaccccaacaaatacctccactccttgttcaggaatatatatgcgcaattcagtttttactctcttaaatgtatcttgagaatgagttgtctgcacaatttcatcttttctttgtgtgtgtgtatgtatgtgtgtgtgtgttttaagaattgcttttcatagtgctgtaatcaagtcttgtaccttgagaacagatagagatcttaattttctttattggaaacaggcttattaccagggtgcaaggtaaccttttcccaaataggaaaatgtttcctcaaaatgaagacacatcatagatggaaataacattgaaaccctgtattttaaagaccattgtctatttcagaaaaaccttaatgatgaacattaggtacttgaaaaagaactagtgaaaatcattaaaagaaaagagaaaaagaaattataaacttaaaggagtgttggaatgaagatttggtgatagacattttacaaaccaaggcagcgtgggaggtcttcaattggtatttttaaatgtgagcagatgggctgagcattcttatagaaagtggatgtgtgtgtctatgtggtgaaaatgtagttcatgaaggctgttcctttgcaggtgggaataatatgagctactcgctttgcaataacaggagaactaaaatcaaatccgcaaatcattttacatatggtgacccagttcttattttctcattaactgtccagggagttgtttttttcttttcatttgataatttgagtgaaaaaggtaatattatcaaaagaaatttgaatgtccagcaagtaaagatcagacacatcatagcagaagaatatctattacttggctctaaaagtactgggtgtctctgaggttaggtgggacaaaaattaaagacacacttcctacttacaaatctaatctgagaggcaaaactgccatgaaattaaggaataagagcagttaataaataagttttgaatatatgcattgttgttattgttgttgttttatcttaaaagacagtaaagggttaagaatgcagactctggagccacaagacttgggtttaaatcctggctttactaaatatttcctagctgcgtgaccttgggcaaatcactcaatcttcctttactccagtaaaaagaaaggaacaaggagaataatagtacctatcgacagggaagtttaggaagactaaattagttaatatatgtaaagtgcttagagcagtgtctggcacattgtgattgctacataaacaaagtgtttttatttactattacttacttggtattaatttgatattacacaggtaactagagtttgaaattatctttcagacaaatgtaccaaaaatattttttgttgccatagagaacacgattatctttcatgaagtgaatgtacaatgttgctattttagataccctgccccccgccaaccataacccctttcactagaccttgctatctccctgcacctttctttggagccaaatatttacccatagttactgcttgtcataaaaagagcattttcttttgttttgtttgaattgaagcatccttttagggctttatctaacacttcacattagtattttaagacttcttggataaatacatgtttattcaacctataaactacaactcaattcaggcacctgctatttgccaatactatgcatatcattgtgagattagaaagatgagtaaaacagttattattcaggagagtaaagtacagtggtattcagatattcaaatatataatgacaaattattttatgaacctcaatcatatcactttagtcttaagggatctctatttaagattcctaaattttagtgaattcctctatgccatatggcagagtttcctcttcctttgttctctgtcccagcttttttctaagtctgttctggtttcatctctccaacactgccaaaatgcacatagcattccaggtaaagttggcaggatcatgtttccactttgttacatataccctttgtgagtgttttgctgctggaaccgagtacatacaaagggccaaatatttagaagataagcacaatgactctcagaaccatttgttcatttaaaaaaagattctatttcttgcactaaggacaatatgctcacagttcaaaagtagaaaagtatagaaaagaataaacaaacacaaaatcgtttattgtctcaccaccagaaagagcatggctaccattagtattatttatttatttattttttattacactttaagttctgggatacatgtgcagaatgtgcaggtttgttacataggtatacacgtgccattgtggtttgctgcacccattaacccatcatctacattaggtatttctcctaatgctatccctcccctagtcccccacccgccgacaggccctggtgtgtgatgttccctccctgtgtcccggtgttctcattgttcaattcccacttatgagtgagacatacagtgtttggtactctgttcttgtgttagtttgccaagaatgatggttaccagcttcatcccctgtccctgcaaagaacatgaactcgtccttttttatggctgcatagtattccatggtgtctatgtgtcacattttctttgtccagtctatcactgatgggcatttgggttggttccaagtctttgctattgtgaatagtgccgcaataaacatgatgatttatttttctgccctcccctgccacctagcagatttgggactaaactgttgttctttctctgcctttcaaacttaatattaaaatatgagcattttttttccataccatcaagtattcttaaataatgtatctgatggatttaattatcatttatttaatcattctcttagtataaggagaggccatagcatgcaggtaagacattgacctgatttcccctcagtacctttctaagacattactctttactttaagtcacacaatacttccttttcttacctccttttccaatcaaactttcttcttaaacatttcagtgttatggaaaatgtgcaagatttagagtcagttgttctaaaactagcttgcgtggtatttggcaagttactttatctgacttaccttcagctctctcatctgtgtgattgggtaacattccctgcctttgttacaacatggttgctgtgcggatgaaatcatatggtgaatatgaaattgttttacatattataaagtgagagatggttctttccctgtgctgtacttttctaacccaaaggcaacattcattatttttcttcgtttgtaagcagaaaaaaaagggctgcataaatgtgctggaaaagacatcattcaattgcctgacctcccaaaggatttgttaatgtttaaccccaactcaccctttcccctcagtgacctgatttatctgatgatttaaaacaaaggttatttggatggtgaaattacaattctaaaattttcattgcaagtaaaaaatctattggtgaaagaaaaccttagttatttttttcaagtacctttttcatatttatcatagaatataaccttatagtagtaacaatatcaacataataattacaatgtattaactattcataaagtggcagctaggtgctacatatatcagtttaaagcttctcaacaccctacagattatttgttggggtgaaaagtttatcaataggccagagtcatttagagaagagatccagaatagatctttaaaaaaaaatcagtctgaattagaaagaaactaggcttaagagggaccaaaacctaaatgcaaaaaaaaagcattagcaaaccctactggctaagtggtaccaaaagaaggaaaaggaaaaacaaagaaaggacttcaatatggaagccctagtgggaggcagagaacaggagactttcctcctcctcctcctcttcctcctctttcttctcctcctcctcctcttcctcctccatgttgctgtgttagcccttcttccactgcactgtggctattagcgaagttaatgtcctttattccaaactgaagtacattaggacagggccaatgccaatgctttgatcaccatttttacttgattttttatagctctattgaggtttaattgacagattacaacaaactgtgcacaattaaaatgtacaatttgacaaattttgacatgaaactattaccatgataaaattaatgaatataacaattgcatccccagagtttcattgtacgtgtttgaactctttctctctttgcctcctctccatccttaggcaatcactacttgttttccatcataattgattagtttgtctcttctaggcttacttcactccatgtaattatttgagattttaaagcatgttatatataataatagttcacctcttgttattgcttagttgtattccattgtatggatataccatagtctgtttatccatttatctgttcatggatgtgtacattatccattattgcataaaagattatcccaaaactcagtggcttaaaataactattcattatctcacagtttctgtgggccagacatttgggagcggcttagctgggtggctctggttcagggtctctcatgagattgctgttaagcaggtgaccacttctgcatgtgcagttacctgaaagtttgactgggctggaggagtcacttccaaagatgcatttttatctactgtctcaattattgtacctagtacacagtagtattcaacaaatatgtgttgctagagtaggttaagctttgattatggaggttcttaaattttaggctaagcatttgaacatttgccctcatcccccctaagcaatggagaatcattgcaggggtttgaatggggaatgctatgataacctatgttttggaagtctggtttcattgacaggaggtggcccatttttgagtaggacgacatgaactatccaattgtgcagtgctacttagagattcagaggtttattttcttgatttgatctttaagcaaaagtttatatggtaaagggtcagaagcatagcccctcctgcagagcagacatagtggattttcatgaagctccaactacactttttaaaaattcttgcatcttaaagacatgctaagaattgaggcttcattatatagcaggctttacagatctgctaataattgctgtatggtacagataggacatttttctcctctgaggctttgtttctccatatccaaaataaacaatattgactagctaacttctgcactccttttaagttttaggatatgtactatgagaagtagattattaattgcagaaaagtcagtaaaatacaagagtcctgtatgtgatcccttcccaaagcagcatctagctttatagctcaacgataatgtttaatctggacaggaaagacactatacttcactcccatgatcctctgttagggaatggctgggcagaggcccttgcttcaagggcaccttagggtaaaagaggctgggaaaggagaaaactgggttaaacctattattgaacttttgttcctaacttaaatgaagactaaatgacacttgctgaacatgtaagaggaagggcatggataagatggcaattaaatgttgctgacacaccagcagtgttgacattttaaaactcagaccgcttttgaaatgtcttcttgctctgtttgtttcttatacccaaatttggttgggttttattttttctaataagtatcgtaaaataggtattatgttagtcaggggtctctggagaattggaaccaataggagatttttatttatttatttatttattataagaaattggctcatgtgattattgaggctggtccactgtctgcagagccagtgtcccagtttaagtccgaaggctagtaggctgctgtagaaccaggaagagttgatgctccagttcaaaggccttcaggtaggaatttctgtcttaatcaggggagagttaactttttgttctactcaggccttcaactgattggatgaggcccacccaccattacagaggtcaatttgctttactcactctactgatttaaatgttaatctcatccaaaaacaacgttgcaggaatacttagaataatatttgaacatatatctggacactctttggctggtcaagttgacacataaaattgaccatcacaggtatattgactatccttttttttttttaagctccacaaggcaccaaccatcccctttccaagattatttttaaggccagttcagaagtaggttccataagcactgagaacccctatcctacaggaagagaacaactttccaaaataacctttcctagttctgaccactgaatatagaatgagactctttagtataaagttttgctcattacttctgtcctttgctttcccaagtataaaagaaaataccttttccgaatgccatttcttcattcctagagtcatgtcatcacccttcttccctcattttctctctccctttttctaacatttactaaatatttattttatataaagtaattctaacggttggaaaaactatgaggatgaccatgaaatggctcctatttctcattgtaggcttttaaaatgttctatacattgccattgtgatgacagtgagtcccctgcattttaaattgtacataaaaacagaattcttggtgtaaattgtgaatgggtcactgtgtgctttatagctctgattaaaatagtttagtatgtaatttctaaaaatagtctaaggggtaaacttttagcattgttactgtgtatttggccccagtgagtggtatttgtctgtgcataaaactgtgcatatttaagtccttgggttcaaattaaagggctaaaatactatacatgccacctttgcattcctttgagttttgtttgttttgttctgtttgtgtcactacaaaacttatgttgcccttatatagcacatttttccttattgtgtccttttgattaattttaatgaccatttgttctcttttaaatcacctgcctgctcatcagtatcattaaaggacaaaaggtaaatggagcttgacgctgtgcatgatcatgtgaattttccccttgctacaagagttcttcaaatgggcccaaggaagatcaactgggcgctcaaggaataaatcattaaatgctaaataatcatttggaggaggctgtcagttttatgttcctggaggatggaagaagtgaaagagctcattttcttcaattaagtctctttcgagaagaaataaaaaacaaagaggaaggaaaacagaagttgtgtttattaaaagcttccatccaggatctggattactatgagaaggttcgtgatgggtcctagtttcctaagcctcaatattctgatttattcattgttcactaaattgtccattgtatactaggcactgtggataagtcagagatgtatgaggattgctaacactcgtatattacaactaaaattaaaaaaaaaaaaaaaacagcaatagtgctaaggaccactatatggaccctcagaaagttcccaggaggggcaaagactcctaagctctgggaagacctctaggaggcatgggcattgtgagatcgagatagattgaacacccagattgctgctggggctgctgctgaggaagttggtgatgtggctttgagtggggaagaagcagctgctcggaagttgctcgcgttgctgctttggcgtttgaggagcaagtgcaggatcttgcaaaagctaaattgctgccctgccctgggggagcaaccttgacacaggacagattcaaaagcacagtctgacagatttattttaagaaggcccgagaaccctatcaagatgttatcttctaataagttggatactgaaagcttttgctttctcggatggaaagtctggacccgggcagtgggtcccgtccgccccgtggcaccttctgcctgttgatgccgcgctgctcgcgcgctccgtcgctctggcagcgatcccggtactgcatgagtcagttttgcgctgaacctcggcataatggaggaaggtgctattttaggataacaggcatatgatcagggtttttttgttttggtttggtttttttgtttgtttgttttttagggggcagatttcacagaccgcgatgtttgcagaaagagcgatcctccagaattcctccctttctgctacagcacagaaaacgatttcacgaagtcattgttgcctttccaggagaaaaggtttcacatttgacattgacagtccattaactgtgttaacagcagtaattgctttagagcagtttaatggaagatgtttatgtgtggctaataaggtttgttttttccccccaacaccaatgtagaaatgaaagcagagaggaattggaaaggtgtggagaagctctgaagaatcagaaggttaatggaatcacggaaccctaaatgaatagaactccccgtctgtttcccctcccttttccattactacgtcatttactttcctagccttgctaggacggatgccagaaagtgagcttccagcttagaatagttattaaaaagggatgtgctaaggttataatcttattttttatttagttttattttttcttatacatattattactgttacagtgaactttttttggtaataagccaaaatcaataaaaatattttatgaaaagataaaacaatgtatggatgtgtgtgtgtgtgttgatttccaggattgtgaagtttggggatctgcatactactagatgtgctgtagacaatatggtgctatgaatacagcagatgttattcttatgtccacatgatgtacactctggtatgttttctgtttcataaatccagctaaccaaatttggggaaacttccagactcagtccttaattaggctgagagatcaaaggtgactatgatgaaatccccacctccagacacatcataaacctttatcttttatagtgtttgtgccagcctgtctctttttttctctttggcaatatcattaatcacatatttggactaccagatttgcatgtttttccccaagtatttatctgtaactaaaatctttttttgataagtttaacatacatatgcctaaatgtctgctggagctctctacttggatttccataggcaactcaaattcagtatgttcaaatccaaaccacctatggccctcccccccatggaaaacaaaagcaaacaaacacagctagcctgatgcttgtattacatccctgtcttggtatatggcacctctgtcttcctccttgctcaagcctggaccttgctaatcatattctgtcctcttttcttttttcttcatcctaactattcactcatttattaaaacctatagattctggttcttacttgcctttggaacttctgcctccttgcagtcatcactggcacttttacggcactggctcagtgtagggccttatcttttctcttccaaaaattgtcatagcagcgctagtatcctcacatccttagtcctgttcttccccaatcattgttttatacacatatttctaaagcataaatatgagtcgtgttttccctattgcaaccttccagtaattccctgttatcattaggataaagtccaaacttatttgtatggcacatgcgtttctcaataaagaaagtgtaagatctggaatcagacagatctgagttcaaatcctcattctgcaacttaccagttgtgtgactatgactaacttctctatatctcaatttcctcttccgtaaaatgagaataatttggtggctacctgcgataaatcttacttcagttccccaatacctgcttctcctctaattttggacattatctttccctggcctttgaagttaggtgtgtacaaatgacttgcttggcaaaagaaatgtaagcacaatagctatatgtcacttctgtgtataaatatttaattactggtactgaattctccagacgttcctttgctgaatgtgaaaacataggaatacgagggttccttagaaattaaggagatagaatgctgaggctacacacagaagacaactgtcctgaggaatgactcaaatccacagcagactatgtgtggatgagaaataaacattcattagatgaagcaactgatatttgagggttgtttgttacctcagcacagcttaacctacactgacattctaccacaaaggctgttatgagaaattatataatatacaaaggcatatgctatgatgcttggccccaaagcaagtgttcacataagattatctttgcagacaatattttttttctacctttcatcgctgtactttatccaaggcacttaaccagttggtttcacattttagcatctttagacatggtgattattccgcatgtactgttttctcctgttttgctcagctaataacatttattcaactttggagaaccaacgtaagtgtgcccttcataagttggtcttttatgaaggacacccttaagttggttctcgaaggttgaataaatgttatctcatacctgagtctacccatagcctagagtggtcacgtgggctctatgctcatgtatgcaaaggatctctccttactgcttgaacactacctcacagtgataacgttatgtatctgtctctcctactgggttatggatttcctggcagaaggactctgtcttgcccatctctatagtctcaggatttattaaatatccacaataggcagatatttaataaaacgtaaaaattaacaaaaacactctcaaaactaatgagggagataagatagctgattccactataatatgacaagtaattggcagaaaatatgaatgctttcatttctctgaagccttactgttcatttcctcttagaccaagaacgcttttgactgtgaccattggctggtctaactctcttattttacaggtgaggagacaacccaaggagaggatacagcaaaatggtgtcagattttggagcagagatcagatattattgctctatggcaactaaacacacggaagggtaggagtccataatgtgtacatgcatgagctccccactggcaggaggaagtacagtcacaagagcactacagtgggttgaatggtggccttaaaagatttccccgtgtcttaaaccctggtaactgtatatgtgatcttatttggaaaagggatctttgcagatgtagttctgcagatgaaatcaatccaaattatctaggtggaccctaaatccaatgacaagtgtccttataagaaacacatgcaaagggcggggcatggtgctcacacctgtaatctcagcactttgggaggcccaggcaggcagatcacctgaggtcaggagttcaagaccagcctggccaacatggtgaaaccccatctctattaaatatacaaaaattagccaggcatgatggctggtgcctgtaatcccagctactcgggaggctgaggcaggagaatcacttgcacctaggagggggaagttgtagtgagccaagatcgcgccactgcactccagcctggacgacaagagcaaaactctgaaaaaaagaaagaaagaaagaaaagagagagagagagagaaagaaagaaagagaaagaaagaaagaaagaaagaaagaaagaaagaaagaaagaaagaaagaaagaaagaaagaaagagacacatggagaagaccatgtaaaaatggaggcagagattggagttatgcaccacaagccaaggaaggcctggcattaacagaagctaaaaagtcaagagaggattctcacctagagcttttggaaggagcacagccctgtggacaccttgattttggacttcagacctccagaagagttgttttaagcccccaagtctgtagtgggtttttaaagccgccctagaaaatgaatgcaagcaccatttggaggatacatgcttttccccccaggcatatttctctccagttaagctttctataataatctctaagaaaatttttagcctttgttacttaaaaaaataaagccctttccctttccttatcttttccctttttttttctccaacttcggtgaggaataacttacagccccaaccccttaaaaaattcccagttctattaaaaaagccttagatttttttccccactaaagttgaaggtagagtattcccattcatattatatttccccagatcatatcctaaaagaaacaacgacaaagttttgatctttgtctcacctttgagcctctgaggtgcttctagtacctggagtaaaacttccatctttatcctccacacaaagcatgatccttttcctgttgacttctcagagtggtggtaagaagtagacgagagaaagtatctgtgggagttttgtaaagtgtgaggtgctgtgtggagataatgttactagcattacagctgctgactaatatgtatgaactcaatagagaatagacggaatctgagaattcagtgcatagcaccctctaggccgccggctcttgctgcttgtaccctatactttgctgccatcgtgtggcctttctggtagttgttagtgttgttggttcttatatttaatagttttagccataaattttataattataaattttcagggtaaaaagtaatttttattttagaaaaatactggtcatacaactgtgaaattgttcagtgtctatgttcttgtttgagggaaactaggagatggtttggaaataccatttgaaatattatgacggacaaatctagagattaaaagactgggatgggccaaagagacaacagacagtgttgtagactttagagaaacaaaagcatgtgccctatccaggggcatccataaaatacagttatttgaattctaacatttcctgcaaattttcccaggctctccacaggtagtctccaagtctttttagcttcttttctccaatatctctttcatttattctatactctccagccttatggctattgtgtatttgaggcctttgtttctttctgtctggatcattttaatacctggtcttcctatctccatgatctcttatttttcttttatcttgcacatgctgctagaatgattttcatgaagcactatagaaagagtacagagcagtgattgagagtaaagtctgaggccagattccttgagtctgaaactgagatccctcaatttggctctaactagtagagcgatttggtaaccggaggcaagttacttaaatgctctttatttcagtttccttacctatgaaatatgatactactaatgcctgcttcatatgcagtcatgcctctctcttgcttttttgagacggaacttcgttctttttgcccaggctggagtgcaatggcgcaatctcggctcaccgcaacctctgcttcccggattcaggtgattctcctgcctcagcctcccgagtagctgggtttacaggcatgtgctaccatgctcggctaattttgtattttcagtagagacagtgtttctccatgttgatcaggctggtctggaactcctgacctcaggtgatctgcctgcctcagcctcccaaagtgctgggattacaggcgtgagccaccatgcccggcccagtcatgcgtctcttaatgacagggatatgttctgagaaattcattgttaggtagttctgtctttgtgtgaaaattgtggggcatactaacacaaacctagatcatatagcctactatacaactaggctgtagtgtatagcccactatacaataggctgtatgctgttgcctgctattcaactaagctgtagggtatagcctatggctcctaggctacaaaaacctatacagcatgttactgggctgaatactacagacaactgtatttgtgtatctaaacatatgtaaacaaagaaaagatacagtaaaaatatggtattataatcttataggaccactgtactattatgcagtccattgttgactgaaacattgttacgccatgtgtaactttatttctgacacagataaaatgagcgaattcacatcagtgcctataatttagtgttcaactaatatttgctattattagcactctgatagaatgcaaattattttgaatgcaagaatttgatttgtcttagcatcttcaacttcacctatcacttttaagttgtagtaatttgataagatttttaaacatataggtgaaggatcactaagctttaagccagtttatttcttggaactctcattatattaccaaaatatgcttaaagtcatctcatgatttgtctatgcattaatcagagaattttcaaacttgctaaatttttagttaataaacagtgattaatatttattgagcattcaccaagtgaaaaagctctgttcaaaatgttttatgtagataacctcatttaatacacacagtagttttgagatcagtagtaatgtcagcattcctattttatgtagaggaaacaaaggtgtgggaaagtcccacagccagtaaatggagagtagattagaaccaatgcaatttgtctcaagagcttacattcttaagggaattctgtgctataaatacattctcctctaatctttcatttcagtcctgagatgctgtttctgaataccaaaacacagaaacatttaaaaaattccaaacccagtggaatgcagaatgtcaagctcattgctgcactgaagctacatcaacttgctatagcccattttgggaacagtgctccatgtgatcatgaactgtgatcactggtttctgttgcacttggatttctttaagtgtgcagatggtgtggagaccccaaagaccaagtattttaaagcttgtacagtaggaaagacaatgattcaattccaaaagcaattcattagacatatcacatatcacctgctgccttaaatgctggcttgtgttggaaagtcttcctgagaatactgtccccgaagcataaagtggacatgaaaaaatgtaatccctgaggtaagtggagcatctggaacttctagatgttccaataagactacacatggtcggcagggcgcagtggctcactcctgtaatcccagcactttgggaagctgaggcaggcagatcacccgaggtcaggagttcaagaccagcctgctcaacatggagaaaccccgtctctactaaaaatacacaaattagccgggcatggtggcgggcgcctgtaatcccagctactcagaaggctgaggcaggagaatcacttgaacccaagaggcggagattgcagtgagctgagatcgcgccactgcactccagcctgggctacagagggagactgtgtctcaaaaacaaacaaacaaacaaaaacaaaaaacaaacaaaaaaaaacaaaaaactacacatagtctaattttaagccttggtgcctcctaatatatggacaggttgaacactgaaaaatgtaggcataccaaatggtaatcatccattgataatagcacatacctatgtcttgcaatacacttttcttaggcttgatttgaattaatgaatttaatcctcataagaagtctatgatataggtattcttgtcatctctattttctcagattggagaactgacagagaggttaggatttcaaatcaggcaatctggatccaaagttcaagctttaactactaaggaatactacttatcattgtgtttatctattgataatagcagagttaaatatcattttattaattatgtagaatttctctctttgtttcaggacactaatgatacatctttgctgacaaagcactatgtaattgtgttcatacttttaaacttgtcagctgctaatgaaaatgccattctcaaatattatccttcctcattggatttagcttgatttttttcctctttagggagtacaattgaaactactctggctctcctcagtctccagtattaaatcattggcagcagctggtaacaaactaggaggaggatgggattgtgtgtgcaagtcttcattgtttgagcaagtggtgaatgtgtgagttgtgagcttgggggcataaagagcctggtgaaccatctgcacccagaaccattaaatcttgggatatgagagatattaaagattggattgtctagccattcatcaaatgcttaaaatttgtgtctatttacctgttttcagtttatacaactttttaataatattccattaatcttggatagatctaactttgttattttgaactgaaattgctttacttttaacttcaacggtaggtcccagttctaaagctctcaaaatcacataaaaaagtctaatcttctttcatggcatataaaagccacttatacgtccagtatgagtcttctcaagatccttggagtctttctgtgatagcactttgagtgtccttattaccctggtcatactcatgtggcaaacaatgtgtctaagagtatgtaagccaaacagtgttggtttcagtatgggaaatccgtgtgaatgcttgatagagaacgttcaggatgaacaatgacagtgtgaataagagagataattgtttgcaagagaagcttagtggatgaaacatagcttctctcatagcacagtgaaacattgcgccactgcactccagcctgggcaaaagagtgagactctggctcaaaaaaaaaaaaaaagtctcagaggtagggttagtatcacccagaatttatcttctgtacccaaatttccatactagttgccataatgaagagtatacctatttactgattacaaatatgttttattgaagataatataaattcacagcaattatttgtcccatggcgacaagatggcctatataatttttttatttattaataagagctgtatctagtacaattctacttcattgtgggttttttatttcaatcaaattttgaactttactgaagaaatcccttcatgtttttcttattatttacttcatgcatttatgaagtaaaaatacatgcattctttgtgtttctattgtctaattaaaaatttaaatgcaataaaatgcagaaagtttaaatgtgtaatttattgagttttgttaaattaacctgtataaccaacacattcatcaagacatacaacatttcacttgggaaaatttcttcacatcccttccagtcagtctcttccccacccacccacaaccaattatctaatttttctcatcatagacttgtttggcctaatcttgaattgcatataaatgaattttttcagtctatactattttgaaacttcttcctaaacaaaatttctgagatccatcatgttgttgtgtatcactagttaattatttaaaattgctgagtataaggtctattgtctaagtattccatggtgtatttatttgtttttattttggtagacatttgaattattttcagttttttactaacttgaataaagcttctggaaatattcatgtacaagtcattttcttttttttttctttctttttttctttattattattattattattttgccatgttttaacttctcttgtgtaaaaacccaggagcagaagtacggggtcatagtgtaagctcttgtttaactttataatgaactgggaaacaaatttgcaaacaatctgatactattttaagtgacatttctagaagtattattttctaatcgtttgtaacatagtacactcccaatgtatgagagttgcagttggtctgtatcctcacaaataaatagtattttccaggcacggtggctcacgcctgtaatcccagcactttgggaggccgaggcgggcggatcacaaggtcaggagatcgagactatcctggctaacacggtgaaaccccatctctactaaaaatataaaaaattagctgggcgtggtggcgggtgcctgtagtcccagctactcagaaggctgaggcaggagaatcgcttgaacccaggaggtggaggttacagtgggctgagattgcaccactgcactccagcctgggtgaaagagcgagactctgtctcaaaaaaaaaaagaaaagtgaagtttctcaccatcattttaattttcatttcgctgaagactaatgatgttgataacttttcatgtacttattggtcatttgtatgtcctctgttctgacgtgcctgttcaaatattttgcttattttaaaatttgtgttgtctttttattattgatttgcagaatgtgtgtttgtgtatatagctgtgcgtgtgtttgtgtgtgtgtatatatggcatatatatatgttggttactccccgcttcccctttcccttatagattttcctgttctgggcatatcagataaatggagtcatgtaatatgtgacctcttgtgacagtcttctttcacttagcataatgttttcaaggtttgcccatgtagcatgagtcaatactttattcctttttgtggctaaatattttgttgtatgcatgtactatattttgtttattctttttaatactctgctaggttttgtttgctagaattttattactctttcacatctatgtgtatgagaatattaatttgcctttttttcagtaataggtttgttagatttgtgacaggttttatttcttcctctaatttaggaaagagtttgttaaaattagcattcttctttctttaatatttaatatatagttcagcagttaaaccaaccaggcctccagctttctctgtgagaaggtttttaatttacaaattaaatttatttaccaggcagaattatatttattttcttcatttttcctttcaatttttaattcacgcttttcaagaaattaatccttttacctaatttgaatatactaacacaagggcatgtataatatttgcccatagaatctacaatgacatgccatcttttattcctagtattggtaattactgttttttcttttttcatcaacagtacctatgttagggtttaaccatcttattacctttttttacaaaaacactttggcttttaaattttccaatattgtttgttttatattttgatttttgctctttattatttttttatttatttgagtgtaattttctctactttttctatcttcttaaagtaatccttagattattgattttaatttttttcaaatataagaatttgaatctcatatatttctaagacttagttaaactggatcatacaaatatagagtgatttgttttcgtgaacatacattttcagaaattatctaatgtgccttgttgtttcttctttaccttgggtgatttacaaatgtgctgtttcgtttcaaaatattgaagattttcttcatcttagtgaattttaattcaatgccattgtggtcagagaacatacactgtaaaatttcaatatttttaaatttattgctacttattttatggtatatcatgaatgaatcttgaacatttttagcatttgaaagggatgtgtgttctgcaattgttgcagtagtgtcctataaatatcaattaggttaaaatggttgagatagtgctgaaatcttctacttacctactgatttttttaattcattaacgaactttagtttttagaggagttttaggttcccagtaaaattgagtggaaagtacagagagtgtctctatatgtccctgtccccagacagacacaacctccattactatcaacatctcccacctcagtggcacttttgttgcaatctattgacacatcttttttttcttctttttttagttttattattattatactttaagttttagagtacatgtgcacaatgtgcaggtttgttacatatgtatacatatgacacatcattattaatcagtgttctacattatggttcttgcttagtgttgtacattctatgaggtttgaaaaatgtataataacatatatacaccatcatagcatcgcacagaattgtttcattaccctaaaaatcctctgtgttctacctgtttacccctccctatccctacctcttgataaccactcatctttttactattcccatagtaacattgagcatgttttcatacacctattgaccatttatatgtcttctttggagaaatgtctactcaagtcctttgccaattcttaaaacattttaaaaagtgggttatctgttggttttgctattgagttgaagggggtctttatatattttggaattaactcttcctcagatatatgatttgccaatattttttctcattctttaggttggcttttacctgcagattgttttctttgctgggcagaagctttttagtttgatgtagtcccatttgtctatttttgcttttgttgtctgtattttcagcgtcaaattaatgaaatccttgtgaaaagcgatatgaagatgttccctaatgatttattataagagttctatagtttcagatcttgcatttaagtctttaatcgactttgagtttatttttgtttatggtgtaatataatggttcaatttcattattttgatgtggatattccattttcccaacactatttgttaaagagactattgtttctccattttgtagtcttggcacttatgtcaaaaatcatttaaccaatatatacatatgggtttgtttctgaactctttattctattccattgatctatatatctgtcttgatggcagtaccagattgcattgattatgttgctttgtaatatgttgaagtcaggaagtatgaagcttccagctttattcttctctctcaaatcattttggctatacagtgttttgttgttgttgttgttgtttattttttggtttcatatgaattttaggattttttttccatttccacaaaaaatgccagtgggattttgatagcaattacattaaatctttcggtcactttgggtggtctcgacattttagcaatattaatttttccaatctgtgaacatgggatgtccttccattaatttgtgtcttctttaatttctttcaacaaagttttgtagtttttagtgtacaaattttttacctcttcagttaaatttattcctaagtattttattatttttgatgctattgtaaatggaattattttcttaatttctttttcaaattatttggtattagtgtatagaaacacaaattatttttgtttgttgattttgtatcttgcagctttgctgaatttattatctctgtttttctgtttgtttattctgatatgcactttagaattttctctatatgcaatcatgttatttgagaacagagataattttacttgatcctttctgattttgttggattttatttattttttcttacctaattactctagctaagacttcaagtactatttcagttaaatagaagtggtgagactgtgcatttttgccttcttacagatctcagaggaaacatgttcaattttttaccattgaatattatgttatctgttggttttttatatatagtcttcattatgttgaggtaatttccttctattcctagttttttgagtgtttgttaaatgaaaaagtgttgaattttgtcaaatacattttctgcatctattgagttgatgatgtggttattacccttcattttgttattatggtatatcaccttgattgatttttgtaagttgaactatcatcacatctcaggaatatatgttaccacctggtaataaatacatgattctttcagtgtgctgttgaatttggtttgctagcattttgttgagaatttttacgtatgtattcattgggaatataggcctataattttctttcttttggtgtctttgtttgtctttgctatcaaggtaatggtgtcctcataaaattagttttgaagtgttcccctctcttcaattttctacaagagtttgagaaaaaatgatattaattcttctttaagtgttttgtaaatagaattcataaatgaagccatctagtcatgggctcatcctttttggaagactttttggtgctgattcaatctccttacctgtaattggtattattttatgtctgtggcatgagttgtaatgtcacctctttcatgtctttttttttagacttatctgtttttttcatactctggctaaaggtttgttgattatcttttcaaaaaaaaattcttaattttgttgatttctttctattgtttttctacttgtattttatttatttctactttaatcttgattatttcctttcttttggtgactttgggcttaatttgttcttctttttctagttatttcaggtataccattaaggtttttatttgaggttttttttcttattgcaggcatttactgacataaaactccctcttacggctgcttttgatgcatcccatacattttggtatgttgtgttttcatttttatttgtctagcaatatttttaagtttcccttttggctttttctttgactcattcgttgtttatcattcaagggtgtgttgtttagtttccacatatttgtgaatttttaagttttctttctgcttttaatttctagtttcaatccattgtgattggaaaagatacttcgtataattttaatcttccaggagctcaaacaaccctataggaaataatatccttaaatttgttaaaactccttttgcgacccaacacgtgatctatcctggagaatgttttgtgtgcacttgagaagaatgtttatcttctgctgtagaatgtttcttacatgtctgttaggtccatttgataaatagaattgctcagctcctatttccttattggtttcttctctgtatgtttggtccattattgaaagtggagtattgaaatctcctattatcattgtactactgtccatttctcccttcagttctatcagtgtttgcttcctatatttggttgcccatattttgggtgcatatatatttataattgttgtctcttcctggtaaattgacattttaatcattatataatgtccttctttgtctcttataacagttttttacttgaagtctattttgccttaaataaatatggttaccatgattctctttgcttatcatttgcatggaaaatcttttccatctcttcactttcagtctgtgtgtgtccttaaatctaaagcaagatttgtttatatcttatagttggatctttaaaacaaaaacaaacattcagccactcaatgtcttttgattgaagagtttaatctatctatatttgaagtaatttctgatagggaaggacttatgattgccattttattagttgttttctgtctatcctgttgccttttggtcctcctttcttctcttgttgtcttcccttgtgttttgttgattttttttttaatagcaacatgctttgatttattgctcactttctttggtgcatcttttatagataccttttattgtgtttaccaaagggcttacattagacattttatagttgtaacaatctctttttagctaataatttcaattgtacacaaaaactgccctttacgtctcctccccatggtatcagtgccatcagttgtaatgtctccccgtgcacacactatgctatagatgtcacaaattacatcttttttttttttccccgagatggagttttcctcttgtcatccaggctggagtgcaatggcatgatctcggctcgctgcaatctccacctcccgggttcaagcaattcccccacctcagcctcccgattagctgggattacaggcacctgccactacacctggccttttttttttttttttttttggtactttttagtaaagacagggtctcgctatgttggccaggctggtctccaactcctgacctcaggtgatccacccacctcagcctcccaaattgttggggttacaggtgtgagccactgtgcctggacaattacatctttttatattgtgtattatcatgtttttattgtcattttttgtacttttatctttcaatttctacaccagaattaaaagtgatttatgcactacttttatagtaccatactattctctgattttctatttacctttgccatctagctttaaactgatagtcttattgagcctcccttgtatgtgaaagtcactttctcttttgctgctttcaaaactctctcattgtctgacttttgacaatttgattacaatgtggcttgttatagatttcttatatactagttttatacgagttgaagtcttttggtattcttgaatatggatattcatttctttccacagatttgggaagtttgggcccattacttcttcaaataatctttccttccctttctctttctcctcatcttctgagaccctcatattgcatataatgaacaccttgatcatgtgccataagtttcttagtctttctttactctttttcattcttttattcttttctcctactggataatttcaatgacctgtctttgagtttaccaattctttgttcagctagatcaaatatgcagttgaacccctctagtaaatttttcaatttagttattgtattctttcattccaaactttctgggtgtttaaaaatattttatttttgttgatattctcattttattcatgaattcttttttttttccttagctcattgagcatctttatagtagcaatttaaaatctatttcatgtaatctccatacctttgtttctttgggttcagtttctggagatttattttgttccttttattgaaccatgtttctctgtttattatgtgccttataactttgtgttgggatctcttcatttgaaaaaatagccatatatatcagtttttatgaactggctttgtataggaaaagatctttaccaatcagcccagctagatattctagagagcttctcaaacttttcctatggatgcctcttctctggacttgtgcatataaattcattagagagatttgccagtttctttttttaagaattcatcatctctttctccctctaatgtgtctgtttgtgttctttggagctgccacaaggtgcctagctctcttttgctctcagtggcttctagtaaatgttgggacacatcagtgcactaagtccgaagacacagaaacaattccccccagagagctccctgaaaagccagaccactagaggcatactctactcttctcttctggcatgaccccacaaaggagagaccaccaaatggcataggcctctgtctgttgtatgttatcagtagcagcagcaatctgcccagctctattttgtcctctgtgccttgcaagtacatagagtattcgaggtccctcccatccatcctccaagacaggcaagacagaatctagtccttcgggcagtcccttgaaagttcagaattttggacacacactttaactctttccctccacagggataagccaggagttgaggcttctttttctccctactcattctgcactgagccagaggggaagggtatagaattttggtgagcgagtgtttgttagtctaaaccattacttttgttttcagtggtccccaacctggcccttttgtttttctgtgcttagagtcaggcaggagataaaccagttccttgggcagcaccgcaaaagtctgagttttggatgtgttttagtcttttcgtttcctccccagagagaagccaggaaatgggagttttctccggattgtacaactctgagccgggggttggggggactatggtgtatgagtgacacgaattttcttactggtttcaatgcatttggcttcatatttgcctgaggttcaggaacctcataactggtttatgggtttctaacaagggacatttgtcactgaattgctgttaaatggtgtcctatgaggggaaagaggttctgggcttcttattttgccatcttgctcttctattggctttttaagctgtgctgctttatttatttttagcagttgtatggggattaaaatatgtattcttaatttattattacttacttagagttaccattgtagtatttcatataaaatgtaagaactgtattataattatatttatacccttttccatctttgtggtattgctgttatatatttttcttctacatatgttataaaccctacaatataatttcttttttttactttgactagtaagctgcattttaatgacatttgtaaaagaaaaaatagtttctttatatagattcatatattcagcacttctaattttcttctttccttcttgcatatctgtgcttcaatctggtatcctacttcagtttgaagaaccattaataacaaattattatagcgtatttttactggtgacaaattttctcagtacgcatttattaaaaatgtttattttatcctcatttttgaagtatttccactgaccgtggaatactggcttgactttaaaaaactttcagtactttacagctgttgtttcaagatcttctggcatgtatttttttctttttttttggtttatgttttgttttgtttttgtttttgagacagagtctcaccctgtcacccaggctggggtgcagtggcatgatctcggctcactgcaacttttgctacccaggttcaagcgattttcatgcctcagcctccggagtagctggtgttacaggtgcacactactatatctgcttaatttttgtatttttagtagcgatgggatttcaccatgttggccaggctggtctggaacccccagcctcaggtgacctgccagcctcggcctcccaaaatgctgggattataggcatgagccaccatgcctggctggcctgtatttacttttctgatgaagagtccatcatctttcatcttttttcccttcatatgagggttttttttgatacattttaagattttctttttaccattatctttcagcactttgattataatatactcagtcaaggttttctatttacatggtttagggtttactaaatgtcttgaatctggagggtaatttttaaaacaaattttgaattttgaattttgttttttgcttctttttctctccctaccttttcttctctcctactttttctcctcctccgtctccttttcttcttcctctggattttcacaaatagttgaattttctgaggtaccagggctctgcttgttcttctcaatcattttcttttcattgtcttcagattggttaatttatattcacatgttttcaaattcattgaccctttattgtagtgtctaatctgctgttcagcccatctagtgaatttattcagggaaagtattttttattatagaattctcattagtcctatgttatagttttcttttctctcctgagatttcccaactcagcattgtgaatatattatttctacatttttctttaagtttatatctatatctctacatatatatctctatataaataataacatatccacctatatatctatatttatccacttttaaggtctttatctccttattccaacatctctatcatgttgggatttgtttatatcaactttttacttttgactatgggtcacatttttcctacatctttgcatgtctagtaatatttgactgtatgcttgacattatgaatggtatgttgtgggatggtatgtattgagtattttttttttctttgaggagtgtttagttttattctggcaagtggttaactactggtggcttgttttgattttgttagaatggatttatactttatttcaattttatccttagttctatggcatggccattattttaggtcacggtctttcctcctaggcatggtcattccagcatctcgaccgaatgcttttgttgctcagtgaagctttctcactctggctgcgttaggactttaacatctatgagcactgtttaatgtctccattcagatgagcactgaaggatttgtcactgctatagttgttctcttaagagtgtcacagaatactctcctgaacaaaagtagcccatcttttggccaagggcctgagggcaacctctgtgaagatttcttgcttcccctagtctgcgaagctttctctcctcagtacttggccacacaaattctagctaccttaccagcccgaaactctgatctgtgccttctcctctcagtaaaattgtcattctctatttggcctctgtctcccatgctgcccctggaaagtgaccccgggtagaaagctggagttaatacggggttaacttacattttccctttctctaaaatatgacagtcctgcaccatttgttatcaagtgcttgaaaataatgtgttaatagtttttgacccagttttataattgtttatggcagaaggataagtccaatactagttggactttgtcatggctagaagcagaagtgttgtttttatttaatattgcatacacaatctattcctagggttcctgacctaagtgactctctaaacctgacagttacatgcgttccagggagaggaagctaaaataaatggggataattttgctttttgtaaagagagagaaaaaggtattcgtatctttaaatatttgagtattttaaagtatttttaaaatttcattttaagtcttctacaaaaccttcattgaattatattctttttcttaaattagctctgaactctttggttatgtatcagaaattttcccctgtgtacctccaatctacctttttctgcttacctcctactttatctcacctgatgctctagttgtgttatactatttgttcttttaaaactataccctacctatgtaattttctctttgtctgaaacggccctcttcctttttttaaggcttagcaaacttgacatactacattctttgttacttatttctgcattactcatggttcttcagagaaccatggttcatggaactcatggttcttcaataggtgttgtatatcataatattatatctgtgtaatatataatgtaacatatgcaatatataatatgttatatatgtaatatatgtaattacattatatattatgtatacacacatataatctattatatatgtatgcacatatataggaaggaaaggaatatattatatatgtttgcacatacatatatacgtgtgtgtacaaatattatctatgcacatacatatatatacatacatatatatctgtacatatacacatatgtgtatggtctctgatacacctcacatcctgtggctcactcaagtggacacataaaattaaccatcccaatttccttttttctatatgtgtaattatatatacatatatatatacacactcacacatatacacatatataagtgtgagtgtatagatatatgtgtgtatatataatatacatatatagagagagacagagagagacagagggaggagatttattataagagattggctcacatgtttttggaggctgataagttccaaggtctgcagtctgcaaactagagacctaagaaagctgttgtgtagcttctgtccaagtctgaaggcctgaataccaggaatgctaatggtgtaagttccagtcagaaagctggcaggctcaagacccaagaaacgctgatatttcagtttgagtctgaaggctgaaaaagaccaatgtcccagctcatagcagttagacagaaggagttccctcttgctcagcctttttgtctattcaggtcttcaattgatggataaggcccacccacactatgaaaagcaatctgttttactctatctactgattcaaatgtgagtctcatctagaaacaccctatagtcatacccagaataatgtttggccaaatttctgggcattctgtggctcactcaagtagacacataaaattaacattccaaatttccttttttctattttcaaatgtgattttatcctccttttcatttgttcctatatctgacactttatacactttaccatgaataatcattattctgtcatgaataataaatgtctatttttcattttgagccccttttctacttagcacaattccaggagcttggacattattgcttcttcttctttacttccacacacaatcaattactaagttacattaattattagaatctgttcttttatttttatcatgactgcatttgccatcgtttagggttttacaatttgttgtcaggtcatattggttttctctgtctccatactagtaccagagtaatcctcctgaatcacatatatagcctactaggagttaaaatctttcaacagctttgatagcatttttaaaaatccagatttcttagcctgagcaacagttagtgtaattagcttgcctggtatggtttaggaagcataaactattacatccactttaatgcctattaagaaatgtggcagtggtttataatagagaagtgatgtagagatctatgaaagactttttttgatggaagaaacacaagtgaagtattttttcaggttataagagacagggttatattgcaatgaattattcccacaggaacaactgtagattagttatggaatcagctttcctttccattttttaggttaatattgccaggttttttttaatgctgtgtgttgttattggtgagatgaataaaaatatcagtaaatgtgttagaagggatataacactacaactgggtaaatacatgattgtctttgagtctatctgctctgaaacacaatggtggcattattagagaatagctatcactggaattaataataatgttcagaatctggctaatacataccttgattaattagttaaccccatcttagacacggtagatgagccattgtagtgtcactgaaaatacaggtgatagccacacagttgataagaatcaatctagcaaaatcctctggaaaagggatttagaagtgaaaaggcttgaagtctgctccaagttgagtaattatgttgtgagtttttctgagtgattcatttccctatgcctcagttttttccatttgtacaatgaaggcattgaactgtgtaatgtctgaaatttatatcaattctaatattgaatttgaaatttaagaaatatttctgattcgtgttttatatttttaaacatgtgtatcaatgcttcgggaattaaggactttaagttgcttaatgttatctattgtcaccaattcaactggtaacagctctaaagtctctctatgtactagacagcaaacacccttcttctctccctcagcataccctgacacttaaaaaacaggaaatgtgtatttttggatgttattcaaatttacttagaagtatttactcacttagaagcaatttactcattttgaagtatgctaagaaaggcattttcaaatcctgtagtagttggaaagttttttaaatcttggtttcattttttgacttcatttctggttctagtcatctacattctgaatgtacagaggcctccagtaaattttctagctaatacttgggaagcatttgtaagggaacagagtattatctcccagcacatgttgaagaaaatgataacagaagctatagaaaaaacagtgacagaagctatagagaagaaaatgataatttttatcgcagtgactgaaaggcaaccctggccagtgctgtgatgaggaataatactagtttcattggttaagttctagcattatatacctagagcaggtatttttaagaacaggttggagaacgcttcctgttggttttggattcagttgtgaattcagcaaactgtttagaatccagtatcatttctatgtggccaattttactgcaacataagctataatttgtatacatattgagatttgtccacaacaatataccattgtaaagataataacctgttataaattataataatcatttattagagacaaccttcctgaaataacttggtatcattgaggtgatgaaagagagacattgggggagtttattgcagaagcagagactctataaagaaaatggtgaacttgagggagttgagaactatgtatagtttgattgtggattattctattgtgatcaaactgaaaaagactaattcatagagactacttataaaaaacatttaattaatgagtcagatgctgatggatacatttacactgggagagagacgtcacctgctctactaccaatggaaattgccactctgttttctataaaggattccatacatggcttataaaaagccaaagagtcatcacaaggtttcttttgatatgtgaaattagtacagatagagttgggtaggtctaaggaacatttgtggaggctcagctagaatctggtttgtcttgccccactattgtttttttgagaccgggtctcactctgttgcccaggctggagtgcagtggtgcaatctcagctcactgcagcctcaacctcctgggctcaagcgatcctcccactgcagcctccgaagtagctaggactacaggtgtgtgccaccatgccaggctaatttttgtattttttagtagagatggggttttgctgtgttgcacaggctggtctcaaactattgggctcaagggctctgcccacctcagcctcccaaagtgtggagaattataggcataagccaccccacccagcccaccctactattttgtaaatagtcattggttattagggtactgagttagggttcactcatttgtcaataaaagtctattgagtagagactatgtgtcagaaatagttctggtctctagaaatacattggtgaatcagataaagttcctgccctcataaagcttacattctatcaggaaggaataagcattgaaccagggaactacaattaaacccttattctccagttgtggttttggtgtattctttatctgtcgaaatatccttttttttttttttttgaaaagtagcaatttctcatgacaaacatgttacagattctaaaatttgctgcgcattttaaatttctccttaatttatgaattatatatatataattgatttttccatagatgatcttaaaaagctgggatcactgtggtttgcacctaaagtattagtgatgataggtttaatttgtttagtgcctattgtaagccctgtagtgcggtagtcactatatgtataatatctcatagacttcttacaatactctataatgaggcattcttatctatatttagaggaaacaactgagactcagagaggtcatgtaaattgtctaagatgacacagctaataaatgacagaaccaggatttgaatcaaagttgtccagactcaaaagttatgttcttttccaccacaccactctgtccctcatttactaggtctttcctaaggcaataattacagctagctaattacatttcattctgaaatgaagttatgacttcttccttagtttatttgggtggaatccattcagagcatagagatccttatgcctttaatcagtcagattggactacttttcttttcaaaatctctgagatctaatttgtcttagagagtgtagccaagtggttcaacgtcctttgcccacagctcaaatgtcctctgaaagtaaaaagaagctcactatgagtagagacaggtaattccaactgtggatggatttgagaaagagaatattttttaatattgagttgagaattgtctccttaaagtaccagcatctaccacgctgaagaattacaatattttatccataaaagaaccctctggatattatgtggacaattttgttttcttctggaagctactttttctagcacctacagtttcattctcttcaccatgtgtcactcgcctcgggataggggccagctgagacaagctatagctatgggacgtaattcacagctttgctagaaggtaaacatttcacaaaagctatgcacatacttgtgaagggttttctgtgggagagaaagatcagtggttgtggaggaaagctttttcagaggtcgttgaaacatgactattcacagctgaagactgttatttgtgatgctcactgtcctttgtgataacatttatcatgtggatgcacatggtaaatgcctcctggaattcagtgccagggaaaatatgttggtaatgataaattggtacaattgtcttgataattaaggcttatacacaagtagttttgggggccagagtgcaagtgttcggttggtacctacataaaggaatatcctgtagtatttgattccccaggcagttgtagttggcacagaaatcccctataatgctatgctagagagtgctgcttctcataggtgtttctgatcattgtggggctcgcttcccttggacatggctcagttgatcttgcgtgagtctttgtaccagcttactgattattcaagttctccttaagctatctcacctgacttctcctccatctcctcttccaggaagaggaaaagtcaaagtccagacaaagtagttgcggcgattgccctgaaataggtgtctgctcttagacagacctgttgacttacagactgaatggaaatacaaaggtctgctatactcacgactgtaccctgattctgtgcccaagcttatacaacttgtgtgggctagacctggaatgagagtctaaaaagtctagctctagaatcagctctcttaaaacctacagtatagtgcttcactaataatactttaaaataataaaatgaatgtgaaatccagaccctacttctataaaaaaaaattgtaaaatttaaagtgttgtagagagaaatctatatgttttgttatgtgttaaatagctcttttggataactttaatactgagataaaataaatttacagtaaaattctcagaaggatgagataatttacatgagttcactgtccagatatcgaaacttactccttctaaaaattaaaatatcagagaggaaggcagcgcaagatggccaaatagaagccttcactgattgtcctcccagcaagaataacaaattgaacaactatccacacaaaaaagcaccttcataagaaccaaaaatcagatgagcaatcacagtacccagttttaacttcatattgcttaaagaggcactgaagagggtggaaaagagagccttgaattgccaacagtacccatccccctccccccagcagcagttctgtggcgtggagaaaaaaaaatctgtgtgcttggaagagggagagcacagtgattgtgggactttgcattggaactcagtgctgtcctgtcacagcagacagcaacaccaggcagaactcagccaaagctaatggagggagcaatgagaccagccctagcaaaggggaattgctcagaaccagtgaacttggggggcatgtgacctagtgagacatcagcttgaacagcaaagagagtgcttgcactatccgttccccagccccaggcagtgtagcttgcagctctgggagatacttcttccctccaccttaggagaggatagggaagagtaaagaggactttacttgccacttggataccagtttagccacagaaagacagggcactaggcagagtcctgagggccccatcccagaccttaattccaggatgacatttctagacacaccctgggccaaaagggaatccactgccttgaaggggagaacccagtcctggcaggattcatcatctgctgacaaaagagcccttgggccttgaactttcagcagtggtagctgggcagtactcgctgtgggccttgggtgagactcaaagacatgctggcttcaggtgagacccagtacattcccagctgtgatggctatagggagagactccgtctgcttgagaaaaggggagggaagagtaaagggagcttcgttccttagcttaggtaccagctcggccacaatggggtagagcaccaagcagactcttggagtcctcattttgggccttggttcttgaatggcatttctggacctagccctgaaccagaggggatcccattgtcctgaagagagtgtcccaggcttggcagcattcaccaacatgctgactgaagtgcccttgggctttgagtgaacatcagtggtagccaggcagtactcgccatgggtctggggcaagggtggccacaggcagaaactctgtgcttacagaaaagggagggaagagtgtgaaggacttagtcttgtggcttgggtgccagctcagccacagtagaatagagcaacaggtagattcctaaggtttctgacttaagggactggcttctgaaaaacatcgctagacgtgactggtgctggaggaaactcaccattctgaatggaaggacaaaagccagagtggctttgtcacctgatgattgtagagccctagggatttgggtgagcataggtgatagtcaggcagtggtaaccacagcccttgggtgagaccccagtaccatactagtttcaggtctgacccagcacagtcctaatagtggtgacaacaggagtatttgtgtcacctctcttctagcctagttagctcagcacagagctgagctgtttgggagaacgtaaggaaagagaacatgagtcttttcctggtaatccagacaattcttccagatctgatccaagaccaccaagaagtatctctataagtctgcaagaaccatattgttactgggcttggggtgctccctaatacagatggggctgcagtgaccagaaacttagagcacaacacccaagtgcctttgaatgcttggaaagccttccaaagaaggacaggtggaaaaaaaaaagactgtgaagactacaataaatacccaactcttcaatgcccagacactgacaaacatccacaagcatcaagattatccaggaaaatatgacctcaccaaatgaactaaataagggagcagcaattaatcctagagagacagagatatgtgatctttcattcagagaattcaaaatagctgttttgaggactcgcaatgaaattcaagataacacagagaaggatttcagaatgccatcagataaatttaacaaaggaattcaaataattaaaaaagaattatgcagaaattctggagctgaaaactgcaattgaaatactgaagaatgcatcagagtctcttatcagcagaataaatcaggtggaagagataattagtgggcttgaaggcaggctatttggaaatagccaggggagacagaaaaaaagaagaagaaaaaagaatgggccaggcatggtggctcacacctgtaatcccagcactttgggaggccaaggtaggcggatcattcaagatcaggagttcaagaccagcctggccaacatggtgaaaccccgtctccactaaaaatacaaaaaaaaaaaaaaaatgccaggcatggtgatgtgcacctatagtcccagctgcttgggaggctgaggcccccaacgtcaaagataaagaaaggatcctaaaagtggcaagagaaaagaaatgaataacgtacaatggagcttcaatatatctggtagcagtcttctcagtggaaacctaacagatcaggagaaagtggcatgacatatttaacgtgctgaaggagaaaaacttgtatcctaaaatagtagatccagtgaaattctccttcaagcatgaaggagaaataaagatttttcccagacaaataaaactaaggggttttattaacatcagacatgtcctccaagaaatgtaagggagttcttcagtctgaaagaaaagtttgtaagtgagcaaaaaaaatcatctgaaggtgcaaaactcactggtaatagtaagtatacagaaaaacacactatattttgacaccataattttgatgtgtaaactactcacatcttaagtagaaagactaaagatgaaccaatcaaaaataaactacaacaacttttcaagatacagatagtgtaataagatataaatagaaatagcaaaaagttaaaaagtgggggacacaattaaaatataaacttttaattagttttctctttgtttatgcaataggtgttaatttgtcattaatttaaaataatgggttataagatattatttgcatgttttatggtaacttcaatcagaaaatatacaacaaacacaataaaaatcaagaacttgaaacgttaaaacatatcgtcagagaaaatcacccttgctaaaaggaagacagacaaaaggaaagaaggaagagaagaccacaaacaaccagaaaacaagtaacaaaatggcaggggtaagtccttgcttatcaataacaacttgaatgtaaatggactaaactcttcaatcaaagcacatagagtagctaaatggatttaaaaaaaacaagacccaatgataagttgcacttttccataaagacacacataaactgaaaataaagggatggaaaaatatattgcatgcatgtagaaaccaaaaagagcagcaatagctatacttacatcagacaaagtagatttcaagacaaaaactatacaaagaatcaaagaaggtcattacataatgataaagaaatcaattcagcaaaatgatgtaacaactataaatatatatgtacccaatactggagcacccagatatataaaggaaatattattagagctaaagagaaagatagactccaacataatcacaggtggagacttcaacaccccactttcatcatcgacacatcatcctcacggaaaattagcaaggaaacatctggcttaatctgcacaatacaccaaatgaacctaatgtatatttacagaacattttatccaataactgcagaatacatattctcctcagtacatggatcattctcaaggatataccttatgtcaggtcacaaaacaagtcttaaaacattaaaaaaattggaagttatatcacgtatcttctgtgaccacagtggaataaaactagaaatcattaacaagaggaactttgaaaactatacaaccatgaggaaattagacagtatgttccttaatgaccaatgggccaaagaagaaatgaaaaaggaaattgaaaaaaatcttgaaacaaatgataatggagacacgacacactgaaaccaataggatatggctaaagcggtactaagagaaaagcttatagctataattacctacgtcaaaaattagagaaacttcaaataaactacctaattatgcttcttaaagaaatagaaaagcaagaataaaacaaacccgaaattagtagagaaaaaataataaagtttagagtagaaataagtgaatgtgaaattaagaaacaatacaaaaatcagtgaaagaaaatattggtttttagaaaagataaataaaattgagaaaactttggccagactaagaaagaaaagagagaaggaccccaaaaaaatcagaggtgaaaatgaagacttcacaactgatactgcagaaatccaaaggatcattagaggctactgtaaacaactctatgccaacaaattggaaattctagaagaaatgcatacattcctagatgcatataacccaccaagattgaaacatgaaaaaaaatccaaaactggaacagacaaatgacaaataagcagatcaaagcagtagtaagtcacccagcaacgaaaagcctggaacctgatggcttcaatggtgaattttaccaaacatttaaagaagaactaatatcaaccctactaaaactattcagaaaaatagggcaaaagggaatacttccaaacttatcatatgaggccagtattaccctgataccaaaaccagacaaagacacctcaaaaagaaaagaaaactataggccaatatccctgttgaacattgatgcaaaaaccatcaacaaaatactagcaaactgaattggattcaataactcattaaaaagatcattcatcatgaccaagttggatttattccagaaatacaaggatggttcagcatacacaaatcaatcaatgtgatgcattatatcaacagaacaaaatacaaaaaacacatgatcatttcaattgatgctgaaaaattatttgataaaattcaacatcatttcatgacaaaaaccctaaaaaaaatctgggtatagaagaaacatacatcaacacaataaaacccatatatgacagacccacagctagtatcatagtgaatggggaaaaatggagagcattgtttctaaaatctggaacatgacatggatgctcactttcaccattgttattcaacataatagtggaagtcctagctagggcaatcagacaagagaaagaaataaaaagcatccacgctggaaaggatgaagtcaaattatcctcgtttgcagatgatatttttgttatttggaaaaacctaaaggctgcacccaaaattattcaaattgatcaacaaattcaataaagttgcaggatacaaaattaacatacataaatcagtaacatttctatatgccaacagcaaataacctgaaaaagaaatcaagaaagcaatcccgtttgcaataactacaaataaaataaaatatctaggaattaatttaacaaaataagtgaaagatttctacaatgaaaactataaaacattgatgcaagaaattaaagagcacaacaaagaaatgaaaagatattccatgttcatggattggaagaatcaatattgttaaaatattcatactgaccaaagcaatgtacagactccatgcaagtccttcaaaataccaatgacattctattcttcacagaaatagaaaaaaaattttgaaaatttatatagaactgcaaaagacccaggaaaaagctagaattatccagctaaagctatcatgtgcaaaaagaacaaaactagaggaatctcattacttgacttcaaattgtactacagagctatagtaccaaaatagcatggtactggcataaaaccagacaaatagaccaatggaacagaatgaagaactcagaagtaaatccatatgtctacagttaacttattgcataaacaaagatgccaaggacatacattggggaaaagacaatatcttcaataagtggagctaagaaaactggatatctgtacgcagcggaatggaactagaccccctatctctagctaaccatatacaaaaacaaaaacaaaacaaaagaaaaaaaacggattaaaggcctggtgcggtggctcatgcctgtaatcccagcgctttgggaggccgaggcgggcggatcacctgaggtcaggagtttgagaccagtctggccaaaatggtgaaaccccatctttactaaaaatacaaaaaattagccgggcacagtggcacacatctgtaatctcaggtgctcaggaggctgaggcaggagaatcacttgaacctgggagtaggaggttgcagtgagccgagatcgcaccattgcactccagcctggggagcaagagtgaaactccatctcaaaaaaaaaaaaaggttaaaggcttaaatctaagaccttacactatgaaactaataaaagaaaactttgggaaaacactccacaacactattcttggcaaaaatttcttgagtaataccccacaaacacaggcaaccagaccaaaagtggacaaatgggatcacatcaagttaaaaaccttctgcaaagtgaaggatacaatcaacaaagtgaagagacaacccacagaatgggggaaaatatttgcaaactatccatctgacaaggaatcaataaccagaatatatgagaagctcaaacaactcaatagggaaaaaatccattaatctgaataaaaaatacatgaatatctgaatagacatttctcaaaagaagacatgcgaagtggtatataacaatatgctcagcatcactgattatcagagaaatgctaacaaaaactaacaatatgtcacctcaccccagttaaaatgatttttatccaaaagacaggaaatcacaaacactggccagcatgtggagaaaagggaatccttgtacactcttggtgggaatgtaaattagtacaaccactatggaaaatcgtttggaggttcttcaaaaaactaaaaatagggctaccatatgatcccacaatcccattactaggtatatacccaaaagaaaagaaatcagtgtatcaaagagatttctacaccctcatgttatagtaacactattcccaatagccaagattttgaggcaactgaaatgtccaccaacagacaaatggatgaagagaatgtagtacatatacacaatggtgtactattcacccataaaaaaagaatgagatcctgtcatttataacagcatgaataggactggaggtcattctgttaagtaaaataagccaggcacagaaagataaacttcacatgttctcactgatttgtgagagctaaaaattaaaacaattgaactcagggggatagacagtagaatgatggttaccagaggctaggaagtgtagtggcggggaatgaggatagttaatgagtacaaaaatgtagttggaaagaatgaataagatctagtattcgatagcagaatggggagactaaagttaacaataatttactatatatttaaaattaactaaaactataattggattacttgtaacaaaaagaaaggataaatgcctgaggtgatgaataccccatttaccctgatgtgattattatgcattatatgcctgtatcaaaatatcttatgtaccccataaatacacccagtatgtacccacaaaaactaaaagttaaaaaaatcaaaatatcaaaagcaaaaatcttattttatatatatatttttaaatgtcttagaaaattctcaacatattttacaatttttgttaatgtctcaggatcattattattaattttaatagttgtattgccctgtaaaatacactttcggagacttgttgacaacttgataggctttctggtgttatttgtcttcacacatgatggcaccatgtattgtgactttggagggcatgatatttgttggtttgttgtttgcttacttttttgctataaaatagttatttctcaccatatgttttaaaatctgtctatttcaacttttgcttcttgataagaggttagcagtccttttctgctaagagccagatagtaaatattttaggctttatggaccatatagcctttgtcacaatcactcgactcaggttgtagcctgaaacagtcatagacaacacagaaacaaatggctttggctgtgttccaatggaactttattttcaaaaacaggcagtttgctggatttggtgtgtgggttgtagttctagaccgttgagcgtggtgaaatagccgtgtagagtaatatgtaaaaaagtaaatagaatttttaaaaatgtaagtacatattgtattaggacataatgttaccctacaagctatgtaaaatttagtgctacaattttatgacagcatttgtgggtggttagatgtctttcttttgtcccttctttgcatcttctttcaggtttgtatctatgtggcagatatttggggttattgaatgaatgagctctagaacacttgcttcatatgaaaacgtgcatatgtatgtttatgtatctcagatacagctaaattcattgtaccaattaagacctagctaagattggtttgagctccattctatgaattttagagttcagtagtgcccaccccaaccaccagcaagttgtatgcaaattttcagtgtgagtttatattttcaaggtctcctctggctctgaattctgcttctgtcaaattatttcattttagagattgtacagctatccttgttctctgaaaaagtctcttggccatttctatacctcagactgcagcctcctaccatggtttttggttttccttagtcccttccagatggctcacaggagctccaaattcttctcacattgttctgcagattaattccatttcctccagtcttactcccaaatttctctctgactcctctgtgcatgttttgatctaccaagatgctttgctgaagaaagaagacctattctcccttaattgaactgtcttcctaagaagggagttttaattttaagtagaattttttccctatggatatatggatgaaagactaggtggatggatggctaaaaagatgttatacagtactgtatattaggatagctacttcatatggaggctagtaccaaatatgaaaaacctatttttagcttattatagttgattttgtgatctagatattattcagcattgttcttcaaatcccctgccatagccaaaacacaccttatatactatttcaggaagaatttttttcatttcttatttgtttcattttataacatatcctaataatgattttattacaaaaggagtcaggaataccacttcatatgatagtctactaaatcttaaaaatagaatataagatcataaattgtgtaaggtaaaagttagacttaaaatcaaagtatccactgaaacttacaatagtaaggtggtatttctatttggaggaatgtctccaaatctccaatattagaaaaatagttatcttattattattaaatagttctaaaatcggtaattttaaaatgattttattcaaaattagtattattcagtcatatatgaattatcagccactcttaattgtctacaaagagcactgcaaagaacatcaaataaacagatacatttttaatagactaaagagcatggtggttcatgcctgtaatcccagcactttgggaggccaaggcagggagatctcttgaggtcaggagttcggtaccagtccggccaacatcacaaaaccccatcttttctaaaaatacaaaaattaggtgtggtggcatgcacctatagtcccatctacttgggaggctgagacacgagaatctcttgaacccaggaggcggaggttgcagtgaggcaagatcataccactgtactccatcctgggcaacagagtgagactccatctaaaaaataaaaataaaaataaagagcttacatctggttttgtttctggaagtgatagaaatatgattaaatgattagaaaaaatcagaagtttaaaatataagttaattttttaaaaactcacatttcctgagcactacagtaacctaaaaccagcttctttgaagtttactcagtgtgttgaactgtaatggaaagctagcagctatactgcttatacttttttcttagaatcactagaaaatatttgaccataaaaaatagattctgagtaaaattactttttttaaacaaccaaacctgatccttttgtagttcgtaagcatgatgattgggtgttcacgtgtatgtgtgagatgtgccacccttgaaccttgtcaagacatcggcacattacccatctgatatgaaaaaaaaaaaaaccctgtcatcttataaaaattcacatttataaagaggaatagagataggacactgaatgctttgggtttgttttgtcgacatttatgttttcaagcaggcttgcttcatccaatttttatattcttttgaggaaaaatacactgccaggaatcacagtatgcaatgcaaattagacacagaactattccctatggactttctagcctatggagagagatatgcatgcagacaacagagaaaaatggggtcgcttctgatgtttggactggcccacgataaactttaataaactagaagagacatagaggacagttttggctaaggaaagaaaatgaacagaggctcaaaagttcaaaagtctatgtccaagtaaagcaagtgcaggcttacattttactgtctttaatttctaaattcaagaagctctgaagaccactgtgtgtgttgttgtttttccttaagctacagactgacctgaattgacaggaggctatttatagtctttatttgtcctacttatgagaatatttatagattttactgcagaaatatcaatgtatttcattataggtgcaggccccaacatacatggattttgctaatattttatacattaactgtattactttaaaaaaataccaccttgttccccaaaaacctgaattacaaaactcactcggccccagctgtttctggtaaaggattgtagacttgaagtaattatgggggaagtgatattatagaaactatgtccagaaagctaggtgaagattgtgccagttcttgaacataccaagttacagattttggtaatttgactatagattgtaaggaaccattatacacttttgaagaagaagtgaagtattcaaccagtttttatcaaaattggttgaatccctgagcacacgctattttaaattttttctccatgcaattacaaaaactctgagtaagatggtgtcagatgaaatgccttttgaaaatagatatttacatccatcatttgttttcttgtgatggtgtgtaggagaaataaggttagagaaaacaattctagatcatgtctgcagcttgctaagtgtcatgccacataaatatggtcagagtttgatgtccccaaatgactatgcattaaaaatacaagaattgtctcatagaagaaaaaaataaacaagcaaaaaaccataagaaatagtgatttatttcatatttgttcatgtttcttgctaaaaatacctgaaggcaaattccagaaaatttgtttctgatttggttaagaaaattgagaaattaaaaatgttattgtcattgttgtgtgtacagtgtatgtgtgtcactcatagtgagtctttaaactctgcctttaagaacaagcatcaaaagtttggtacaaaatcaatgttcacaaatcagtagcactgctatacaccaacaacgacaaagttgagaatcaaatcaagaactcaattgcttttaaaacagctacaaaaaataaaaaaaatacttagtaatatacttaagtaggtgaaagatctctacaaggagaactacaaaacaatgctgaaagaaatcatagatgacacaaagaaatggaaagacaacccatgctcataaatgggaagaatcaatatagtgaaaatgactatactgctcaaagcaatctacagattcagttcaatccccatcgaaaggtcatcagcattcttcacagagctagaaaaaaaaatcctaaaattcatatggaaccaaaaaagagcccacacagccaaagcaatactaagcaaaaacaacaaatctggaggcatcaccttgcccaacttcaaattatactacaagactatagttaccaaaacagcatggtactagtataaaaaataggcatgtagaccaatggaacagaatagaaaacccagaaataaagccaaacacttatagctaattgatcttcaacaaagcatacaaatacataaattggggaaaggacaccctattaaataaatgttgctgggaaaactagcaagctacatgtagaagaatgaaactggattttagtatatgctaatccagaatgtaggtctaatgctgagtgtctaggaagaccatggactaaaaacaactaacaaacaagaaagcactatccaaataagctgccatcagattaacacctcctaagcaaaagctacttatattcctcaactcaaggtgtcagtgacagcatcaagcgtgtggtagaaaattaaaggagggggttgatttcccaaattttatcttcacataacttcctttcaaaatataacaacccaaaatgttgttaataactttaagttttaaatttcacctttaagaaaagtattttcatttgctttaaaataattatacgttttaaaaatagggacgaccagtgggtgtttcataataggttctgaccggagaaaaagaaaaaaaaatacccaaacctcttttttcggaatgtactagtccttttgaagaagatcttctgtaaatggggagtccactaagtgctaatctctatgttaagcatttccttttctttctttcttttttctttttgccacaacaaacctcaaggcagactattagctttgttttgcaaatggggaaaatgaaattaaagttaagaaatgtgtccattaacacacagctgggacttgaactcagcaatgtgtagctctcaagtgtttcttgtgatgtcatctaagactttgacaaccaaactgatcataatctctacaatgtggagtggacaactgaaatgaaaacaggaaagaaaaaaaatcaccactctaataacgtgtgtagctgtaaactatcttgctgtccaatatttttcttatagttttaaaacattaaactgcagggctgggtgtggtgtctcatgcctgtaatcccagcactttgagaggccgaggtgggtgcatcacctgaggtcagttcgagaccagcctggccaacatggtgaaaagctatctctactaaaaatacaaaaattagctgggcatggtggcatatgcctgtaatcccagctacgtgggaggctgaggcaggagaattgctcaaacccggtaggtgaaggttgcagtgagctgagattgctccattgcatgccagcctgggtgacagaacaagactctatctaaaaaaaaaaattaaaatgcaattcagataccataaaatttacccttttaatgtgtacagttcagtggttcttagtatatgtataagtctatgcacccatcaccactctaattcctgaacactttcatcacctcagaaaaaaactccatgcccattagtattcacttcttatagaattttgatgaagcaaaatccttcaaaagctttctactaaaagtccaattttcttagatttctccttcaaacaaagacaattcttaaatattttatagatacagaagagaaattattaaaataatctcaaataacaaatgagcaatattgctgttgttgaataaatcttcaaggatgaaaggatgaaaaggattattactggtagagtttcccaaaagtcataaatgtcaataagcttctccaccatatcattaccacaatttttaaggacctacgatctggcaggcaccatattaagatattctatctcaatttattctgacaacaattctaaggaagtatgaatactcactctattgtacacatgaaaaccactgaaagaaggagcagtcgtctcatccagtaaatgtaagggttgagaggtaatcctaggtccagtttgatttcaaagctcaacctctaaacactaagctccaccaagtgagagaaagtggatcaaaagagaatgtagatgtcaaattaaaaaaaaaaacaggatggagagagaaggatgaacagaagtgggttaagggtacaaacatacaatccaataagaggaataaatgtaatggttggtagcagaataggatgaccatgcttgacaaaactgtattatcctcaggtgatggacattttagataccttcccttaattgctacccattagatatgtgtaacaacatttctcatgcacctcactgatatggtttggctgtgaccccacccaaatctcatcttgaattcccatatgttgtgggagggaccccatgggaagtagttgaatcatgagggtgggtctttcctgtgctgttcttgagatagtgaataaatctcacaagatctgatgatataagggggagtttccctgcacaagctctcttcccttgtctgccaccatgtgagatgtgcctttcaccttctgccttgattgtgatgccccccgagccaggtggaaccataagtccattaaacctctttcttttgtaaattgcccagtctccagtatgtctttatcagcagcataaaaatggactaatacagtaaattgataccagtagagtggggtgctgctgaaaagataccctaaaatgtggaagcaactttggaactgggtaacaggcagagattggaacagtttggagggctcagaagaagacaggaaaatgtgggacagtttggaactccctagagacttgtcaaatggctttgaccaaaatgctgataatgatatggacaatgaaatccaggctgaggtggtctcagatggagatgaggaaattgtgagaaactggagcaaaggtctcttgttatgtgttagcaaagagactggtggcattttgcctctgccctagagatttgtggaactttgaactttagagagatgatttagggtatctagcagaagaaatttctaagcagcaaagcattcaagatgtgacttgggtgccatcaaaggcattcagttttataagtgaaagagagcgtaaaagttgggaaaatttgcagcctgacaatgcgatagaaaagaaaatcccattttctgaggagaaattccagctgactgcatacatttgcataagtaatgagtagctgaatactgttccccaagacaatgaaaaaatgtctccagggaatgtcagaggtcttcatggcaccccttcccatctcaggcctagaggactaggaggaaaacgtggttttgtgagtggggcccagggtccccatgctatgtgcagcctaggaacttggtgccctgtgtcccagctgctccagctgtgtctgaaaggggccaatgtacagctctggccatgacttcagagggtgcaagactcaagccttggtagttccaatgtggagttcagcctgccagtgcacagaagtcaagatttggggtttgggaacctccacctagatttcagaggatgtaaggaaacgcctagatgttcaggcagacttttgctgcaggggcagggctctcatagagaacctctgctagggcagtgtggaagggaaatgtggggttggagcccccacacagggtccctactggggcactgtctagtagagctgagagggccaccatcctccagaccctagaatggtagatccactgacaggttgtaccgtgtacctagaaaagctgcagacacacaacaccagcccatgaaagcaactgagagagaggctctaccctgcaaagccacagttgccgagctgcccaagagcatggggacccacctcttgcatcagtgtgacctggacctgagacatggagtcaaaggagatcattttggagctttgagatttgactaccccactggatttcggacttacatggggcctgcacccctttgttttggccaatttcttccaatgcttgaaccctcattgtatcttggaagtaacaaacttggttttattttacaggctcataggcaaaagggacttgtctcagatgagactttggactgtggacttttgagttaatgctgaaatgagttatgactttggaggactattgggaaggcttgattggctttgatatgtgaggatatgagatttgggaggggccaggtgtggaatgatatggtttggctgtgtccccacccaaatctcatcttgaattcccacatgttgtgggagggacccagtgggaggtagttgaataatgggggtgggtctttctcctgcgctattctcctgatagtgaataagtctcaccagatctgatgattatataagggggagtttccctgcataagctgtcttctcttgtctgccgccatgtgagacatgcctttcaccttccaccatgattgtaaggcctccccagccacgtggaactataagtcattaaacctctttcttttttaaattgctcagtctctggtatatctttatcagcagcatgaaaatggactaatacacccataaatatgtacaaataaaaaaataaaaatgaaaataacagttcagtctaaatggattatttacataagcccaggatgctgaagatggttatctagtgctggctcctagaagcattattgcagtgattttcatatctacatattgaatgcttacaatgtgcacttgcataagaccatagaaaacagatctttctgatccttccatttttcattatttgttaattaacctataaaactagaaatggaaacaatggcaaaatctggaagtatacaacctttcagactaatactatgaacctcttctcccaggtctttgtctgttggtcttccaggatctttatcctaaactagtcatcatcttagtttattttctgttgttataacagaatatcacagactgtaatttataaagaaaaatacatttaatttttgcagtcctggaggcagggaaggctgctagcatctggtgagggcctttttgctgtgtcatatcatagcagaaggcaagtgtgtgctagctcaggtctctcttcctcttcttataaagccaccagtcccattgtgagggccccactctgatgatgttatctaatcctaattacctcccaaaggccccacctccaaattttatcaatatatgtttggggattgagtttctaacacatgaaattttgaggacacattcaagtcagcatcaatttaagggttccaaaggctccttttctcctggcttgcatttcttttggattttttcaagacttcctttatttttatcatacttgaaaccatgtggtaggtgtgtcattgatttttaggaaagacagaaggcatgacgcatactgcttttgttgtaactgaaatgtaaggttataataaatttgattaaggctttatcttcagtcgaaccatatggttaactctaaagaaacagaatcatataactattctgcaactcgggtaaagttttcaattcaattcagcagatatttattgaccatttcctatgttttgagtagcatctgtatattgcgaaaggcagaaatagtaatatttcatgatgaatgacttttaagacttaccatgaaagggaacaaaagtgactgtgtttgtgtctgtgtgcatgtgtgtgtgtgtgtatgcgtgtgtgtgtttataagcttgaggtgaggaactgtatataaagcatgtgcccaactaattgtgacacaaactatgatgtgataagtgcctcagcatttcctgattcctctggctaaatcaacacttctaccacctctttagacaccataaaatcatgtacttctccacttttgcagccgttacagttgtaataatatattagtttgcatgactatttggctaaattttcaagaagtactttggctttttggaaatcagagactattgtgtgaaagttctgtgctaagaaatatgcgcaggtaagctccaaagaagggcacctaatccagccagggaaggtttattgacagaggtgataatgaatccaatttttgaagggttggtgtgaactcactggaagaagaaagaaagcaggatagtctaagcaagtgaactatcatgtgcaaaaacatgtagacatgaacatggaagtgtgactcaggccaggcgcggtggctcatggctgtaatcccagcactttgggaggccaaagcaggcatatcacgaagtcaggaaatcaagaccatcctggccaacatggtgaaacccatctctactaaaaacgcaaaaattcgctgggcgtggtggcgcacacctgtagtcccagctactcaggaggctgaggcaggagcatcacttgaacctggaaggcggaggttgcagtgagccaagacggtgccactgcactccagcctggcgacagagtgagactccgactcaaaaaaaatagaaaagaaaaaaacggtgagactcaaggacatggatggagttaagttcatgtacggagataaaagaagacaagcaaatcatcgtaggttttatgtaccaaacttacactgtcgacttaatcttcaatacaatgaaaagtttctgaagagccacattctttagggacttaagttttggggtgattattttggcagtatggaggctaaattgaaggcagttggaatatttttgtaaatatgttgtagtaattaggcaagatgtgatcagggcctgaaggaaggcaagaataaagtgatggatgttagagatgttaaacaaatagtatctgtaatactctctgattggagataagttagcaagaacagtctaggatggctcacaaggctttgaatttggaaactggatagttagatgtagttgctcattaaaatatggagctcaagaagtttacagagaaagatacgtgtccagttgtagttattattattatttttttgaaatacctgtggatcctttagcagaggtttccagggaaacttggaaatggatgattaaatctatgtaggtatcttgtcagcagacacagatccaggagttatcaatagcgtaggaattttaatgtgtaagaagatgcctagtaacagtaaaaatggagaagagattgaagcttggtaaatagtaacacttagaggatggcagaaagagaactatgatgttaatagagaagtagaaggaaaaccgagagaaaaatgatgtttctgaagatgaggaagagtttcttgaaatagagtgatcaataatttcaacacatataattactgcatctttgtagcattaggacaaaatgtgtccattttatctggaatagccttgattatggtgattttataaaaagaactttggtgagattgtgcaagcaggaggcagcactcgggtttaagaaagaaaagaaatgctgaagtgaaggtagtacatatagcctcttctttaagatgtttgtatgtttgtggaagggaaaaaagagaggatagaaaaataatgcacaaaggagatttcaaaattccacatgtgccttttgcctggtatgtgagagtggcaactttggccttaacctgtgttctgcacaggcagaaagatatatacatacgtacacttgtgaatatatttgtgagcataacaatcaccttaaaggggctgaaatattcattctccaaattacttcatgtccaacaagcctttgatatggatcctaatgaacatctccagttaaccctttttctcctcctttcccacaaccatttgtattaggacagttaaaagcttgccatcaggaaagttagccaaagtcataagcttagactctttcctatgcccttttctgaaagttaacactaatagaaagctcagagtttactgtaaaggcaatgcttatttttattggtcagatctttaaatgaatggctgccttctgcttctaaaaagcagacaatttacagagaaaattcaatttccagggaaaggaaaaatgccctgaaataatttctatgcctattatcaagtaagtttgattctgatgctatcaaaaccaggggcagcatcatagtgtcttttggagaatgttgcactaggaagggggcaggggttctgagccacttagttgcagccctgctgctgggggccaggtgactttagaagtcactgtcccttttttgtattttttttttctgttaaaggatggagttagaaaataaatgtctaccatgagttgacttatgttaaaattttattccctaaaaccccaaatgaagtcattccacatatacatatcctttttctatctgcattttggaagaacctcttctttacaaatatcatgatactgctatgtggttttacatggtttgcatccctcctcggcaatcagaatcactcttctcatctgtgctatcattaccacaggcttcacatttctctatccatctcaacattgtttgtatagctatctattatttccatccctatgagatagtgagtccactgagggcagggttatatttaaacaaaatatgcactcgctaaatgtgcagtgaatagaaatgaatattgtttaattcatttaacaggtggacttaatagtatcttataaaatttgatgaaagttttatttggagagcttggataatacgaaagctaaaagaggttgggtgaatctttattatcagacttgggtagggctctttattactgttttggtgtctttaatactcaagattgttgaaattccagaagggcatgtgggaatcaaacatggtttataacaatcacatggaagtaactatttttcccaatgtcacctaaatgtaagacttcccatttaaaaatgaatatatagtttaaaagtaaaataagagtagcacctcagatttatggcactttggaaatttcttatcatttcctcatgcatcccttcatcctagaggataatgatcatcaatacttgaactccttttggtaccaacattctactgttaggctctgagaagttatgatgttcacttaggtcttctgattctcaaggcatcaagactatatcctgttgcaacttagaaataacatttctagtccctgtgtgtctccttcacattctggatttttgtattttaattaagcttagtaataaatatgttttaaaaatcaaagccaaatttatataactgatttttgttgtaatatgttatttattttgaagaatatgcatatggtacatttttaaagtataaaatggaatgcagtcaaaagtaggtctccctctctgttgtgttctgctacctaatctttctccctcagacgacaactgatgccaatttcttgtgtaccttttcagaaagagtccatgagtttataaacgtgaacgtatgcacattcttattttctagattacacaaattgtggcaaactatatttattcttttatatggttgttaaattcagtaataaatttcacagatctattcatattaaaaaaattgtagcacattactttgtgggaatataccaaaatgtaagttagttccttattgatagattagtatcactactatcaaatagtgttatcaacaatgttgtaccgactactttgtgcagttgtcactgttgtatgcttatgcaactatatctaaaataactaaataagaatttgccaaagggggaattggctttttaaagtttgaaggttagagacaaatagctatccataaaggcattaatgcttacttttaccaagaatgtatgagggttcccatttcctttatattctctctagtacaccaagttatcaaacatttttatccttgaaatcttatacggtattaatatttgattttggattatatatattatttcatgtgtgaatctgatgacttttcaaatgtttaaaagtaagttatatcttctatctaattcatatcctcactctaaattctttctgagctattgtttttaaatgtaatacagaattacaaatatttttcccaattggaaaatcacaaaaaagtcccccccgtttttttttgttttttttttttttgagacggagtctcgctctgtcgcccaggctggagtgcagtggcgcgatctcggctcattgcaagctccgcctcccgggttcacgccattctcctgcctcagcctcccgagtagctgggactacaggcgcccgccaccgcgctcggctaatatttactatttttagtagagatggggtttcactgtgttagccaggatggtctcaatctcctgacctcgtgatccgcccgcctcggcctcccaaagtaaaagtccccattgttttcatttcatcaatatttaaataaattatttcttacatattctaggtaccaagatatacaaacataaaagatatgaacatgaacaccaaaatttggaggcgaaaaggctcatagtctcttggggggaaaatatacatgtgcaagctgaataaaataaatcctataatagaggaattgcagtgtgctgtgggaactacgaggaagctgtgactgctttgggggaggcggggagataggagggaaagtttaccagagagatcgctgtggcttctatggtaggtctcaagaaatgtgtataatttatagggtcagagacgtgttcaggtgataggagaaaagggtggaaacacccattttgtattgtgcccctcctttggtaatgagttttgactaatgagcaattgctttttttccttgacattcataagtatttattatcctgaactgattgacctcatattttgcaaaataaacagctcatattttactatgatgatttaaaaacattttccttccatttgaattagataactcatctttaaagttttcttatggctaacgagctcgtgtttattcaagacaacttgttacagtgctattagaagagatggaaaacgtccaactgcagccccaaatcctggaggtatctatttgaagataagaaaaaagttctcaaacaaatgacaaaatgttcaaactcaatcataattagagatatgcaaattaaaacattacaatcacactgacataaatgaaaaagtaggacaatacattatgttggtaaggctgtgggcaaataggcaatcatatattgctggcaggaatctaaattcatacaagccttctggagtaaaattcagcaatacttagcataaatatctatacacatacttttcgacccagcatttctttttctaggaggctaccctggaggcacacagagtgtatttctcacaggagtattggttagcagtgttttctacaatatgaaaatgctacacacaaggttacttattgcagcattgtttataatagtacaatactggaaacaatcaaaagaccactacatagaagagtgtgtgtgcatttgtacaaaagaaacacaggcaagataaactaaagaaaccagttacctataggcagtgcatgggaaataagtggaaaaaaagagggaacaggaactggccaggagggataatgagggaataacgattatcaagctatactttttggtaaagctttgactctaagtaccatagtaacgtttcacgcacccaaataaaaaaaataatttaagtaaactaaatctagttaaataattaaaatcaatgtgtatggaatataagtttacaaatgaataaccaaaccacactgaagaggatgggcaagtaaagaagcaacctaagtcactttcaaaagaaaatagtattttgattggatactgtaaagttcaagacaaaaataagtgtacataaatactgtactcttgtaataagtgtttctcacaggagtatcagttagcaattctctaactaccttaagtgtatagtaggatttaataaataagtgaatatattataaataacggaagtcaggcctttcactgtcagaaagaagttacaaataaggaaaaggcaaaaaataaaatgaacctggtggtattgacttaggattgaagtattaacgatatctatctctatctctagctctacatgatatatcagaatctatctaaaaagatataccgatagaaatgtagaaataaatatgatgtacgtgtatgtgtatatagatttcctagctctctctgctgagaggacctgagagcaataacaccccagtaagaatgaggacacttagcgctcagatgttggttgctattgttctccaaagaaagaacccagactcatttggcaatcatttgaatccagggctagggtagaggggacaaaataaacttggaacattatgtgatgccaaacaattaaggaactgctaaaaaacaattggggtatgtcaaaaggacacaatagcaaatcagaaggatctcccaatggctaaagccagaacaattttagccacaaaataaataatgatagtattggattataatccttagaataaatatccttgaggccatactgatataaataaataactgaatacataaataaatgtaggagaaggaacagctcttacagaattcctattactttagacagaataaaggaaatacaaaagtcactgccgggcaaactgcacattaataattgttgcaagcaagatctgtcaatggatgctaaaatcagtggataaaagtttgaggaaaaataggacattagcacagcatcaaagttttttcctcaatatatttatcaattataaatgaaaaaaatgtaactttacaatatggaaatctagtagacataactttaaccaggcaatcaaggttaataccactaactgacatcatgtaccctcccccctgccataatgatatactaagaaggatacaacatcacttctatggcattcttgccaaatgaataaccttagactaatcattagaagacattggacaaatccaaattgaaagacattccgcaaaatatttgaccaatacctattagaaatgccaaggtactgaaagacagggagactgagggaccatcacagattgaaggagattcaagtgacatgacaatcaaatgcaatatgggtcgtagttggatctggtacagaaaaaggacatgagggtggggaagagctggtgagagctgcatagctggtgagagctgaataaagtttgtagtttagttaatcacaaggtactagtgtaaatgctctgggtttgatatttgtacactggtcatgaaagtcattaacattagggaaattgggtaaatggtatgtatgaactctcagtcttattttataacatttgcataagtggaaacttatgataaaaaagtttggaaaataatagaaggagataacgaagatgaagaagatgaagagaaggagaaggaggaagaagaggaacaggagtcagggaggggaaggaaaaagaaataaaaaagaacaaaaggaagaagagaaattttaaaataacatgtttgcttttttaaaaacagtatcaagattgtatttgaaggtattgctaagatgagagctacaggcatggttttgtgccctttcagagtcaatgggctatatgcataacatggaacaaaaatgccatgttagatatcgtactgattttcatcttttagtttatatgttggtttctttgtgaaaataaatttaatatcaattcaacagacattttgccattgatatattcaataaaagttttgcaacctggcatgattctttatatgttattaccaattcaacattctcttccaaacagataaatatactgattaattgcacagctgatgccaagagtgaacagatgcctatgtttagtcttaatagaaaaatatcttagataagtcacaatttaaatatctcaaaactcccttacacaattattaatttctacaaactcttagtaattatttttaaaaagaaaaaatttaggtactaggaattcaaacacattcatccatcattatataccagaattcctaatccttctcaaaaagtgctaacttattttattttgaagccacactggtgagtcacttgctataatttgtccaagatgtctaagtcaattagaaaacagaaagaatggctaactttaaaaaatcccaactacagacagataacataatttaaaatttgggtattaaaacaataatatatctgaatataaaattaaaaatattattgccagtaaaattttgagtttggcttatgggataatacacagaaaggagaaaagatgaatgttcttgttcaaactaaaatacatcactttcttacccttcatgtgctcctggctattttttttgttttgttttgtcttttttgggatgttatgatacatgtaaaaatgaattctgatatattgctcaagatacttcagaaagactgtactctgtgtgcctaattgtggaagtgggtgacaatcacatgaggagttgctttaaaaagcatgaacattgaaatcctgataagtgtaagagccttttttaaaaaataaaaaactgtctaagtaatacaattctactgatcaagtccctttcatacttacttacaaagtagaaacttatgttgatatatacttacaaagtacgagcttactattatcaaatgtccatactatacagtaagaaaatattttgcattaaaatgttacgtgccctctgaactcacctgaaagctcaataccaacaaaacaatctataaatgtaatacttcagtttgtttttataagtactgtgatgatccatttcctctctggtcataagaatcactgtgatagccatttaaacaatacagtacactatttgaatattaattgtactgagttgtctttcctgctttgcatcctaaaagtttacaatcctgttgtggagtaagaagactcacacataaatgcttcctataatcaaataacagagccactgtattagacgtcaatagtctaacacccagaacccagggaagttggtaataacaccttatgttgcaaagataattaaaatcttcaaagcactttcacatgttttacctaattgaactcttgccacaaccttgccaggaggcagagagggttgtgataaatataaaaactgatgctcaggaggtcatatgtgttttaaaatcacacacggacctgttcactctgctcaagtgccgtcgagggaaccacagcattgtcctgttcatttgctatttttccaggagtagcacttccctcaaagtaaggaaatagctctaggtattgggttccagaataggagagccctaccggaaaaccgtgttccgctgcagcacaaaggactatttttagatgttttccttttgctaattgtctctccctctgtggggaatttctatgggtagaatcccagatgagccaattttctcactaattctcaaagagacaggaaagatgaagaccatggctcaggttgccctggggctgcataacttcttcggtgatgtcactgcagtggttttaggaagatcttcaaggaccttggagcttaaagagcttgtgataccactgaacaacaggactaagaggcgactagaaagaaaggcctgggcatatcttcttgaatcttggaatcaccccaaatgacctttcctggagcttcagctttgaaaggagctaagagggtgtgaacccaggtggtggctgtaaactcaagcggccctccagatgttctggtttttcttccatcacctctgagagaaaaaaggaagagacttcttccaggcaacttcaaacatcatttcaagtgttagggagccagtggaaccgcgaatgtttagcctatataagagaaagagaacaggtgtgatgcaaaccatttttactcccttgcagggaagagctaaccagttagtgctaggcagccttgagacaatggatggaacaaaggtgaggtcagttgttggctcaacctcagggaaaacctaacagttttcgtgcaatgaattacctagggagctgctgagttcactgtcacctggattattcaagcagaaattcactggtatgaacactggcattcatcggaaagtgaaaatgattcacaaccctacaggtggggtctaaataataataattgcaaacactattttagcacttactttaaaacaagtgttttcttaactctcagggggtgtgtgagacagatgctatctttaactttcttttaaagatgagaaaattgagggacagagcggttaagtaatttgttcaaggtcacacacctagtaggaatttgaacttaacgctgcttgtctctagtgtctgtgctcttaatcacttgtattgctaagtgtcccctaaagtcccctcttgccctgagattccacatagggttacgtcctgtcacttcgacagcattcttcccatgcttactcattgcacttccaaaagggcattgttggcatcaggaaaagaaaaaaaaaaagagtcaagggggctgctgggaaaaaaaaatcgagatctttaaactcatggagaagctgtttggtcatcggggcgggctggcagaggcaaagcctgccagaatactggcgccaaagcgaagcgctcttttgtcttcagatttctcgcctcacctgcctcctctccctctgtcccttctagctccacttcccactgcacctatgctaagcttttctaggagcctgaaaggcacggggacaaacaagcacgccgctgccaatcctctatctcacaccctcttccccacccagattgacggggagacgcccagggtggtaagtgacttacccaaggacacagagccccgaccagaaaatccaggtgtccagactcccacatcggcactctgtccacgcctacgcacacctgacttctcatagccggcacccaggagctttctttattccacgtccccgcctccctaccccaccccctagttccctagagtcgcttctgacgctctgcagcctccggggtccagccctccctgcgggtgcttcccttccgccggattcccacaccggagtcgcccttggccgcgcgcagcccgcgggaccgctgccttccgggctggaagccgcgcagccctctcagcgcctcaagcccgggacggctgggacaccgaggtagtcgggctcccagggcacagggtccggcaccgagggcaggagcaggggaggtgccaaggaccccggtccagaaggcacctgtaaggaagcaccgacccgcagtgacgtcctccgcgtcgtcctcagaccagccaccgcctccggaaggtctcaaggggccgtgctcgagcccaccgaggggtggcagcgcctcgggctctcggagggctgcccccggcggaccggcacttccgcgtcccggcccgccccctgccggcgcccgggctccctccggctccatgtgcaaactcccctccacctgggcgcgcgcgatggactcgggacccggcttccgaagacaggccgcctgttggttggactactagcgcaggtgggcggggagttgaccaaccccacacacgcgcttctccatgaagattcttgagctttctctgaagaaaggagtgcatatgctgcagtgtctctgtggaaggagcctgaggtccagcgacagcccaagtgaaccccagctcaaagggattgtgacaaggttattcagccagcagggatacttcctgcagatgcacccagatggtaccattgatgggaccaaggacgaaaacagcgactacaaattgataaagacacctgttcttttgttcatgaagaaaagactaattatatgtaattgagtac

SEQ ID NO: 2770 - DNA, 633 bp, Homo sapiens
aaagcctcaagtctgcatagaaagcgcatttaatccttttttaactgggtgaggttgcctcttgggacccccagttgatagatgagaagcacctgactttgaaaaggaaccgaactcaagcaggctgcatcctaagcccggtgcgcagtgacccccggaccctccctcctcaggcgctcgccgatcccgggcctccccctcctcagatttgccaagttgtttctcattaaacctaaaccaactcttcagccgcgccgcctcggggaccgtaagccccgctctggtggacgcctggagtcgccgcctcccgagagtccacaccccatcttgtctccagcctgcgctgggaagaagctgaggtctggaggtcttcctctgaaggagcacagtccagggagccacagaaggctgccttgaggagtggaactgcttcagggatcaatgcaaagtgtcccctgtcaggagaaaaaccactcagaggagagatgggacctcagtatgtttgccatgctggtatccagcttctggcctcaagtgatcctcccgactcagccttctaaagtggcaggattacaggcatgaaccaacatgcccagcccagagaaatcaactcctgtgtgccaagattaggta

SEQ ID NO: 2771 - DNA, 324 bp, Homo sapiens
ggaacatggatgaagacagccatttgcgattgctctaggggaagccagctggcatgggaagtagtgcagtggagaaatgcacatggccagagactaagaccaatcatttgaatgagtttggaagcatcctacccaccactgccaccagtcaagtcttcagatgagactgcagccatagccaacagcttgactgcaacctcccaaaaaccttgatgcagattcacacaacattggacttctgacccatagacaatattatataataaatgtttgtctttgccactaagtttcaggataatttgttatataacaataaaccgtaca

SEQ ID NO: 2772 - DNA, 385 bp, Homo sapiens
gaagtatttaagcaagaaaatacagtgaagagccacttcacctggccggcctatcgttattttaagtgtatgatgcaataacctagatttgcaaggggcggctgtaaactttcttgcaatttcagtctcccgtaatagaccagatactccgtgaaaacagccttgaataacagtgccctgggacccagaactaagaagtcctgtttttcctgtcagggaatgctttattcttgatgacatggagtctttaagcctagcctttattcaggcaggaaagcagatgcccagcagcctccataaagtcaacaaaaatgaacttcgtctgctattgttcattgctccagtccttcccagaacaatgctacatatttttttctctttaaag

SEQ ID NO: 2773 - DNA, 39345 bp, Homo sapiens
gagtgcagtggtgcaatctgggctcactgcaagctccgcctcccgggttaacgccgttctcctgcctcagcctcccgagtagctgggactacaggtacctgccaccacacctggctaattttttttgcatttttagtagagacggggtttcatcgtgttagccagggtggtctcgatctcctgaagttgtgatccgcccgcctcggcctcccaaagtgctgggattacaggcgtgagccaccgtgcccagccaggtatgtttttttaaaattcctcctttggaacaatggtcttcagctctgcttgcatatcagacctttggaacaatggtcttcagctctgcttgcatatcagattctgatttgattggtctgggttgaagcataaggattagtattttaatttcattgaggtgtgatttaagccagtaaaggatgcaaatcttaagtatatggcctaataaatttttacatagaaatacatctgtctagccaccacccatatcaaaatataggacatgtggcatctgtatttactctccagatgattctaatgggcagccagggctgagaaccacagcccaagcagacggtcatccacattagatctgacactggcttttcttttgtcttcaaaacgtactgtgtgtttttatccctgtgcactcatgttctcctttaccatcatctctgtttcacaaaactcctccccgcctcacctgttgccactagcatttgcacacttctcttttgttgccctcaaccccttgtactgtacagtgagtgggtgggcatctgcctcctccacagatctatgagcttctccagcacaaagactggatttcactggaatttcatgtccccagggatgccacactaagcatgcataaaataaatgagtcaactctggtatactccagctgtcctgctgccatttgcctcatccacaagaataactgtggttggggacagggaaggagtatagctaagtcagattttttattgtggccctcaaggccaacctggggagccctactggaggaagccctgaaggatagttgccccgatgaccggttatggtggcctgcaatcccagcattttggggggccatgacaggcaggtggcttgagtacaggtgttccagaccagcctaggcaacatgacaaaaccctgtctctggggggaaaaaataaaatgtatatatatatatttgtgtgtatatatatatttgtgtgtgtgtatatatatatatatagtgtgtgtatatatatatatatatacatatacaaaaaaaaatttaaaaccttaggcaggcacggtggtacatgcctgtgatcccagctactcaggaggctgatgtgggagaattgcttgagcccagaagtggaggttgcagtgagccaagattgcaccactgtactccagcctgggtgacaaagcgagaccctgcctcaagaaacgaaacaaaccaaaaaagcgaaagttgcccctgaaaatatctctgggaagcggtcctccctctggataagctgagtgcttgttcctgcaccttggctcacacgactgctccatggcgccccccccccccttctgttaactgcatcttcccgacttcaacacccagctcatgctgtcatctcatgttcatcttccaaaaactccgaccctcacgcattccttttttattttctttttgtttcctttttgcgcttgatgtcagtattataggtcgcccagtacatggtagtcagggccatctttgtttcacatgacaagaggaactcagccttaacacctgctctgtctgccttggaaaagaaatgaagaaaatactcgtttcaaaaaacagttgggagttttaaatgtggattttatttcctttctgacttgtttttatgaaggaaaaaaaaaatcattcctcctccctatttggcaggggtagcgtcacccttgaggagagtgtcacagaaggaaaacgcgatcccccaccattgccgtccggctccaggttcctgagctgctctctctcacctctggctgagacttttttttctctttcccctagccatctttcttaactctcggggccccgtgcctaaatgacctgatctgtgaaatggagatatatagtcctttcattttaagtcctctatacatacaaataagagtgagaaaatctgctgaaactgaattttttaaaaccctcttccaaatcatgtttggttgttttccttaataaccagagatgcaaaagaactcactcattatgctgtagcttttctatttctcaccatggaaaataatcccagtacagctcttttgtgctttagttcacagggcctttaccgggctttatcttacgagagcctcacaagcgccctgtcaagccgagagacagggcaggcctgaaggctcagttgaggaatcaccttccttaagaaaacttgaaaccctgacattcccccacccctaccctctttcctttccaatactctctgtatatctgtattaatgttcccaccacactgtaggaatatctgtttgcatggctgtttcttcccctacactatgggctctttgaggatagagaccatatctagcatttctctgtaactaatgcccagcacagtaccttggtgtcaaaccgaatacgcctttgttgaataaatgtatgagtcaatgaatgaggttgcagagttatcaagtggaggagggattagaacccaggtatcttgagcccaagcaatttgaaggtgtttaagctaattcttttgtatgtttttctggctgtttatgtacttttgaagtctttatctttctgtgttaaaatatgtctatcgttattgcattttacagcatcaaaaattaagaatacttacattcttctacaaattgatgcttcaaaatagaaaatttggaatttcagaagctccagtacagtaactaatctgaaattattgatgcattttctttcgtcagggaataactttgaaagattcaaatgatttcaaaatccaactttctaacgtctgggagagaattcctcaaacacatttagcagtcaaaacaattctatagagtataaaagatgaagcatggcacttcgaagtaaaggttacagtttctataaatgagaaaaggccgaatatttgctagcaaaatatttttagcaggaaagaatttactttgggaggtacttaggcatgttatattaatactaatgtacaagttcagcaatttgtaggagtggaaagaattggattaaagtaaaaagttcttaatatctacacattaaaatggagaaaagtctgtgaatgtgaacttaatcaaatcatggtagataaacaattataagaacagaatctttgaatgatttttttttggatttacttactaacattagcagaatctttgtgccttgcaatcctggagagttttgttttaatcagatttgttggctgaggcagtttatgttaaaaaaaaaaaaaaaagtaacttttaacatccagctgcttttctgagaattacccatctatgaaaaaaaatgtagcaccattaacatttatgagaaacagacttaacattatcataaattatacagtaaactctcttggactgggattgaaaggtgtgtgtttgtctttgaagctgatgtattttgacagcacaccaggaggcagctcactctgaataatgggcaagatgagagcctcagaggaaagaaatcactcccttaagtgagcgtaaaccagatagggggtaaatgaacttccccacctggacacattgcaattttagaagcactgatcacacgagaagttagcgctagcagggacctaggagccatttagttatattttttctatttacaaatgtggaatctgaggctcagaaaaaagaaaaaaaaattctctcagcttcttccagtatttcaggggtagagccaggaacagaactcacccagcacccagttcacctctctcagagcctgaggaaagctcgtcaatgttttcagtctttgcttcttcctccgtaaaatgagcatatcatttgagcttcatgccctctccaatttgaaagtgtcacatttcaatggcatttgtaatcatctgggtaagttctttatttcactaccttgttgaatcagtcacctcaaaggaatggccgcttggtccaggaatggggtatccggtgataggtgaatatgttgtgaggtgcttaggggaagaggaaatgtgggggtctttaactgctgttctcttatttgtagggtagcaataggttgtactgtaggccagtggtatacatagccaagccctatactgttttgtctaaaaccctaaaatcctaaaactgggctgacggttgggcagtaggtctgataatttgctcaggagtcatctcttggttgagcctaatttactaatttgcattcctatattcaccgtcttcattccaatgccatctgtaccacacctgaatgattactccattttcatagctagtctccctgctgtcccaattcatcttgcccctcactgctaaaatggttcatcctgcgtcaagaacagtggtgttttttgtttgtttgtttgtttttttaagtgctgaaggatcaacagtgggttcctatgggacacctttacattgcctggtctacagtgtttcactaatggtggatctttgacactgagtcacctatccaattcatcttgtcccctagacacagctcacttttttctgccctacccacgtagctttcctctctgccagtgcgaaacacagctcatgactcacctcctaaaggaagccctctggagctgagcctcctcttgttcattacatcatggcttttgggccctttgggacctccttgtagaataattactggatcatttagttctggtgcccacattgttgatccccgcttggttcagaaaaattgtgatgctgaaatggatccttccttctcagggctttttggagacagcttgagtcccccaaaccatgtggtaccgtaactgaggcattttccttcccagggtacttctccgggaaggcagtcttttggagactggtaccttatgagggaaaatgagcctatttccaatgccatctctctctaataaagagaaacctcacttcactctaatgccacaaaaatgtgctcttggctttccttgagggagtctgttttggaaattccatggtcagaagaagcagggctgtggccggcaggctgtgtggtgcagcatgtccaggatccagtgtcctgtcttcttagtcagccaggctccctttaaagttagtggtttgctgggagacctcatgtgggttttcattttaaatggtgctcttgaatgtggctcctatttacatttttttttttttggaatatccattaccaagccttcatggtgaagcacctcccagtaaaggcagccaaattaaaggatgcgaaagccagctccctggtggactctggagatatgaaagagagcagtgtcttcactggaccagacccaagactctaaacccgtgggtgctggatccctgcagtcctctaggcttcactgggggtagaggaagccacagactcctgccaccaaatagtgcctactgtacacgcaacatgttctgctctatctttcacataaatgtagttgcttctgggatttagaaatattttttaaagcactgctaaataactagtcagcgttttaaatgaataggttaaaagcataactctaatgatgagggagtttacataatattttgatgtcgtaaatggactcttataccgtctgggccaagagccaacatacgaaggccctgggggttgtcctgaccatgtctgtgtgggcaaatatcggttgggtctctaaatcagaaggagtgcacttgcttgggctgattgaaatgacaagaacaaagtatagggataaccatccgtgatgcaaggccaattatataaccaatttcatcagagtgggttagaactcagcatcttgctaagccatttttcaggtttagcattggcctatagcatttttacttaaggaatctctgactccaaatacttgcagaaaagggacagtaagttctttcatgtaacagaggtaaatattaatccctgatttcttgcagtcacagcaacaaacattttagtaaatatggatacagtaaacaaatctgtatgagaaaccaggcctaacaacactgcatttttctgctaaagatcatattaacataggtccccactcccctgtttttcatggaataggggataaattacctggtctttttccccaccaagttttttaaagctaaaacttacctgagcattaaatgagtttggaagtgcctgctagctgaggggtaaagctgaaatttcagccgtttgtcactcactgcagagtttgcttgggtttgggggagagggatgagatgacattggataggcaaagcagtgacatcagtctcctggtgtttaaaaaaaaagtctctccagttccctctgtggtgagccaaattttcagtttcacagttaagtctaaacttaaagctttgttggctgaaataagaactttgcggagtgacatttctgttttcagggcttctgttgagaccatattgctggcgtaggaatttagcttcatgggacaggaaacagttataggctgtagtgagtaatgttcccctatttcagatggaaaaacattgaaaatcatgattttggccctcaaagaacagctattcgtggctgtcatggttaactctgtctctgactttgccttggcaacgaaggtcaatttaccacgataacaaggacgttgattttatggcacttgacatcttaaaaggtgctgaagtgcttcacaaactggtaagcagaccaaaccaaatgtgccttcttctgagcagtaatctcaagaaaaggtgaggatgtatatatccgcatgtgtgcacacgtgcgtgtgtgtgtgcatgtgtgtgtgtagaattttaaaaaaacaggctcaggaacttcctagctagacattttagggccctgtctgcaaaatgtggacttgggaataaccgcaggcactggaggcacctggtttacgaagagctgtatcattccagcctttttgttttcctcaagagaacctgacctagggccacaggagttactttgtcatttcccaccatattgtcctgctgagccaaagaatgttctttgtggaggtaaagaagctcccatatgatttttatgttccctgctgtcctcagaatcaaagttcaggtcctaagcctgggaatcagggcctccatctatgtcttggcccccacctactgttctggtcttacttcctgcatctctggaggcagttagtcctgagttcgaaacatctttacaaatcacttctcacttacttaaaagcaaatgcagcatttctgtactaactagaaagagcagaacacttaccttgtaaggttagattaaggtctgcatttaatgagccagaggcacaaaatcttacctattccagggggcaacccatagcaggagccagatgcagcacagcccagcagagctgtccccagggttgtgaagaaggtctgcagcaaggctgggctgtgctagacctggcaagccaatgctttctgtttacctgcccattcattctcgtccttgggctcacatcaccattccaaaagaacttgcaggacaatattatgcccaccacttaaagaggacattgacaagcctgactcaggcccagtaaggcaacatcctcgtctaggaggagacagacaatagagttggtgcccagctgtccctgaacggcatctgactcccgtctgcctgtgctcttgaagcccattgccccgaggggcactctcacctcctatttaatatccttcgtctgtctgggaacgattttcacaaatcagtgtccctgcaggtagttggaaggaacaaatgagataattcccaccatgttcttagcacagagcctggcttgcggtaagtgttcaataaatgttagctgctattattatcgttattactcacctgctctgtgcttcacagagcgttaaatacgcgtggcaccctgcataaaccctttacttcctggcctcaacctttctctttgcctcaaaacgtcctttctcctgtctttgcctccaaaccgtccccatcctgttaggctttgctcaaatgccactccccctgggggaggcttttcagattgctttccgcttccctttcccaggctggaaacgcgcacactctcctactctccctctttcctggcactgtgctactttcctttcctggagcaaggcttctcagactttctgtggtcaagaactggccccatgccccccagtccatgacggatcaatacttgtataaagtacaatgtaaaagaaaaaggcagttaaaaatgcaagctccattttttattattagagttaacagacacaaaattacacaatcacatatatgggcaaggtttaaaaggcttactctcagtttctgtacttctcttgccccagaccaacaatgaccaatttgaggaccggcagcagttcgtggagcacactttgaatagtgtggagtttacgttattcccatctgcactggcacagttactcaggtactgtctaattcagtgaacccaacctcccacacctggcaggaggcttatacacagggttgctcgataaattagttgaattgaatgaatgagtgaataaatgaaagcacaataaatattgaatgaatgaatagatgattgacttgctgagcatatttaaaactcatagtccttaggaagaattttcttaatgaatagcatgccaaagggattataatttttttatctttgccttttataaaattcactcatttgcattgcatattaagaccaattctttttccttagtttttaaaacatttttattttccgtctgtgatagctaaatggagataaggtttatactttcacaaaaataagggcatacttggtaatatcttcagaaataagataggtgagaatcttaagagaacccataccttatgctttagtaagaatcaggatttctgaattgaataattgcaaattagagagcagaagaaagatattatatacttatatgtatataaacttgaacagttaccactcaagagccgtattgaattaacaaaagtaaaagtttattttgtagtgttgccatcagtcaccaaatcaatgttatttgaaaagaaaatctccctacccaggttttcttcctccttggggaatacagtggtaattcccagacttgtggtaaaggaaccagtgcaccagtaagcatgccttccaataatcactgcatctgtctcaacagaagacaaaacccagccctacctcctctagaactacttaacggaggttttgagatttgagggtaagctatacacattcttctctggaaatcacatactgctattgttccttcaccttaaaaagagaaaataaaatcaaatcgagacctgcaaaccattcagcctccttcattttattgtctcactatctctggtctcacttttctgcagactttcaaactcacaacaatctctccttttttgggggaggtctacactgcacagtcattcaggccaggaacatttgtggaagtctcctatgtgtggagcaggaatacagaaggaaacaagacacaaggaaacaaacaactccacacatgtagctgacagttattgcacaagtccaggagcgccatatccatggggagagaagtgcagggcgtgcggtgtatgaggattgcgttgtgaatactgatccagttggacgacaaggagctcagggaaggttagtgcagggaagtgacatttaaggtccaacaagaaggatgagtagaaatttaccagaggaagtagtggaagagagttctagggcttatggatgactctatgaccatcaggatcatcagtatcactctcttccacacccacatcttgtccccctggcaggtcttcaagggcaataacaggcattgagctgtcctcgcctataacagcaatgcctccttctggaatatctctggaaggacctgcctgaggctgttttatagttatcatttaaaaaaaataagagtacactctaaaatgacaatatgaagcatattataataaatacacaaaccagtaacatggtcatttattatcattaccatgtattatatgctgtacataattctgtgtgtacttttttttttttttgagactgagtctcgctctgttgccaggctggagtatagaggtgtgatctcagctcactgcaacctctgtctcctgggttcaagtgattctccacctcagcctccctagtatctgggactacaggtgtgcaccaccatgccccgctaatttttgtatttttagtagaggtgggtttcaccatgttggccaggatggtcatgatctcttgacctcgtgatccgcccaccttggcctcccaaagtggtgggattacaggcgtgagccaccatgcctggccagtctgtgtgtactcttatacaactggcagtgcagtaggtttgtttacaccagcatcaccacaaatgtgtgattaactcattgccataagacattttgatggctacatcactaggcaataggaatttgttagtttcattataatcctgtgggaccgctgtcatatttggtcccttattgaccaaaatgtctttatgggacacatgactgtaataacaaatcactcacaggtacatattagtacttagaatgccataggcactgttattgtggatcaagctctcagatactataatcacacccatttacagatggggaaactgaggcactgggaaggtaaataacttgccaaggtaacatagcaaggaaataatggagttaggatgtgaacattaggcagtgtttcagagcgcatgcttttaacaagcgtactattctgcatgtgccacaggcaaaagcatcttagatttctttttaggtttgtagtttctaatacagtgctaagtaaatcaactcccaataaatgcttactatttaatcaggttagatttagttattccattgccaaagggtgtttatttaattgaaaacaagatgggctggatgagggtgtgctggctgaaccatgtgataacagaggcagtgaggtgttgactgaaaccacctggtttcaaatctctgcgtgtcactttgccagtaccaggataaatcccgtggcctttatgggagaactttcattcatttatcaaatttttgttgagtggctacaatgtgctagccactgttctaagttccaaggactcaatagtaaaccaaacagacaaaaccctacccttgtgtatcttacatcttgctcacatgacaatacacgtaacatgcttagcacagtgcttatggtactggttaatattatttatttttttgagaggaagtcttgctctgtcaccaggctggagtgtagtggcgcgatctaggctcactgcaacctctgcctcctgggttcaagctattctcgtgcctcagcctcccaagtagatgggattacaggcgtgcaccaccacacccagttaatttttgcacttttagtagagacagagttttaccatgttggccaggaagtctcagtctcctgacctcatgatctgcctgccttggcctcccaaagcgctgggattacaggtgtgagccacggtgcctgacctgttatcatcatatggtgctgctggttagtgctttttacagacagtattggcacattcctaattttttggtagggtgtgtcaaatgagatagcaaaacagggtttgtagatggtgatggcaaattagatcataaaaggtgattatcgttctttgaaggtctccagaatgaccactgttgaattaatcatacaataaaaattggctttaggttttaagatagccagcatgttttcctcaaaccttagagtagtaattttgatactgtgcattttagtggtaatggtttagtagtagcaaaggtctacagacgtttccgtaaatggccatacagtaaatgttttaggatttgcaggcaatgtggtctttcttacaactactcaactctgcctgctgctgtaagaagaaagcagccatagataatatgtcaacaaatcggtatagctgtgtttccaataaagttttatttatataaacaggcattcagcccacaggtcagtttgccaacctctgttccggaagaaagtaaaaattctgttagcagtaacattgtgcaggggatcagctttttaaaagaaaacatgaactaatattaaaaaaaatcattggctcactgcaaagtcacaagactccttagacacttaagaatctgaatttgacttctgatggtttaagtttactattttgcatgaccttattttctgactggttcaagatcaggatcggtactagggatcacttaaggaagaaatttcaagaacctggaagggacatcttctctggaatagaaccagaggagataaactatcccatggacatttgtattgggccctgaaggaattttcagcagtgagggctttgcagaattgaaatagaagggttatcgctgaacaggattttctttctctagacattttaaaatccggagaagtcctactctggcaactggtcaatacagagttattaattactcactgattaaaattttctactttttctgtatcttgtccaatatggcttgtttttgatctggtcagaaggttactggtggatggagtgaatggatagtgtattctctctgggattcggtgtccaggtttaagccagagtgaagtcttgttaaattgcaataagggagaggaaaccatctgaaagagagaaaaagaagcattttctaatgtctttcaagaaatgaaattttattcaagggccaaaagagccacagggtaatgagaccatgaccagcaaacacctatactagataaaagtaaattttaattaacatatcaatagtttgtagatcttaggtgcttccagagtgcttgaggttgtttgacaactttttcttcccttaagctcttttgctttctctttgaagatctattttaaacaaagagaacccctgttccaatctattttgatctcaaggatgtctgatttaatgtaattttctcacgttcctaccaacttgcccaaggtgaggaataatttactttgttagagcaaaagaacaaagaactttttgggaaatggagaatagtggacttcctttaaaaataaaaaaagtactgcagtttcgtacatcctggcaaaactgccacctatcatttttaaacttttgcattcttagatggtcttacttggatttaagacctttgtgagtttgttcaaataggcagtcatgcaaaaagagcctgcgttttctaatggtggtctcctgtgtgtttagctttggttgatgggcgtattagaaacaagcagagcacgggtgattccagctcattggatacagcaagtaattacctccctgcttttggaaacagttaaatatactcccactccagcaatgaatgtagccagggccaaggtgggcagatgctggctgctcagtgaccatgttcaggatgatgtgtgtaggaggagaggaaggattccaagaagactcagtaccttcttctaggattataaggatttaaataggcctgagggaaggacccagcacatagcacgtgttccataaagggcactttccatccttatcccctctttctactttgaactgctcgtaggaagacctactttaattcaaataaaaatgcatttgtgttaaacctgcggcagaagattcaagggcccttggcctcccagggtttataaatagatggaaagatgtatatactgagaaaaaaagtgaaatgagagttatgcaagtagagatgactgtatttgacagcacaggccatgcaaatgtgaggtgagtggtaaaatcagtgtgaaaaatagacaatgtttgagaagtatagatgggaggagggggagctggtccagaatggttaaggaaggcttcatgggggttgtgtgatttgaccaaggccttcatgggtgagtaggatttggatggatggaacaaaggggatcacaggtggagagagttacaagctcctaaaaagctggttgtgttttagttttttagttcattgtcctgtgtttggtaaatacttaacggatggttattaaatgaatgagtaattattttgattgctttttctcctctgaacttagtctatagcacacaattaaaactcaattctgtatggtctcacctcatcaaggcaattctttcctgtctggctatactattaataccttgtgggaaaggcccatgtgtaatatttttcatcctctctagtaataactagaatgttgaacatgtagcagatgctgcctaaactctttctcattgaacaagatggtcaaagacacaggatgctaaactttgatgagaactagtgtttctttagggccctttaagaaacaaatcattgtgaccatagattgctttgctaccaggaagagcagacctacctccagggtctgcctgacaccagtgggaatgaacccatataccacttttgagaatctccttgccagcttatgaagataaacctgtgttttcctggcaactaattttgtagatgaacttggtccatgctgcttctccattatgtcaacttttcaccatataggtttttgatggtctcacctgaagaatggaagtggagctaataattacctagtatctaccatgtgctttaacttccgcagtagccttgtagatatcacttttgttcttttaaaagagagaagctcagagcatgtaagtggcttggtcaaggtcacataatatgtcatgatagatgaatttgaacctaggactctgagctagagctgcattccttacattgtgttatggtgtccacatgcccctgcattttcatgcattactagatttgaataatcagaggggagataaaagaagctattttagatgaggggcaatcgttgaggcacagtcaaccaatgaccttggcagaagaggagagtacctttgaggggattaataataaataatcttgaattcctatgattgggtgagattccattacagatggttttggaagacttcagactttatgaaatatcatgggaaccactggaaaatgtttaactagaggtatgacatgataaaattattaattaatctaataattaaacacacttagtgagtatatatcatgttccgtgttggaacaaatcacacattcttcctgctctcatgaaacttttattctagtgggcaaacagaccttagataaataatttcataaatactatatataatacccaagtatggaacatgcttcattataaatgtaaaaggtctgtgagagtataaattttagaccatccctctcctgagaaagttacttttgagttgagatcccaagagatgagtaagggttaactagctgtattagtccactttcatgctgctgacaaagacatacccaagactgggtaatttataaagaaaaagaggtttaatggactcagagttccacgtggctgggcggtggggggggcgcctcatgatcatggcagaaaacgaaaggcacatcttacatggcagcagacaagagagagtgaggaccaagtgaaagggatttccccttataaaaccatcagatggttcagtatgggggaaactgcctccatgattcaattacctcccaatgggtccctcccacagtatgtgggaattatgggagctataattcaagatgagatttgggtgggacacagccaaaccatatcactaggtaagaagagggctccatgctaaggaacaggatatgcaaagaccctgtggcaggaggaactctacctgcttttttgaagaattccataaggtagccttcagtggagctgagtagagagtgggggagagtgggctaaaacatgaggggagaagtaggcaaaagctaaatctcatcaggaccttatagacaattgacagatgtttgtctttatccagtaaggtgtttgtatgctccttaagtggcagcggggagtgagcagagcagtgaagataaacatgaaagctggtggtaacaaattctgatacctcctctattccaaaaggaaaggcagaactcagaggcaccatcctcctgttgtgtttgcaagctgttgacacaacctggaaaggttaaaagttttcaacagacttgtcagagtttgtgttcaatggaaactgacagagcctaccggctgaggggctaattttaatagaaataacctaggtgcgtttgttaattttctccgttccctcaatgacctgtctgcatagcgtgaaggtgctttgatgtgaccaggagaacagaaggatattttgtgcatagctgaccgtgagaggaatgctggttttgcaatgaggaagcacaggaagatgacagaacaatgagcataagacatgctgggtgcattttttggaccttaccacatcttgtttgagagaagtgggaccaatgctgatgaaactctttcccatggtgtgttctatattcattggatgggcatcgcctacggctggagcagggctgagctctgtactggtgtctcttaaaacacaccagacagcaacagctgagatacctactacctggatctgcttgattagatcatacggtcatatttgattacttagaatgggtaaggaaaaataccattccaaggtcaatttaatggcctagatcttccttcctaaaactggaaggtgaatctctgcctcttaaatctataggtctttctgggggcaagacttctgactattctgatatctccttggaatctatggaaatctcattatttttgttcactcacataaaggagtagttaccccaggaatggatacctcctgatgctctatgcttaggagaaaaggctaagtctttctaatgaatatcaacatcttgacctgccaggttcaccagcatgaggctctctcctgtgcctaagtcctacaactgagacaaagccctaggccatgttgaaccttggaaaatatctctggccatcacgtgccttgaaggacttggcgacggaagcagagaagtttgtaatcctcacctgaggtcatctctgtcttctttaggtcattgacatggcagacattgtttccttttcgttcagtatgtgcctgcccaaaccccgtttcatggagttctggaaactctgtcagtgggtaacaactacttgtagaccttgtggaacaagagaaaatgtgcctgctcctttttcaccttctcagttgattagcttcagaggtggccatcgagttatgggtcatgagaacagctttgccacaccaccacttccaaagggttgatgtgaaaggtgctttcctcaagcaaagagcaattctatagaagtccagatgagcatgcttacttattgttgacccatcatctttagttactaccatatcggggtatagattactctcctgcatggttttctgcatgtcccctgtgaccgaagtaacttctgagtacagggatgagaaagtcaccagctctgtagccgcagcattgttggtctgtatctccaggcataggatctgggataatgcccagatagtccaccatgtggcctcatgcctatatcatttgtttggctggtgcccttggcagacccacacctgacacctgcttagtgcaagcccttgagctctgtcttagggaaactttgggtctagcatggtctcttgtggcacctaatgcgttcatattggtaggaacacagtaataggaaaggaagtttatctttctagttgggatttaagaaaactcttaaagatggaagaatattacctttttttgtttccttatctctttgtggaataaatgagtaaatactgtgactgcagtcacatgagataggtattagccatcagtctaactagaggatctaaggaaacacttcagaagtccaggagaacgaggcagcagtattgacagcagatagaggaagaagcagcagagtagatctggaagtggggagtgtttaaacaagagggctgggaggtgcaatgtcatactttatttatacctacttcagcattcacctactctgtcaccctggaatcccctggagtttatctggagagaggcactgtggagagcccctaaatctccagcttgaattcccttagcacttgcttcaaagcctcagatgatatctgttgactggaggggaacaaggttttgactgtggttaggactcaccattctgtgtataatgccaacaccacccagggcagttcataacattttaatttcctcataaaatgtgcttttatttcattttgcaatatgtaagcccatcagattgtagagatgtaagtaaatggggaatgttgtttaaatggaatctcatggaaggcacacccagcaatcattttcattcatatttttacatttcttttggcagcaagaatgcagtgtttctccttttcattttcatgtagtgttatggggcatattctttgtgggtttagattccagagtagcatatctgatttatacttgataaagtggtgtttgccaagtaattttgctgaaaagcagccacttaggcagaaagggaagaacctactataaaaagaacagagcagattatggagctgcaatgtcgttcattgggaccaagaaatgttggttaccgagagacctaaaaactagaagtttccttgattagacttagtttcagttttatttcacatttttttgaacatactgccagcctttaagtgagtttcatatttgcttatcaccagcacccttcgttatttcttccctgtaagaatggttataaaactaaacaatataggtgactatacattttattgtaaccatggaaactattgttgatgatttattaagcatcctttctcctgatcccaaacaatacattgtgttggcccaagttccctagaggactggcttttccattattgcatagaccaactttagctttatttatatcttggtttgttcaattgtttgactacggtgttggcttctggaaacataaaagctagtcttgggggccaccatcaagtgtttcaaagtgtttaaagaccatttttaacatatgccattgtagaaacaagtttaaaagaccactttaacatatacccttgtaggaacaaatcaggaaaaaatgaaccttactttatcttttcccttgcctatgaatacacacaagcagtacttacatttctaataatggatgggtataaaatacttagcagcccaacgcactactaggcactcagcaaaggtatgtcgagtctacctttcctgaattaattcttgttatgtgaagttgcttgtggataaataaagagcatcatgcgaatgcttcctgtagtcaatctattaaggctggctgactgaggaagtcgggtggaataatttatctagtcccaggaccttcatcccagaggtttcatggcatcttctgccggagccccacagctgaggattgcccctgggaagtgggagtgtgtgtgccaagccctggggtgcactgggcttccttcgttacacaagtgcttccatcaggcccaggcagtggcggagggagtacagcagcgcttacggacgcccattttgatggcaatttggcagggagtcaaactttggccctaaagcagaggtggtgcaattagacagctgagatgcattctctaaacacacacttttaattgatttcagcttgttcagttcacaaagatagagctctgacacatagcagccttcttagaggggcttatttttacttttcctttattcagcagcgtaattcaacggcaacagaagcaacaataatgcagagctctaaagagtgcgtatttggcatggctcggatacaaaaagtattattaagaactaatgagtgagatagttagatgttaaccggaaaagcattaatgagcagaagagaattctggcataaacatctgtttccgaagcagatgttaccttgtaaatctgctgaagaaaagcctgtgtaaatggaacagtggactgttttaggtattagcagggacagagtgagatcatgaggttttcagacactgttttcagctcttctgagactcataaatgactgcgtgtgtcgaggtggtgaattttggggggcgttttgggggtgacaaaagctatcaggcaggggtgaataacagtggcagatcacaatgagtgtggctgtgtgacatggtagctggagaccactgattcctgtttcaccgggagagatttgggattctcattaactaaacagcttgtctcttgtctcatcttgtctagagctccataatcatttcagtatagatggattttggctgctgtcatctccctgggctagagatttaagacctgttctgcctcaacaaaaattacataacctttggctgactttattgtatagctttctttacatgggtgactaaatggccgataatgagttaatgggcaagcattcccaaattacacaatgagtacattttagcagccttaatgcttgatccaagaatcactaggtggcaagattctcagggatctccaatagaggctggggtatttctttttttagagcccccaaatgacagtgtgttggcaactgcctcattcatattcacagaggggcaccttgatttgggttattttcacttagaatcataaaactgagaactggaaggtagctttgggatcatctagttgattcagatctcttagtaaacagaataaaaaatacaaggtcttgaaagtgattcatgcagcctgacccaggaattggtgaaatggttgatcctcagaacccagaccagggttcctagacaggcactatcctcactttaccccactctagagaaaaactcttgcatccttctctgcttactgaatattacgaatggagaaatgtctctgaaggaaaagtcttctgggcaaaaaccctgggcttgccccatttggtgctttgaaagttgaagtgggggctagagatagagtgaattccagcccccaggtcttatagttaaaggttgcccttggatgattcatttgcttagttttatctaccctcagaatggtcattggcctggtaattgggaatgttctaccctccatctttggaaagctgtatttgccaacagcttgatgaggtcagggcatccttggagcctgctgcttgtcactgctcggtgggctacagaggaactcaggaaaccaatcccaggacttcagagcctacggtgatggtttttgctgcagctggataggtctgttctccaccacgcacacaaaaatgtggctctgaaacctttaaaggagaatttcttgatcaaggtgatctttttcatttggggctacaccaggactgcctttctgggttcaggatcttctgtctagagaccttttagaagtgatctccaaggatggcctgtgtattcaagcaagtgaaaggcatccttttcaccttgcaccaagttcctgaaagatgcaggtctcagccatgcaggtctcagccattttctgtgtatatatatgcatgtttgtgtgcatgtatgtgcacatgtgtatatgtgtattgttcatgcaagaaaaagcaatgaacaaagctacatctgtgagaaacaggatgttttcccaagttagcaaggtctctgttcttctgtggaattccctctcacataaaactaaggcaggctttgaggaagggtggccacttatcttggacttttttctacagtagggggatttactcatattcactgggagctttttattatctctaagagaaactggaaaagcccagttaacagaaaattcattccttttgttatgcttgaggtgctgattcatttatcttgaaagaaactttgcatgtgttgtatggctcctggtatgtcagaagtgggttttgtgttacttcagggggtctgttttacactcccaatggttctgggggcacatgtagcaaacagagctggtgttgggtgtagacactggggcagatgtttaggaggctaccgttttgaacagtgtcaatcgtatttgtgattcacagtctccctagcagtgtttctcacctgcatggtgatgacatgggtgattgggagattttagaggtttggctgtgcttttcagttcctcttttaaatggcttcttccatcattattcagtgatgatggaggagactttagatagaattttttaaagaaaatggaagaccttttcttgctgtacagaatgagtgtttttcttccctggtggcttcgttgttagtttactagtttactagcccattttgctctcagacccagccatgcctcccttcaccttcgtattaatcctctgaggttctgtttactgatgaggacatgaggtttatgggatttggcaagttacttgaggttacactacctgtaggtgatagagccagaatttgaatcaagatctgcctacctctctgctaagcccacagtctttccagtctctacagctgtatgtctcctgtcgccccatcccccaccgctttttgcttctttagtaccaaactacatgtgcattctggaacaaatcatcccgtttcttgcagctgtggctttgtgcagtttttcttgcatgaacaacacatgcacacacacttagaggcaaacacaaacacagagacacacacatgcacacacttttctttgcttacatatcttgcactggcccttcaagactttgtacaggcatatggcctctcctgcgagcagacttccacaggttgtcatttcgccctctctgatgggtctgttctcgagctctgttttgacactaaccatgtcatatttcatagatgacctgtcactctggccaacatgtgagtgccttgaggtcaagggccttgtctcagagcctagcccagcacctggcacattcaggccttgataaccctctgtagatccgaattgaaccaagtcaagagtggggtttcaaactgtgtagcattgataacacagatgactggaactttaggagctggcgtaggccgtatccctgagcacatcgagaaatgacttgctaacagaagacatctgtgtctctctacttttcaagcactgtgacaatctccaaaagcaaaaggtttaaagaactataacatttatggctccctggccataaattcactgcagaacacataaaaaatgccattcccacagggttatggcagagattcagtattgcaaacatctgcacatgggcagtaaagctaacctctggtgtgcaagctcgactgttagcaacatatattaacattagtgacaattgaatgtgattatctgagatggcattttatctgccaactgcagacttatggcttctcaagacctcatttgtccccttcctcatatgttgtttttatatgactgaaatcacatgcagaaattcgtgattagtatggctctgcttttagtttttggtggatatgggtatgtataaattttcagtacttaaattgattttagcactttgaatagaataggctctcaaaagtttgttaaaacagctgagtgaatttcaaagcattatgactttgcatttgaagacactgctgagagccaggaaaaaggagtgggttctgacattggcttgacaggattgatccaacaggtttgtaattaatttatctggtaattggttggagtatacatgttatacatcacatctttaagtgtaagtgttgtcattatttcctttctgttatttaaaccagtattttttctgtgtagggctagatagtaaatattttaagcaagtcatatgctcactttttgttttgttttgtttttgttttggagacagggtcttattctgtcacccaggtgcaatcatagctcactgtgacctcaaaatcctgggctcaagcaagcctcccacctcagcctcttgagtagctaggactacaggccacactgccatggctggccaatttttaaattttttgtagagatgggacttgctgtgttgcccaagctggtctcaaactcctggactcaagccatccttccgccttggcctacaaaagcattgagattccaggcgtgaaccaccgcaccctgcccatatgctttttgtaggaactcctcagctctgctgttgtacaatagaagtgccatagataatacgtaaacaaatgagtttggctgttttccaataaaactttatttaaaaaaaataggcagtgggccatagtttgctagcccccaattcaaagaaatacagattttttaaaagctattgggaaatttagagaaaaaaaaaaaacttttttagaacttttgggaaaggaccccttatctggctcccattccatttggcaatctctaaagcggccaaatcaaattttaagttaaagagtaaaattttgactcaaaattttatttgtccctgtgcagtggttcttaatatttatttgattttagttcctctgatgcatataatattcttagtagcagtgactcaatatagcaaagattttcaaacaggtagaggggctgagaactctggcctagtgacattactctgagttcattaagttctcatttacaactatgccttagcataaactatcgcagttaaataattagaatttcagatcggtcaaaatactttggcatctgaaagcaggagcttagaaccagaattccttctcagacataatcccagcatccccagcccagtgcttttgctctttcgcaccaggccagataactctgtgatcatggacgtatgcaggaatttgtaaatatttgatggatgatagtcagattgccaaatggcagaaaggtttctggttttgcagtttgaaaaggattatagagcggggaacaaggtaaatatctgaaggtctgcatgatagtacttcttttcctattgctttggagttattttttatacctctttacacaatgtgtgagactaccaaatttacattgcactgttccaggtgacttgtgcagttgacaaactatgacccagcatagcaacctaggcaagaggagcctatataattcattcttattcctattttgctatttcaacttgtttctgttttataactgcaagtggcctcccaggggtagcaactgttggcaacttaaagttaagccagtagttctcctcactccatatctatgctgcttgtctttgcatataagtgagtggatgctgggggcatggaaaaacaaaactatttaagtgtgggagaggcctgtgacttttgtagtcctttggggaatttttcacatgaccagggccaaatagttctgactgctcttgtgccatcctgggaatagagcagtgggatgtaaggagtgaaaggggccatggatcagtggttctcaaagtgtggtcctcagacctgcagcatcagcatcaccagggagcatgttagaaatgcagatcctcaggccctggccccaacctactgaattaaaaccttttcaggcgggcccacgagtctgttataacaaggtcttcggatgatgactgtgcatagtgaaatgtgagaagtaccgcttgattcatcatccagccagatctgtccagcccatttttgtgattgtggaaattgagggcaagagtgggcaggtcactttcccaccatgaaacagctagctcagggtaggtgctggccttctgattcccagtccagacctctgctagtcacagtgcccagccaggtatgctgtggggatgtcagtggcctcagaaagagtgacgacttgggactgatgtccccacatgctggggtcacaggacaaaggaaagggtttgtgactttgagctctcttcttaccctgggcaacctctctctctgtttaaaagcctggtgaccctgctgtgaacttcctcttttaaatgaacagctccctagagcatccttggctgagcttagcaacaaggggggagggagtgaggaggggtgggaggaaaatgggctcccccgttatcatgtcagtgcaatcactgggaattatggttgaggattaagagtcacttggggataattcagccaggctggagagggaaacacacacaaatacacacacactcacaacataaacagattgctaaagctcatggcagaaaacaaacagcataggaaagaaaaaaaaaaaaaaaaaggatgggtagaactgaaagggcctgaattttgaataggtggtataggttccagaatgatctgtttcctaaacacttttggtgaagttgtatacacagtgactagagcggagcagctgcttccccggttctgtgcattgctctgtttcagaactcatagcatccctctcctccaggcatctgttactgagaacacttgaagattctgccaagagaactcaaactggcaatagaatagttgaaatttaggaaatgagacagagacatacatagagatattccttcgcttctaagaagatatagcaagtcccacaggaaagtgttaactatttcctatatttaggtacctctgaaaaaggtcaaataaattatccatctcttgtaattatctttgggcttaaacaaaagacctcagaaagtcagtggtttgcttttcctagagagggtatgcaatttgctctatcttttttgacttagaatctgtacagttgctacctaggtttttattttcctgacatggtgggtgaatgtccaggcagatggacttctcatcaagcatggttaatgggatctagaagaatcttgtgctttcccaaagaaccaaacagatgagagcactctcaaacagagagaggaaatgatttgttcaccatctctgagaggcttgacagaaaattcgagttaggggagtggcatcgatagcccctcttggagccagtctgaggtgagagagctcccttcaatattcttatgtctctcacttcacgttacctgtaagggaataatctccatggtaggaagtcccttaccaacctcttacccagctaactcttgggccttaaatgttggttcaaccctaaaggggtggagacagagctttctgcgcatgagtggctcagggtttgtttgtgctttcttcatattattctgaagccaaccagaaaggactccttttttcccctccttttatgttctccctctgttttcctcatgcttttagacttgataaacaagagaagcctacgtattccatcttctgtttgttttgcttgaagaggctgactctatttgattttttctgggaagagcaattttccgtaagggagaaggtgcttggagaagtgggtggaagtgtgagctgagggggcttttttttccctttcctaattttcccctttagtgcctgagaactacagaatcctttccagatgaacaaacacagcaacagatgtggagtcggcaacagtgtattctggggttatttgggtctgtttaaattgggcttttcctgcaccagaggattttgtgaaatatgttaggcttctgaacatggagagatttcagcctcagattcagagggactaaggaattaattaccccattccaaaaagtccataggtatagatggctttgtatgaaggaactgctacctcttggcccagatcatctaaaggaatgggtctcctcttttctctgatccctaccggaactaggcgttttgtaatcttaatcttgcactttggattctgcctggaattttaataacatggtcactattagtgaagccagtgtgacccatttggatgctttcaggctgggagagggaagccgtgtcagcctcgggacaacggaacatcagtcctgcttgcctactgtggaggcacaagagaaagaatcctgcagtgaacagtcaggcgcagcccttgtcctccaggcacagctttcacaacaattccacacctttttgagagggacgcttttgtggtctcagatgtgggcttcatgtggaaaggcgaaaaggaaggttttgtttagcatagagcactgaaggaggagtcaggagcccttccatcccagcctggttctattttttagtatgtcatcttggggaattcatccagcctctccttctttagaagctttctaagcttctactgaggacaacactctccaattctttctcagtattaaacagatcaaatcaattattcgtattttatctcttctcttagaatcctagaatgtcctagagaaaagaaatctaaagaaataaccaatttaattataaacatgatttagcatctaaaaaaacatgttgatataactctttctgtgaaagagcaaccccattggcctttctccttcagtcccaatgaagaactgcagccatctttcggtgttcatggggattgcttcgactgcctgtccacacatactcaagtgatgaagttggtgctgcagaacccacgtttacaaaatgtcactcctctgtaggggcaggttttgcatcctgcaaatactgtattattgtgtatgtggtttttttgtttgtttgtttgagatggagttttgctcttgtcacccaggctagagtgcaatggtgtgatctcagctcactgcaatctccaactcccaggttcaagcaattctcctgcctcagcctcctgagtcactgggattacatgtgcccaccaccatgcccagctaatttttgtattgttagtagagacggggcttcaccatgttggccaggctgatctccaactcctgacctcaggtgattcgcccgccgcggcctcccagagtgctgggattacaggtgtgagccactgcgcccggccaaataccgtatttttgatctgcgtttggttgactgccgtgtgtaagtggacctcggcagtcaaacctatgtcatttaaggggcaactgtagaaagacctgtcactactaagaagtacagcactttacaaaattatttttacatatgattgtcacagtaaacctgtgaggtgactgtgtagtatccccatgttttggaaatgattagtaagtagtaaagccgaaaccctaaatatgggctgtttcccagctttctagaattctagttattattatttcccagggctaatttttactaattaatggttgtaaatcctagttattcgaataatcaactaggtgtctagcacttgctgtataggttccacttagctttctttctttcttttttttttttttttgagacagagtcttgctctgttgcctaggctggagtgcggtggcgtgatctcggctcactgcaagctctgcctcccaggttcacgccatccttctgcctcactctccccagtagctgggactacaggcgcccgccaccacacccggctaatttttttgaatttttagtagagatggggtttcaccatgttagccaggatggtctcgatctcctgaccccgtgatccacccacgtcggcctcccaaagtgctgggattacaggtgtgagccaccatgcctggccccacttagttttctttgaaaagcataaagatagtagagaaaaggaataatatacacggggaaataagaccagtgtatattcaaagatctgcaaatatgtatattttttggtcccaagcttgtaaacaatttaaaaaatgactcactttcctgcctttttataagctgtatctagttcatttccctcttccaaatataaatccctaaaggttaagagtactcttatttttaaggcaataaggaacagacaaagttagccttttcaggtattttcatgtagtcagagaagctctctccaagggagggaggataaaatggcccagtgccctcaggcctttagaaaacatctcatggggataaatgctttgattcccagcggtgcaggaggtaacagatgtgaggctctccatggcgcttaccagaaatatgtatgtactgtggggcagaacgaggtactttgaagattggagaattcgtcggccctgtgacttcactttattgctttcttcctgtgcaaaatgtctctggacccagagggagaggcaccggccagacagtgagtcaaatgacaagttgacaaaatggttgtaattctagaagctgcaatcccatccttgtctctttatgtaggggtgaggatgaagccaaaatctgaaacagctcccaggagagcaagaagatactgttactaatgattgggccgacctgaattctttcctcgtttatttatgccagtcgttggtataaacatctgaactgcatccacattcacacccatatctagcaacaatgatcttattaagaaagagccagctaagccatgtaacgtactctatacccactgtgtgcaggacgagcagctgacgtcatggtagaaaggcctcaaagtgacactgcagccattcctccttcttatctggagatttaatgataccaggcacaagatggggcagcagaatttgatgccgcatttgagccatgccctttttattaaggccagatctatgcaggtttggaaatggtatctatttgcattcatccattcgccttctaaacaaatgattattgaacacctgctactgtccattattgtaccaggagctggggacatagtgctgacacatggtcctgccctctagtttctcactctggcagggggtataggcaagaaaataggaactctcaaaggcgagtgacaggtgcaaagatatgggtaagcttaggtgcttttgtgatcaggtgggaatttcaggacgaaaagggaatggaggtttagattagactaaaggatgaataaaggttaaccaggtgaaatttgcatggggtttggaggtagggaagtggggagttggcaaccaaggaaaagagcgcgaagccctgaataaataagagagggaagctctgaataactcaacagcttcctgagctacctgagaagcagctcccatgaaccagctctcttctgttcaactgtgtgctaggtccttgattcccataatccttactgtgtgctgggcacatgctggcctctttatatacaggatttgctacttcttcccatcctattatgagtattatgatctccattacaaagacagaaactgagcccttaagagcttaagtaacttgctcatggtcgcacaggaaataaagccacaaaaccaggtttcaaaccaggtctaattcaaaacacgagctcttcaccaccaccacccaagagtgcccaggcgagcaaatgtaaagctcgtgtaaaactccctagccagctcattgtggataagggcaagggttattctgctgggtatccagtgcctcagagcagagcacattataccttctcagtaaatatttgctaactgatgctctatctctgtcctttttttccatccctatcacaagagtttagaaaaaaattcaacaatgccaatggagttatgcattttttacctaattcctctgaaactgagtaggtaaatcagtaggagatgaactagtcgacgtagctactattaagagacccttgaaatccttgcacgatacttggtgatgggagtgggactgtgactggttaagagtgagagagcatatcatgccatcaggggaataaagtcaggcttatgtcatggagaaagctttataaactcaatgaatagtatagtactgtgtctacgatctggcaatgaaataagtgatttaaatctccttaattgatctattaatagtatcactgttatacatttccattttttaaatagtaagtaccttttatatgagaatttgaaggcactgtctaaatgaattggtggcatcatttctgatgctcacaaagataagatatgcaagaggatggtcttgtaatagtcgtagattagagctagtacttttttttttcttttgggaaattaggaggaggatggtaataagtctgtaattggttagtaagggagttttgggcacgtgaagctaagaaggcagagtgggaggcatgtggacttagtcatttaatcacttgtacctaccacttgtggaaaggtaggtaagttattcattcatatggactctgggttttcttatttcttaaatgaggattaaagagtggaccttgtagagctgttataaagtttagaaatagtatattagaacaatcagatcattgtccaatatgtggcagacatttaagcccctgattccatgagataggtaggcaggtaggtaggtaggtgggtgggtgggtggatggatagatagatagatagatagccataccctccttcaaattgtccctgtgtaggctgtgccctggttgtggtacagtttctggccattaatagagtataagagcttttacaccaaagtcagagaaatgtggattcaaagcatgactttaccactgttactatgacttttgcaatctccttatcctctctgagcattggttttcctctctgtgaaaggatcataatagtatctgcctagaatagttactgttggtactgaatggcagaacctgtttaaagcctttagtttgggccaggtgcagtagctcatgcctgtaatcccaacactttgggaggccaaggcaagcggatcacttgaggtcagaagttcgagaccagcctggccaacatggtgaaaccccatttctactaaaactacacacacacacacacacacacacacacacacacacacacacagagccaggtgtggtggcacgtgcctgtaatctcagctactcaggaagctgaggcaggagaatcacttgaacctgagaggcagaggttgcagtgaaccgagattgcaccactgcactgcagcctggggagagcgagactccgtcttaaaataaaaattgtttttaatttaaaaataaagcctttagtgtggacttggcacatagtaagtattaatagatgttaattactaccagctacttttttcttattatccagtggttacttcactaagaagtaggtatcaggctttttccagtacaagagtgcttgctctcttcaccgaggtttgttttgcaagcaaggttacagttcagtgtcattgaggatgtaacatagccactatgcggagaacagaagacaaaagtggtgggccttcaccctactctctgctggtacagaagaagtagaatattcaggcaagagggcaggcctgcatgtgagggtacagaaatggaagcgctacctttgtaaggtagttgaaaaaacatctaagggaagaagagatgcttctggatggagtgagatgggagacttataaagaattatgggcattagtttttattttagggacctaacagcacagagaaataaaaaggcacatttttcaaaaggaggctttccttggaaagcctgcatctttcttaggtaaacatggagagaagtgtttacaaacagcttgtagttggcagtaggcttctcagttgcaggcatctgttttctgttccctgtagccagtgccacctagacagagggtcatggctttggatggaagggcagtatgggcaaaacagtttctgcctttcacgttcataaccctatctaggtacccatagtcgagaatgaaggaaacgcttcaagtttctgaagatgtaatcatttatctggacgtgtctttcaaggtaaatggcaaatgactgaatccacaattcttcagttcccctaaacatgtcttcttcattaggagcctgaatccggtagggcacccgtaatgtgctgtccttctaaaatcatttgtttgttctctctccttatctttctcccctcactaccctttccttgcccccaccacaccccctgtattaatatattcccccttgatcacacctggtatcatctacgattaaatattactttaacagctgacaatatctcaagccgtgctttaaggaggtatcattctacttaacagcgtcctgtgcctgctgatcccactgcagtgttttctccgtttaaggcattaccgcaacaaaatcggttttagtgtttcccttgcttctccatgctgaattacagtcacagtcaacggcccacttgtgtgtagttcaagaagcaattaagggctttttttttttttactttgaacaagcaagggagagggggtagagtgaaaaatgatcattattctgatgattcctctgcttagctgaacagttcacagttctttgataccaagagtcacccacatttaaacccatttctgtaactgcctgctgcagccatgcctgctgtcagatccggttgatggcagttcaaggactcacatgccattaggttggagcagcccaatctggctttagaattgtgattaaatacagttgtaacatctgcacagtgatccacggcatgatgatggtatcactgaaaattaaaaagtgcaaactttggagacttcccagggaattttgcagtttctattgtaagccttttgttttattcagtgggatttcttataatctgaatatggtagtcttatctttctatgcatgtctacatgaattaagtctatctttagcttgcacgttcctggaaggcagggactttaacttttaccactgggtccaaaacagagctgatgatagaagttgttgaaacgttttttttttttgagatgatcaagagatgccctccttaatgtttgctcaataagtatctctgctctgtgtggagcaataagtgagatcctgggaagagacaagtcactttatgttggtggatcgccgagtgtggtccctgaaccagcagcgtcagcatcacctgggaatgtgttagaaatgcatattctttggccctaccctcggcaactctgggggtcaggccctgcgacctctgctttaacacaccttccctggcacatctgacgcatgctcctgtcagagaatcacgggtctgcatccctgcaggtccttgaacccctccacagacatttttcctgcaaagaggagagagatgacctagggtagaagcagggctagagggcggggactaagctttgaggaagtgaaggctggctttgagacagcctcccagctgcctcagcagggtaacaatgtggcagcttctctcctttggatgctttagggctgcctggcagctccaggagccaagtaattccacaagcccgtatggggagggtgtgatatgggacagttcttgccttgaggggaatgactgcttgcttctccactgcgtgtgtgtgttgaagcagggaagggcactaattcttgctcaaaatctaagcagctgtggtataacgcgaggaggtttagacatggaagacttgggtcaaggcacagctctgctctagtagctttgagactctgggaaaatccattaacctcattagactcagatggacctgagttttctcatctcaaaaactgagataattatacctgccctgtctctttcataggatgttctgctcagttgagataggggttgggatgggattttgctcaacccaaacccttacttctccactcaaacagattcctgactgaaggtgccctaccaatgagaagcacagactaatggggggagcaaagttctttactgattaattaagctgatggatctgcacagacgcacacccactgcaggccttccctaggaaggcatggtcgaacacaaggctgagtcatggcaactcccttcaaggtgaccttggagagcagggatgcccttttgcctgttgcttgaggacattgaagtctgatggagagagcctcctccctccagattcctaaagctcccggactttctcaattcatggtgcttttgtgtctgggaactttttcacagtgcccctgtaacaagagaaatacctactagctccatttgttagtagtttcaaataatagtagtagtccatgctgaatctgaacgtgccgctgttactctctggaaacttttttttttttttttgagatagagtctcactctgtcacccaggctggagtgcagtgccacgatccctgctcactgcaagctccgcctcccgggttcaagtgattctcatgcctcagcctcccgagtagctggtattacaggtgtgcaccaccacacctggctaatttttgtatttttagtagagacgggatttcatcatgttggccaggctggactcaaactcgtgaccccaagtgatacacctgcctcagcctcccaaattgctgggattacaggtgctagccaccacacccgacttctccaaggaaactttaaaacatcccatggctttcctgtgagttagttgcagtccacagtttggcctgtacctcacctgaagcaaaagatgggagctagaacattgagaaatattcccaggagtctaccaccctcatgaactttcccttggaatagtccagtagaataatgattttttaaaaattattcctataagaaggaaggataagcattgacagatatgacttattcccttaccagcatttcaaagtcagaatcaatttcaagccaactctaaacccatttgtagatatactgcctgtggcttagttaagaagaaatggtttctttctgaagtaacagaataattgccatatccagtatctatgtctgtgtctgtatcactgagtggattgttggctactgcggggcagggtctgggacagagtaggtgcttgtatgtttttaaattatataactcctttatggatgacttatgggttctcaaatggcttctctaatgggcaccagtcttattttcctttgatcttgttcttttaggcttgcaaagggtaacgtaaatatatccagcactgcagctaaggcttcatatacagggacaggcttatcctctcaagcgttcacaaggggaagtgagatcaaagtgtgttggcatgatggtggggggcctggaggagcttttttgctcttcatgataatagcaagcacaccctgtggatttgtatctaacccccattctgtagttgacattgttcttgagtagaaaaccactgaagcccaccagtggttctgagccaccccacattttatcattaagctcagttatgagtggtaagatgaaggaaatagtatcttatgttcattaaaatggactgcttgttattccagaaaattaatgtatctgaagccagggcatgccttttgaaatttagcaattgattcagcgatgcttggcatttagggtgccaaaacattgtggagaaattgagtaactccagaaaaccccaacatctttttttcttttaaagtagatctaacatggattgcctgcctctcatctaaagatggacgaagcataattacattgatgtaggaagtagcttgggaaggcaagatatgcattcctatttaatggttaccttactttaagtcgggtacgtgattcattgagatgcgaatttgaattctgaggttttctcaactctgcacaagtctatttccctgtattccctaagcccatatcactgaaactcccttaggtggaggcaagtcacagccctacagtaaaaacagtggcactattgctaggcagttcatgccatttgcgaatttgaaccccgatgacagggctgtgaagaaatgtgcctagataagcttcactgcccattccaaccctgaatgagtgcaagcttttgagatgtgtgctactaaggatcccacatggtggattgagtgttttggttttaaataaaacaggagcggagttttaaataaaacaggagtggtaaggaagcttgttgtgacaaatggtatacctgcgccctgccctctaccttgcctcacaatctaacaaaagcctttggcttacgaatctcaaggaactgctcagaggagccgtttacagcacagaagcaagagaagagagaccatgtccggcccttggccagttgtacttcagtgcagacatgcactgtctgctctttctcagcttcttttctacagagagttaagaaaagatgcaattgatggtggcgaaaagtggacaggaaaccctccgttttcaaagtcttcttttggtgcaaaactaccttaggtctacccaaacataaattcctggaattcacttttcctggaactccattggaatgcaaacactgattttgaacacctaacatgcttccaacacttttattatgggccatgccctgttctgagcactgtacatgggctttactcatttaatccttaaaacaatatttcaaacaatgaggcagtcctaatactgcattccttgggttcttcttagggtcatatggtagcctcagatatatgtcttgacccccattagttcacaaaaatattttttctgggagtagggctgtgttttataaaataagaatggtttataataaaataaaaacagtgtagctcacagcagctttttgtcattcaaaatgtatagaaaaaaagacaccaacttatacaaaacttcatttgggttcttttaaagttttgttgttgctgttgttgttaaatggtaggccttttgagatagatttattggaaagtcatatgggtgtagttcttgggacagatgatttctccattcagcatttagagttataacttctgcactctagtgattcttgaagtagtttggaatatggaaatgtgaatagttttacctccatcactctggatattatcccatgttctaaaatcattacataaaaatataaactcactattgtccttgtaggcttatcatgtacttatgggctcatcaatgccaatgtccattgagggaactgagaagagggggcatatacaggtaatgatgtcttctcataaaaagaaaaaaaaaaggaaatgttttggcttttctttagtaacatataatttgtaatgttctttgcctcattcacaatcctgtccgtgtataaacagtaatttgctcttgtaaacacatactgtagttagagttctattgggagcaattggtgttctttatctgtgacatcatgagcatttaaaaaacaataattataaatatcctccagggtgaaaaaatagtaaaaagaatcagaggatctgtctagagactttagtggttgtttcttactgtcctgtctttgagtatcctccctctaccccatctctactcattcactataccctgtcccacccaacacatccttcaaaactcagtagggagggtacctattgcaaatctccaggaatgttattactatttggagaacagtatttagt

SEQ ID NO: 2774 - DNA, 1765 bp, Homo sapiens
tggcaggaaattagtgagaaagccgttggacttcaagaggtctggaggctgggaatgaggagcatttcagtggctaactgcatggatctttgggaaccaaataaaacaatgaccgtttcagagactgttgcatggctggtaacccaaggctatctttcatcaaatgtctttagtacactctcaagaacttagacctaatgcccatggaaattgtaggagaaaggaggccaaaattgcctgaaattaagtattgttctcttggtttttaaaagggaaattagattaattgtggttagaagtaaaatttaaattccctagagagtagcttaattcttaacatacaggaaaaattgccagaggaatctttacacatagatactcagaggatcatctatcaatcagttgtacttcttgggacttctagtgtgatgcacaaggtggatctcttagaattgacagatattttgcctctttctctgtgtaaattagggctggaatgggaggagcagccaagagatttcatcagccacagtgtgcatgatggatgagaacacgggacacataccagtgaagggcaggtcgtataataatgttatgctaacagagattgggaatgcaaataatcagggagttcatgtgctatctttttcaccatgactctactttgcgctatttattgaatgtactattacttatgagtggatgtctgagccaaaaatacgccattttctatagacacaggttttaaaaattgtggaaaattaaattatcaatatattaagagttgcagtattcagaccatatattatattcttgttcaaacaagctaaaaatattaaagatgatacatgtaagcttatgccaaaaatgccaaagtgtaatgaacaaattcctgttagactgagtttagtaaacaaaaaggcacttcttttttgatgttaccacagaaacccagtaagggagaaatgtgatctaactggcttaaataaaagataatgatgaaacctattttcataaatttgcatcagtcaaatattttgatgattaataagcaagccaaactattatacttataaagaaagtctataaatgatcaaatgccttttatcaacatcaaagtatctgatttttctatttccttaccttcacagcctatttaaataaaaaatgagaacattattttaagctattatgatctaattgtgtgctatatgaaagcataaaaagacattcggatcaaatggagtttgcattaaaagaaatcaactgttttccagaaaatggggggaagttctatatatattatataaaagaacaaagtaataaatcaggtttcttacatgctttatagaaaatgttacttatcgacactggactaaaaaaagactgtgcgtaacccatagataagccaactcttattgtgataaaacatcagacaaatccaaattgagaacattctacaaaatacctgaccagcactcctgaaaactaccaagcctctcaatccatggatgttcttttacttggtcatcctcaccccatggttcaagggtatatgacttattaagagtgaaaatgagaagaggaggtggagcaagatggtcaaatagaaccattcactgatcatcctccctgcaggaacaccaaattgaaaaactatctacataataaagcaccttcataagaagcaaaaatcaggtgagtggtcacagtacctgattttaacttatatccactgacagaggcactgaatggggtaggaaag

SEQ ID NO: 2775 - DNA, 12482 bp, Homo sapiens
gcgagttggggcagctcctcgcgctcggccctgctcggcggcgagagctccgcctgggcgccgcgttcctacagccgccggagccgccaggcgccgagggaacggacagacctccgcgcacccttgccgaccggggcgggcagaggcgggcaagcggcgaacgcctgggagcgcggagagccaggccagcccggagcgcgccggggacaccctgtgcgccccgagtcccggcaccatgcgacccgccgcgcgtcctcgcgggcccggggcttcgctcttcgctcgctgagcccctgcgctcgccaccacggaaactcggaaagaggaggcgaggctgtggggagcggcgcggagacggactagacttcccctccgcccccaagaggctgccggtccccggttccctgggcttctccagctttatcatgaacctggcgcaaggttggctttaggaaaaattctggagccagagggagagtcaaggcaattctttggttgctaagtgtgagtgaagacactcaggatggctcaaggatccggggatcaaagagcagtgggggttgctgacccagaggagagttctccaaacatgatcgtttactgcaaaagtggcatctccaaggaatagctctgcctggaaggtgtttgtggctgtccacttaaaagctgaaattaggtcagtgttattttgtcttgagataacaaaaataagaccccaagggagtagtgacttgggatttcatttaagtacttaatttacaggaaaaaaaatacagtttccgatactgaataattattacactactgaataattatatattttttcttctcccggtgttcttatactttagaggcaattttttttttttttttgtaaagatcacaaaaggtctgattagtcaaagaatgaaagaaatgcactgtggctccaaagtcccttatccaaaacctctgggacagatgtattttggaatttaagatttttgtgctgagaatgatggtttccagcttcatccatgtccctgcaaaggacatgaactcattcttttttatggctgcatagttttccatggtgtatatgtgccacattttctttatccagtctatcattcatgggcatttgggttggttccaagtctttgctattgtaaatagtgctgcaataaacatacgtgtgcatgtgtctttatagcagcatgatttataatccttggggtacatagccagtaatgcgtcattcccagcaaactaacacaggaacagaaaaccaaacactgcatgttctcattcataagtgggagtcgaacaatgagaacacgtggatgcagggaggggaacatcacacaccaaggcctgtcggggaggtggaggacaaggggagagagagcattaggaaatatacctaatgcatgcggggcttaaaacctagataataggttgatgggtgcagcaaaacgccctggcacatgtatacctatgtaacaaacctgcacgttctgcacatgtatcccagaacttaaagtaaaatttaaaaaaagattttttggagtttagaaaaataatacatttggatttagcagggtttagtgcggcactttttaatcacacacactaatatttctgtagtgaaactgaatattcacactgagataaagactatgaataacttcacatcagttcaggtaaggttttgcctcctattaagtcttgataacaaactttaaaaacttaaaaaaataaaataaaataaagtttattttcaaaacttttgaagtttgcgcgtacagctagcttgtaggtctggccttgcttttctttagattatatttcccttattagtcttctaaacacattaaatctgtgtttaccaacgctgtaatattttgccaccgtgaggatggtctagaggccagcaccatccacatcccttgggagctggctagacatgcagaatcacaggtgctaccacgaagctgctgaatcacaatctgcattttaatagaatccccaggtgattcatgtgtgcgttaaagatcaagaagcattgctgtagtattatattggctttaatttagattccaagtcttaaagggaaatgctgatggggggatactttagttgtttaaatcctgggaaagtgagcccagattacactaatatcatttatttaattatgtatgtatgtattttttttttttttgagacaagatctgacggtatcacccaggctggagtgcagtggtacaatcttgactcactgcaacctctgccttgtggggttcaagccatcctcccacctcagcctccagagtagctgggactacaggcatgcaccaccacacctagctaatttttgtattttttgcagagagggggttttgccatgttggccaggctggtcttgaacttgtgagctcaggccatctgtccacctcagccccccaaagtgctgagattacaggcgtgagccactgcatctggccgaatatcagttctttttaattttttattcaatatttcctccgtctctccctcccactcttcctatttttttttttttttttgagacagagtctcgctttgtcgcccaggctggagtgcagtggcgcaatcttggctagctgtaacctctgcgtcccaggttcaagcaattctctgcctcagcctcctgagtagctgggattacaggcgcctgccaccacacccggctaatttttgcatttttaccagagatgggatttcaccatcttggctaggctggtcttgaactccccacctgttgatatatgtgccttggcctcccaaagtgctgggattacaggtgtgagccactgcgcccggcccactcttcctttctctcctccttccttttctttttctttctttttaaaaataagtctcataatacttgactttaaatggatcatttagtctatttatttacatttattatattcttgatatatttggatttcttctcttttatactttctgtttattctacttttgtttctttctcttgttttatttatttttttgagatggagtcttggtctgtcactcaggctggagtgcagtggcgcaatcttggctcactgcaacctctggcctcctggcttcaagtgattctcccacctaagcctccgagtagctgggattacaggtgcatgccaccacgcctggctaatattttgtatttttagtagagatggggtttcaccacgttggccaggctggtcttgaactcctaatatcaaatgatccacctgcctcagcctcccaaagtgctaggattacaggcgtgagccactgcacctggctctttttcttttaggttgatattttttttctcatcctattccttcctctgctagtttgttatataccctatttctctcttttagcagtaatcctagaaattgtagcatgcatactttatttataaaagtctaaattcagtcagtatcttttcttcctcctaaacaatagctcagaatgttttaactcccgttttcctctcttgtgctgtatactattcttgttgtgtgtttattctatttttaaaaattattaatcatagatgattttttaaaacttatttttttcaagacagggtcacattccataagccaggctggagtgcagtggtgcagtcacaatgattgcagcctcgacctccctgggctcagatgatcctcctacctcagcctccagagtaactgggactacaggcacacaccaccatgcccagctaatttttgtatttttagtagagacggggtttcaccatgttggccaggctggtcttgaactcctgggctccagcaatctgcccgccttggcctcccaaagtgctgggattacaggtgtgggccactgcgcccagccaatcacatatgatttggttgtttaatagtggtgtttatctacatttattcacatatttgccacattagttgcttactacgtatttttgcattttagaccttctacttggaatcaccttcttcaacttggattctttagaccttccttaactgagagtctcttcatggcaaactgtcttggattttgtctaaaaatgtctttattttgcccttattctaaactgttactaaactatacattttgttttttgttagtgtatctgatttgctggctgtcattcattgtgctttatttctctctctctctctctgtctctctctgtgtgtgtgtgtaagggagagaatttgctaattagttgattaattttccactgtgagctgttcatttttcttacagctttgttatgaggattcttccaggtctgagttacagaaggattctcctagaaagtatttaaggttgcttctgctatgtgcctgggttattaccaactgtgactcttcacattaaatttttggcttcagggttttgggactctaagagctgtatgaactcgcactgcaaactcatatgagttttcacttattatagtaaattctcaggtttgatttttttcttcttccatccatggccaagatttgagacaggcaagtttccttgcactccaggaatgtagcttgacttactgttcctggtgttggtggtggtgctgctggagatgagatccttttagccatcctatctttggcaggccctgggctttgtttcaccctgaactctgaaccctgaatcctgtgggcagggcttctgctagcccatgtggctccactctaaattgatgcaggcactcagcttgttaaagggagcactggatggatttcagcaagcttcctgttccttatggttctgtctggtaggccttaaacctaggctcaagtactctggagttaaacaagtggcccaaggcaaaagccagcttcagtgcttaacttacttcgcagggattgtatgtatgtatgcatgtgtatgaatatatgttatgtatacatatgtatgttttgtgcgtgtgtatttcaccgttgagtgttaattactcccttgttacaactcattgatgcatttaaataaaacatttaaaatattttattcatctcctctcatggttttcagcaaaaatgtaggtcagggtaaattaccagatatattggaccagctggatgtagtcgcctttgatttttttttagttctaccacctatgtatgtatcaataaacaatgtattctttagtgcttccttatttttaaacattatgtgaattgaataacttatgtaatcttttgcaatttggtttcccgcaacatttctatatggagtatggttcgttcatatttactttataccaatatatgaatttctttagctattcaacacaatttaactattcagattccactgttgatggacttttggattctttccaatttttgctattggagttttccagttttgctgctaagaacactctcgtacatgtcttctggtgcattgtccaggattttctctagaatatattcctgggggtagaattgatgattcattgagtaagcatgtgttgtaccttactaggtaattacaaatggctttccaaagtagttgtaacaaattatgcttccattagcggtacacaagagtttctgtggctccatgtccttaccaattcttagtattgtcaggtttcttaattcttgcctattaggtgggtggacttaatacttcttagtttagttgttataacttgttttttaaaattaacatatctatgtgcatattcgtagtcatacatgtttgtctggtcatttaggtacttatgcaatactctagtagactcagaatagaaattagccatggcaacatatatattacattcttcatattgctacatttgaaaataatcataattatttgcagaaatatgaacagaacatatagaattaaatgttttcacgatgtcttgtattatctttcatgtttcatagcaatctctgtgttataggccacatcaactgcttttgcattgttctgacttacaggaattgcagatttattgttctcagtgccatatttaagttccttctctgtaacaatcaggtgtaatacttgtaaatttttttaaccttagtacaaatttaaaaagcagaaatttctcttgcagcttcctgtgtttcaggcccagtgctaagcacatggcaagcattgtcccatttagttctctccaccatgcttcgggcaggtgctgttgttaagcccctttcatggaggagtgaactaaagcatggagaggttaagggtcttgatcaaggtcccacaatcttattctcaatggaccttctccttctctaatctaaaaccctcattttattttgggaagtggatgtaggtctaggaagcttgtttgtgtgtgtgtagtttgtttgttttttttttttttgagatggagtctcgctctgtcgccaggctggagtgcggtggcgcaatctcggctcactgcaacctctgcctcttgggttcaagcaattctcctgcctcagccttctgagtgctgggactacaggtgtgtgccaccatgcccggctaattttttgtatttttagtacagacggggtatcaccgtgttagccaggatggtgtcgatctcctgacctcaggtgatccacctgccccggcctcccaaagtgctgggattacaggtgtgagccactgttcttggctgtttgtgttttatattaggaggcagagagcacttaggggaagcagaagctctggtctgaggaggcagtggtttacttattagttcacaggccttttaggtaatcactggtccttcacttaattaagcaacttaatatatgtcttacggattaagttaattttaaatcaatgctaatttttatgtcaaaatatattaagcagcatcacattaaagtcaaaggtagtcttgtaattattagagcaataggtatcgtgctgtcgttctccaatgtggctgcacattggacaacctgaggagctttaaaaaatactgctgcctggggatcactcccataagctctgatttatctcgtctggggcaccaggagttttaaaatttctccaggtgatctaatgtgtagccaagcttgaagattactcgatagtcattgattatgtgcgtgccacattcagattggtggggttcaaatcctccttctgccactcactagatgtgtggccttagttaagttttgttaacgtttctttatgtcttcatctgtaaaatggggatgaatgataaaaatactgtctgcatctcagagcattgttatgaggattaaaggggtacagtaagtccttatttaacgttgtctataggttattggaaactgcaacttttaagtgaaacgatgtataacaaaaccggtattaccatagattaattgacataaatgagagttaagttcctgcagcatatttttggtcctaaaagtattatcagacttctacataaagaccaaaacatttctaatattaaacactgagagaaatctaggttatacatacatttaagaaagattaattcaatcatttactcaattattcgactccagaatagtgggtggtccgagcctgtcctggcagctcagggtgcaaggtgggaccagccaaggacaggacaccatcccatcacagggcacactcacgctcatccacactcacactgggaccacttagacatgccagttcacctaatgggcacagctttgggaagtggagaatgtgaagaaaatccatgcagatgtggtgagaacatgcaacctccacacagacaatggccttggctggaataaatttttttttctcacaaattttataatgaaacaatgttactgtaggacctgctgtataatatatacatattaataaaatgcttggaatagtgactggcacaaaatagtcctttactgtgagctattttaagtagactaagaaaaaattattactattattggatattctctcaaaagtatcttgggggctaagattttaaattaaatcaaattttgcctagtactaagcccactttggtgttttcttggctttgtttaatttttttctccatggttttatttaaaagttatttctaatcaccctgtcaacttagcagatatctgttggaatcatttaaggtgtttgtttccaaaagactgcagaaattaaatcaagatatttgcagaggaatgactgacagcttgcaggtagactggagaaagtgcttcctaccataacagacagaaaaaatggtagtacaagagtcagcatttcttatttatttttctatgaggcagggtctcgctctgccgctcagactggaatgcagtggtgtgatcatagcgcactgcagcctcaaacttctagactcaagggatctcctgcctcagcttcctgagtagctgggactataggtgcttgccaccatacctagctgattttttgtaggggtgggtagagacagggtctagctctgttgctcaggctggtcttgaactcctggcctcaagcaattctcttgccttgacctcccaaaatgttgggattacagacatgagccaccatgcctggccaattgagcatttctttaaactggaaactagcacctttataataatttcacacataccattattgttgaaaatagtcagattttcagaggaaatctctattaacctaagttgtataaccttttgaggttgtaccagtgtagagcctgtttttccgagcatctacatgctcaatgctattttttcagttatccagcatccccccacttgtttctatcctatctcatatgcaagagggtgtaaatgtttttgtgcattgcttttacatttttatttatctctcaagtgggcaagtaagacagtcatcaacagaggttgcatttggagatcatattctgttttttctttaaactatttgatcatttcagagaaactttattctcagttctgttttgtcttcagctgtcaatatccctgactccaggccctttatttagcttccattcttactgatgtggaaacatacttttaaatgaactgcctttaaaaagaaatattttagtaaagtgaaggatctttttgtaatgcaaataatgttttgttcaggattttcttgagaaatctgccatgttctctaagcctttgcctccatactggatgtggctttgccttttttgttgtgttgaagggcatgcacagatatagtttctgattatttttctcagtctgatttctccaattaggcatattatcattagaaaactcgcccattttcccatggtgtttaaaagtaaaccaggacttgtgacactatgctactcggcatttatgaaatgtaatttaattactttgtttccattgtgaagactcggtttccttatttcctatattcatttatttattcattattggtatacccaacaagataagtaaatacgatacagccttgcatttgacaattttatggtgtgtatgtatttatcatgcctgaactgtgactagacttaagatgaagatggtacctaaatcaagctcttttatattttgtctttcccataatctagtctgtcttttctttcccacaaaatagaatgggatactttttattataaatatatgacatgttcactataaaagagaggcagtaaaggaccagagaaaatgacctgtgatgccaccacctagaagtaatcactcttgttaacatcttgttatttacttgtacagtttttttctgtgttcataggctgacatttttccttgcagatgttctctctctatattcatacaaagctgcagttgttcaagtcccaccccagcctctggaggtccaggatgaatgcctccctctttctgtcctggtaccttacgtgacctccggacggcagtgtcagtgttggaaatggcaggctgctgcaaatatgctaaaacctcatcagttgtctctattcgtctgaccaaagtccgtgggaagagcaagatgctggtgatatcctggagctcttctgacacaaggctctggctagccttgatacattcctcaaattcttccttccaattctgaaaccttttgttttccagacaataaaaccctcccaaactcctacctagacattctctctaagcagtcctgggagaccacatgtgacttgacttttaactatctttacagcgtttacattttgctccttctttttgtcatgccattactagagggaggatgggccatccagagcagcgtgcgccctccacaggcaccttagcctgttcttcactccgccatgattgaaagaggagaaaatattctatagctgttccttttctgttcttggctttttcactcttactgaccttacaagttttatttttccatttctgaatctcaattattttcatttctcctattcagtatagtttttaatagatagcattgcattacatggatgtcccttatttaatcaactgtttggtatttcttttctgtttttcaaaatctaatgaacactccagtgaatatccttttgttcgggatttatctctagaaggaagattactggctaaaaatatatgtacatttaacattcatatacatatctatacacacttttttttgagacagcgtttcactctgtcacccagactgaaatgcagtggcatgatcattgttcactgcagcctctacctcctgggctcaagcaatcctcccacctaaacctcctgagtagctgggactatagacacgtgccatcatgccagctgagtttaaaatctcgttttgtagagacatggtcttactatgttgcccaggctggtttcagactccttgggctcaagtaatcctcccacctcagcctcccaaagtattgggattataggtgtgaaccactgggcctggcctatgtatacataattaggctatactgtctataaaatttggctatctatagtcaaattattttatatgcatatatccaaatatacctataaatagccaaattatacatatacagccaaattttatatatatatatatataaatgttatatatatatagccaaattatataaagctgtatatatagtcacattatcctacaggaaatgatgtaaatgtaccaatttacattcctgtaacagggcattagaattccctttttccagagccttgccaacactggttatttataaccctttcaaactttgtatgaaagttgtatgtattttaagataaatgaaaacttatattgatttgtaattatttattggtataattgaacacctttccatatctttattgtactaatgtgtatgaattccatcttaatagttttgctaacttgtccattgaggggtttcctactgatttgtaatggctctctatataaaaaggatgttaatttttgcctattttacagtaatagtacaaatattctctcatgttttctattagtcttttaacctttgtttagttttttttcgttccttcataaatgctaaattttatgtcatcatatctttcagtccttttctatattatttctggctttgatggcatgcattgaaagcccttttccaccccagagttatcaactcgttggaaaatgatgttgaaatgtcacttttaatatttactaaacactcttgcctaatttgttctattttgaagccctttaattctgtttctttaatctgcctgtcttttttttgtgcctgttccttactgtcttgactactgcaggcaacatacttacatctaaagaacaagcacacctattctgcccttttgctaaacaaattttcagcctctttttcaatgattattttttcaaatcaatgttaaacatcacgtaaagtttcaagaaaacccctaggggtattagtatttagagtgcattaaatttttagctaattcatgggagaatttgaagtattatatcttctaatttaagttagagtacaggaattgtctgtctttatccctctaagtacattcagattctcaagaatagtaccaaaattctcagatccccctctaccagtatttttctcccactgatggctcttcaaccctaaaatgtcttagtggtatggtttggatctctgtccccaccaaatctcatgtccgatcgtggtccccactgctggcagtagggcctggtgggaggtgattagatcatggggaggcttcttatgaatggcttagcaccctccactttgtgctgttcttatgatagtgagttctcatgggatctggttgttaaaaagtgtgtggcacctccccaaaccccttgctcttgcaccggccatgtaaggtgaggatgcttcccctttgtcttttgccataattctaagtttcctgaggcctctccagaagcagaagccaccatacttcctgtacagcctgcagaaccatgagtcaattaaatcttcctttataaattacccagtctcaggtatttcttttcttttattcttttctttctttcttttttttttaaga

SEQ ID NO: 2776 - DNA, 1771 bp, Homo sapiens
ggcctccgtgtttccgtgggagagagagagagcgcacaggtcacccacccccggggcactgcaagtgttaaccgccctcccccacccccactggctgcaggccccagtcctgcgggtgtgaggagagctcagactttggaaactgaataatgctgctctcgccttcctgcatgggggtagggaaaggaaatgctttagtgagattgcaaagcaggaaaaaaaaaaaaggtcaatcagtaactcttttctctgtatccattagagattgctggtgagacagcagccactgctcccaggcccgacaacaggggcagcaccaaagctggtcagtgtttcctccttacaggtctgaaggtgctgcagaggagggtgcttcccagagatcacccctgtgacagacagatcgattgaaggacccctgaatggctgaattgagaagaacaagcatattaggaggccatacaatgggagcctctcaggcagacagacaaagccgtggaaactgcagacttatttgtatgttctggtaaacacctttgcttcattttccccgtctccgcctggactgagggtcacctcacctctcctggtgtccagagcctccttcaggacagatgttgcaaacctgagttctcacaaacagcggggtccagcccttctcaacactggaaagcccttgagccatctttgatttgtgtgttttgatctaattgcactactgcttgcaatgcttgtttttagcggtgagtgctggtttaatttgtttctttctggtctcccagccccactccagaattttggctcctggagaggaggggccctgaactggcattttcagtgaagcatcccagtgccttgaatccagtaagcagccaggtgtctgttggcttcatggtttaacaacctaccatttgaagaatcgcagagatgaattaaaaagagccccggagaggctccccgatccagttgcacttcctgcttaagcaaagtaaagaaaaacaggaatgaaaacataacccaatgggttagttccatgctggccattgatgaggttgcagccaccatcagaagaaggccaaacggttagaaagacacggcggtgaggaagatgagcctcattatcgactgtcacctgcagccctgcacaggtgctcagaatctaacacttgatggctggttgagattcccggagtcctaattaggaatgaggagtcaggctggcaggacccagggaaagcaaaaagagaaggcagagaagctccaagtctgcctgtcttcgtgatccagaacacgtagtcctgctgcacaagtaactcacaatcttcctgtgtccagctgtcattagacccttggctgatagaaaaatgcaagttagcacactgcagcctcggtgtcgtcagtactgcacgtcactctctccagcacaccgcggcctcggcgtcatcagcactgcacgtcgctctctccagcacaccgcggcctcggcgtcgtcagcactgcacgtcgctctctccagcacaccgcggcctcagcgtcatcagcactgcacgtcgctctctccagcacaccgcggcctcggcgtcgtcagcactgcacgtcgctctctccagcacaccgcggcctcggtgttgtcagtactgcacgtcgctctctccagcacacagcacaagcaccatcctatcaagtccccagcaagcctttgtctccttgcagtcagctcctctcttgctggcctgcctgttgcctccttgctgtgtattttcctactttc

SEQ ID NO: 2777 - DNA, 1102 bp, Homo sapiens
gaaccacttgaatccgggaggcggaggttgcagtgaaccgagattgcgccattgcactccagcctgggcgccaagaatgaaactctgtctcagaaataaaagtcttataaaaacagtccaatatttcaccattggcagaagtgaagtggtaattgtttgttattcacatttctcttgaagaaaaacattcaagaatcatctgtaaacctgataacactgcatgaaatgttagagattcttataaatagattatttgatgttccacatgatccatatgtcaaaattagtgattccttttggccaccttatgttgagctgctgctgcgtaatggaattgccttgagacatccagaagatccaacccgaataagattagaagctttccatcagtaaaaggatgttttcttttttcacacagtaaaaattcttatcattcaaggatattggaaccacaggactatttggataaaaaacattatttgcaaattaatgcgcataggccatcttacttttattgcaaaatggcatgtgctgccatctattattcatttttaaatggtcatttcttattcagtgagtgctttagtgttttaaactatatggataagaatgcaggtagataatattctaggcataaaacatttaatgtaccttacctcatgcaatattctttggattctttgttgatttatgatattgctaatataatattttcttaaaatatataacaatatcttttatgcattttgagttccagctggtgcttctttatatttagaaattataatgggaaggtcatttaatttacagatggttttaaaattgaggtaatatctgaggtggcataatttaaaaatatttagcaaatttgtttcatatatactgtcttatttctagatttgtttaaaattggaatatgaaaaactaatggataaagctagcataaaattgatattttagtttgtattattaatatatcatgttaccttatatattaatctactcttgattctgctaattattaccaacaaaattgtattcatgacattttattaatcctctgtgaattttctgtaaataaaattatttctgaaaatctcta

SEQ ID NO: 2778 - DNA, 896 bp, Homo sapiens
tttatattaagtaatgaatgatattgaaaagatcagaaccttattagagcatgtcttcctatggaaaaatcagatttccttctctgctgtttgcgcttagcctttaccagagggtcatgtgaccagcagtaactgtgaggcccggttttctgccacgatattccctccagagtacgtgctctcgggttgtctgaatccctggaatgctgggccagttgcctcagcgggggctgccgttctaacccccagggcagggttgtttctttagctggctggtggcttttggtaccaaacaagtaactttcctttcccgtgaacttgtctgcagtcccaaacgacttagggtaactctgctgaccctgttacctgctttattccagcttttgttccagctaaggtggggagcctatagattcctggggtcccacagaggtgacatagcaatgagagagctggtgatgtctcatattcatgacacaactttgcctggattcacaagtgtggctacatagggagcacagagaccaagggttgaggagccaaggttcttggcctccctcctgccatctgactatctgagcttgaacaagcctttctgaagctctctgccacctgtctacaagtgtaaactgtgatccagggaaacaatatctcagataccttttctgacctaaattgtctctcctattcattccatagtgtgtgcctaataataagagcaaacccctgccacatgccagatgcagttctaaacacttcatacaaatggactcctttaatcttcaaaacaagactgagagggtctggctgcagacagtggcacaattacagcttactgcaacctctatttcctgggctcaagcaatcctcctgactcagcctcccaagtagctggg

SEQ ID NO: 2779 - DNA, 649 bp, Homo sapiens
cttagtactgcggccgtgtgggtgagttggctgccggtgagttgggtgccggtggagtcgtgttggtcctcagaatccccgcgtagccgctgcctcctcctaccctcgccatgtttcttacccggtctgagtacgacaggggcgtgaatactttttctcccgaaggaagattatttcaagtggaatatgccattgaggctatcaagcttggttctacagccattgggatccagacatcagagggtgtgtgcctagctgtggagaagagaattacttccccactgatggagcccagcagcattgagaaaattgtagagattgatgctcacatagaaccactggttcacctacaatgagacaatgacagtggagagtgtgacccaagctgtgtccaatctggctttgcagtttggagaagaagatgcagatccaggtgccatgtctcgtccctttggagtagcattattatttggaggagttgatgagaaaggaccccagctgtttcatatggacccatctgggacctttgtacagtgtgatgctcgagcaattggctctgcttcagagggtgcccagagctccttgcaagaagtttaccacaagtgagataaagggaaaatctttgaaggaaggacggattgtgcataat

SEQ ID NO: 2780 - DNA, 814 bp, Homo sapiens
gagagacttgataggactttgccgttctgcctgccacagctgttcacttctcaggaagggagtccagaagctatgtggctgcctgtgtggtcagacgtgggtgagaagatgaggatggatgcttgctcctctcatggaaacagataacttccgtacctgccaaaccaatggcagaggagctgggaagctcacaggcattgctgaggcctttgaagatgttagctgagaaaggcagaccagccagcatggagctgccctccctcccactcagcgcctttcctaggccaaggaccaggtgaagccgccttgaccctgatccagccgcctgggttgctgctgccggggaaggcaggcctggtgtggacggaccccctgacttttcaagacacactggaggtcactgagccatgttttgagtcagttctgcatctcatcaagacacaggtaatcagaagaggggtttggaaactcaagagcacataagtgaacaaaacatcaagcttgctcttaaaagtttttcaatcttacgcatgttggtaagatatatatgtggtatttatagtgtaaagagggtgttatatgttctaatatatatgttacaacacaagtataaacaatgtgctgtgaatacaagagagatatatatgagagaaataattctgcggaggagcagtggcaagagcttccttgaaaaataatatgcttacagggccttggggtatggatatgagggcaacaggtgaatgcaacaaaaataaattccagaaggaacagcaattatttattcaaaaaacatttgttcattgcccagaat

SEQ ID NO: 2781 - DNA, 10800 bp, Homo sapiens
cctaatgctaaatgacgagttaatgggtgcagcacaacaacatggcacatgtatacatatgtaacaaacctgcacattgtgcacatgtaccccaaaacttaaagtataataataataaaattttaaaaagaagaaaaagaaagcaacaaagaatacataaaacaattaacaatatgacaggaataaaacctcatatatcaataatgaccttaaatgtaaagggattatattctccatttaaaacatatggaatggctgaatgcattgaaaattgtgatccaaaaatatgctacttacaagaaactcatctcatctgtaaagacacatatagactgaaggtaaaggaatagaaagatattacaggcaaatgaaagatattacatgcaaatggaaatcaaaagtgaacagaagtaggtatacttatatcaggtaatacagactaagtcaagaacaataaaaaaaagacaaagaaggtcattacataataaaaagtgatcaatccagaaagagggtataacaattctaaatatatatgcaccaacactgcaacattcagattcatacacaaatgttattagatctaaaaagagagatagacttcaatacaataatagtgagggactttaatacttcactctctgcatttgacagtgcatctagaagaaaattaaataataaaaaaaaacactgaattttagaccaaatggacctaacggacatttacagcacattctatccaacagctgcagatgatacattcttatcaccagcacatagaacatgtatcccagaacttaaagtaaaaaataaaaaatacaaaaataaataaataaataggcaaaacaaaaagatgttggtgaggaagaggagcaaagataactctcgtatactgctggtgggaatgtaaactagtatagccatcatagaaaactgtatggaggttgctcaaaaaaactaaaaatagaattactcttcaatctagcaatgccactaccatgtatctacccacagaaaaatcaatatatcatagagatatttgtactcacatgtttattgcagcactattcagaatagcaaaaatattgaatcaacttaaatgttcatcaactgatgaatggataaagaaaatgtagcatgtgtacacagtgaaatacttttcaggcatataaaagaatgaaatcatgtcatttaaagtaacatggatggaagtagaggtcattatcttaagtaaaataagccaggcacaaaaagatatcacatattctcgcttatatgaggaagctaaaaagtttggacacatggaggtagaaggtggaaagataaataacagagactgggaagggtgagtgaggggacagggaagaatgaagagaagtaggttaaagggtataaatgtgtaatatgatagaaaaaataaatccaatgctagatagcagagtaggatgactatagttaaaaaaaatgcattatgctcaagtgatggacaccctgaataccctgatttgattattacacattatatacatgtaaaaaatttcccatgtaccctgtaaatatgcacaaataaaaaactatttaaattaaatttattttcctaaaaatgtttatctaaagaaaattcttagataacagcacagccattatttagagcagactaaggttataaaggtggtatgtgaataactgaaatactcatcctgttaaacaatattcaagattgtattactatccctcaaaaaggaaatatacatgtttcaagctcacttacaattaaattaattagacaatttgtttatagaggaataattactgtttctcctatgtttcaccttgagggctaggtactagagaaataatagtgaaaagtgcatagtctatatccttatcaaactttcagtcaaaagaaaacttcaagaagatgagtaggtgatttgtgagtcaatagagaagtaaaaacatggtcatattaggggaggtaacgcattctttaagtactagccaaagcttcctaaaggagccaacatctaaactgaaggatgtataagaataagccaaggccaggcatggtggctcacgccttaatcccagcactttaggaggccaaggcaggcggatcacgaggtcaggagatcgagaccatcctggctaacacggtgaaaccctgtctctactaaaaatacacaaaattagccaggcgtggtggcgggcgcctgtagtcccagctactcaggaggctgaggcaggagaatgatgtgaagcttgcagtgagccaagatcgcgccactgcactccagcctgggcaacacagcaagactccatctcaaaaaaaaaaaaaaaaaaagaataagccaagacaggccgggcgaggtggctcacgcctgtaatcccagcactttgggaggcccaggcgggtggatcaggaggtcaggagatcaagaccatcctggctaacacagtgaaaccccctctccactaaaaatacaaaaaaaaaattagccgggcatggtagcaggagcctatagtcccggctactcaggaggctgaggcaggagaatggcatgaatcctggaggcagagcttacagtgagccgagattgtgccactgcactccagccttggtgacagagcgagactctgtctcaaaaaaataaaaaaaaaaaaaaagaagaagccaagacaaggggtattctgggaggaagaaagagcatgttcatatacctggagaacagagaacataaggcattcagtgggctccaagtagattggaaagacaggtctaaacatagagagggagttgggggtgccaggaaacgagcctcaagagaaaacgcaagtaacagatcatgaagggacttgtccctgtagatcagagcatttgctggaaagcaacagaaaagaacctggattacacaaaagattttttggaagactatcagagggaggcagtgcattgtatcccactggtagcatttactggtgaatttcccaaaataaaatagatcagatgtagatataaataaacaagacaaaaattaataagaatagaatattctaaggaatttgaattttattttgtgggcaactaatagtaataaggagaatcgacatgttcagatttgcattttagatagatgagttttgcagtagtgggagtaaattgaagttagggagaggatatcgagagctgttacagtgacataattgacagatgatggtgacctaagtaaggatagtgcagtggagaaataagagaatgggaaagaatacatttgagagccaggtttgatcacaatggtagcagatttgcatttctggacattaaaaagccatggctttagtggcttggctttcatgagcaggagaagaaaaatctcaaaagcgggtggagatagggagtggagaggtagctcttccctcctcctgaatatttctgtgtggtcccagagtccacaaaacagaattatccattacccccactttaaatactgtaaaagctgcctgttttattttcaaacacctcctgtttggccataacacctaaccttgactgtccccataatgggatgtaaatttattaacaccctttagtcagttgcctgcaactatatgttttggctgcctcccaagtctttaattcctttattgaagcatttcatgatggttgttgcttctccttaaaagcttttttgcaatcgctgagtttttaaaatcctatctgtttttctcctatcctgtctttcattaaaattgattttctcagcttctcacatatttctatatgaggcaaagaattttagatagataccacaacctaagcatcagaggtagagatggaggacaactaagatctaagtaatgttattttaattgcaatttaaagccaaaaggcaaagacttagtaaagagctgttttcattacagttgttccatgcatgaaatgaaccattacacattggaaaagaagaaattattccagagtggcttagttataacaaacaaaatgagttccaacaagctgtttttagtcccatggccaaaaaatgcattctgttggtattttttctaatgtgacattatattttgaaatgttatttcatgttatactctctttatataacatatttgcattgaataatgagagaaatgaccagctggtctctagcaattataaaaacctttattggaggcagcaggatgatggcagatggcaattttaggttgaagtctcactaagaatagatttgtagcatcttgttgatgtggaatatagtacaacctttctctgagtctataagcaggatggtagggtggtttattgagatactaatttgcattttgatctcactgtatttttttcttccctcattaaaatagtaaaagcttttgggttcagtgtatttgagttccaaagccgaagaaagatgtgttcaaagataatgcctcttatcaacttttggttttgaaagcctgaattgattaaggaggtaataggccaatgagaggaggaaaggagaaagaaggtctttggggttgaacagcaggaagaacaattccatatctttaataaggcaaattctgcaagcctggggaaaggaaggtggtacttgatggagtagcaagattgaccctggctcatttgcaagctgtgtcatgcatcttgaaagactgtaccaaccatcaagaccctcactctgcccctaggtttggtacaggtatagccacaccacctagatctatggggccatcaactaaaagtagacattttgaggtgaaaaaaagaaaaaagaaaaaagaaagggaccattgataaggtgagtcatctgttttcataatgatcataaacatttgagtaataaactctgtgatcatattgaagacaagaaactctaatctttcagagactatatagacccctattctctcatgtgacctcggaagtacagggccttgaccatccccttctcagctccatattctatgatgggtaataaatttccctcaagaatggagatttggaatctgttttaaaatgatatagaatgataatgtaatatatcttgcattggcaagtaacgaagtaaaatgtaaaccctttgcaaatgtaagatgccacgttatttaaggtagaataatataaaagaaagggtcttgaagatataattccagatcactctgtactttattataatatgtattagaagataagagcagtagaaaagcacagactttggtggggggaagggaaaagaactgattcctgaaacatagatttatgtctttaattggcaacccagcactatattacaatcagtgttcctgaaatcaaggggttaatttgatcaggtccacctgccctgcttgcttttggtcacttaacttttttcctttttccatgaagacgaaggtcctggtagctgaaggctactgctaaacactgaaacttaaccttcactggctactttatagataacattcatgtgtcatcatggtaatggtcatttcagtagtttttcaggaactggacccaactcctgtccggttcaaacctgttgagaccactaactcttcaaatgggcctgaacaagtgcccaagaagggggcttttgacatcagagagccaaaaactccaccctcagatcatgctaatgctgccattttctgtacatgtattttatggaatgccatgaaccctgattgtgcctgcacagaagggacctgttatttcactgttcctcactgccagtcacctttccccataccttagaccactccacttccctaacccataaatatctgtaagacttatatttggagaggtggacatgagagttgttctcccacctcctcacttggcagccttgcgaataaaacttttctcttttgtaaaacctgtgtcacagtgattgattactcagaatggactcagacctggctggtacattcctaggaacgttttcatttctgtcctgcgtccttcatctggagataagggtaaaccccagtgcttcagagcccagggtcattgtctttcaccactcaagcttgcacctaatcttccccttcaccagactaaatgatcccagttccaatagtttaagctcccaaagtctagttccaagggttttgttctcctctttgcactcattaaaggcatttctgctttcatatttcatcatctatttgtgcctaagatcattaaaggtcatgtggtataagggcaaaaaccaggcggctgtctaaaagtcaaagccatacaggattttcagaggcagcttgagctggttcatgtccaggctctgctacatcctatctgtgtgattctgggccagttctctaaacttttcatatctcagtgtcctcatttatattaatcatactgtctattttctttatcttatgatgttttgacatcttgaggtggggatagggcaggacttacagatgtgggagagatggcccctaccagggctagttaatccctaaaaatagtaaacaactcacttgggagcacacctttcacatgcaaagcaactaacgcagagtctgcctccccacccactctcttcatctaactcccagacactaagccaatattcctcctgtgctaaatcatcccagggccagatactaggcagcaaaaaattactcctacagcccagaacccaccagaattattcaaactaaccaagcttacactcttgactctgccctgccttgcctttcttgcagaaacccagttaagactctggtaggctttctcctcactcctgcctctgcctcctcatccagtctggctcttctcctgtggccctgtgtagtgaggcatgcccccttctcttgagaaatgagaaattcaagccagctgcagaaatttgcttgagtagcaaggagcccaatgttaatcctcaagaccatagggaaaatgtctccaggccatgtcagagaccttcatggcagcccctcccaccataggcccagaggcccaggaggaaaaagtggtttcatgggccaggtccagggtccttgtgctgtgtgcagccttaggacttggtgccctgtgtcccagccattccagccgtggctgaaggggccaatgtagagctcaggccatggcttcagagggtggaagccccaaaccttgacagcttccacgtggtgttgagccttaggttgcacagaagtcaagaattgaggtttgggaaactccaactggatttcagaaaatgtatggatgcccaggcaaaagtttgctgcaggggcagggccctcatggagaacctttgctagagcaaactggaaggaaggaaaatgtgggtttggagcccccacacagagttcctagtgggcactgcctagtgcagctatgagaagagggccaccatctttcagaccccagaatggtagatccactgacagcttgcactgtgttgctggaaaagctgcagacactcaatgccagcctgtgaaagcagctgggtgagggctgaatcctacaaagccataggggcagagctgcccaagaccatgggaacccatctcttgcatcagtgtgatgtggctgtgagacctggagtcaaaggagatcattttggagctttaaaatttgactgcctcactgaacttcagacttgcatgggccctataacccctttgttttggcctatctctctttcggaatggctgtatttacccaatacctgtacttccattgtatctaggaagtaactagctttcttttgattttacaggctcataggtagaagggacttgccttgtctcagatgagacttttgactggatttttgggttaatgctgaaatgagttaagattttgggggactgttgggaaggcatgattagttttgaaaagtgaggacacgagatttggaggggccaggggcagaatgatgtggtttggctgtgtccccacccaaatctcaacttgaattttatctcccagaattcccacatgttgtgggaggggtccagggggaggtaattgaatcatgggggccaggccttcccatgctattcttgtgatagtgaataagtctcacgagatctaatgggtttatcaggggtttccgcttttgcttcttcctcatttttctcttgccaccaccatataaaaagtgcctttcacctcctgccatgattctgacacctccccagccatgtggaactgtaagtgcaattaaacctcttttggttcccagttttgagtgtgtctttatcagcagtgtgaaaatgaactaatataccaagctatcacatcactgagtgtgatgggccatcagcactgctgtgatgtcctgcaaaagtggaattatttcttgacttgacctcactcttatgtacttgagaagctgagttctcttctcgcatgttctaataaacaagtcttataagtctggctctggttagcccacatgttgaacctcttacttgcaaccccactgatgtgtctcccctatgcctggacataagagcctctcaatctcacattcatccaacagcatctctaggtgtatactcacttgtagccaaagtaaattttacaccatgataaaaattagtgtaaagactttacagggaaccaaagtgcctgggaattctgatgagtaactactgagtggttttttttaatctctttattcaatagacgtaaaagtttaacaattgaagattttaggtgcctcgcttttacattatgatttttaactagtgcatgcacaaatatgctttggcacacaataccctttccagagccatcaagatttaagtcatatttttaaggacagtgttaaaatgtttacaggtttatgacccataagtatctggtttaactactctgtgctgcaaccatttttataattattttctctttcacaacttttacagtaattttatattcatccttggagatgccacattgtgttttcttttggcttactaagtggacatcacaatcggttaaaaatttgccatttgtgtgtatcagggcatagaaggtggaggataatagtgggggttgtaaatgtattggataaattatatggtacaatatgttagtgttcatttatatccatctaatatgagcttatatgtcacccaaaggtagccccagttaggctgtgaatactgtggcccagtatcaaagtgatcgtaagttattcctagaagagcgtgtccctgccaaacacatatcagggcttcacagttttgaccttatttcatgtggtccctcttgcagctagagtctggcacagaaggcaggacttccagctggtactttaggtacattggggcactagagataatgaatgcacttgacatttacagttgggtctaaattcacaactgtgtcagataacaagagctggattaacgagtggccagtatgcagagatacagaccatctcaatggagacctccctggagtatcaagacttacaaagagagatgaacacattggaagccaagaatggtttatggattatatttgctaaatgtgtgcaatcctcaacaggaaaaccacagccaggtatccaaagcagaactggagtgtgcttatatgtgtcaggggaagaggtttttatgtctaataggcacagctagtttaatatgaaacttgcactgacagtttatacctaactcgactcaagactttcatagttatctgtaaagccaaatactagatttgactggctattaaataagcatggcagaattgtgaagacagtattatacgactatgaagcgaattaaacccttcttatcacccctctccaaaatcagaagaaaaaatattctttcactcctttttttaaaaatcatgagatacatttttttgttaaaaaattaaaaatgcaaaagtgcaaaaaggaggatataaaaatcttcacaacctcagataaaccccattagtattttggttaatatccttccagtctcttttcaatgtatgtgtgtgggatcaattttaaaatatataatatgaagtataaagcataaaaatatactttttcacaacctgattttagtctgactcaccaaaactttgcgattatctttccatgatattgttcttcagctgcttcaggtttagtagcacatgatattccattgtataatcttattttaatttacttaagcagcctcgtactgttggacatttgttatgtccaagtattttgttactacaagcaatgctgtaatgcacactaagaagaaacatatcccttgaaactggttctacttttaatattttcaagcgttctttctgccattcccatcattataaattaagtttcacccactcacttgctgagcatctagttttcctctttgtctggaactttatgtatgtccccaaatggaaatgacaagaaatatttaaaccccaattggtttaaaaattaggtatctaccttatttagggacagttttatttataataattctaaatgtctgtgaaatttttaaaaggattgtatctgcatgatccagtttcttgatgtatgtattgccgtagtttatgcagtgatgcatctatttacagagtgtgtaacactcaggacatatatgtagagcattgttgatcagtgtgtggccttgggatcaagaggaagctggagtaagttagcactggttctcaaaaaaagagttcaagctaaaagcatgtggcatgaggaactagtctactcaggctacatggttgaaaatcctgagatagcaaacactgaaatccagttcatgggtattgatgccagggaaggataccagcaagtaaaaaagtag

SEQ ID NO: 2782 - DNA, 8351 bp, Homo sapiens
actccccgaagcctccgggactcggcggtgggcgtggcgggcggtcgccgtggtcaccacggcttttctcagaggttttaacgcccctagacttcatttcccgacagggactgcgggtctggatattccgtcgtggactacgtttcccactgacgacggagaaaacttggtcctttggctccgcgctgcgcgtgacctgcagtcacctgagcaagagggcggcgtgggtcgctgcgggagcccctacagccccagcccgcagcccacgtggcaccctacagggctgtgagagtggggctgctggaggcgttcagagcgcggaggccccaggcgcgggccgggctctctcccgcctcctcaggcccgggggtgctggagctgccgaggtgggggctcatctttgggagacagtgtctttgctcagttcaaaagccacagaagaagttctggacgatgtgggccttcaatcttctaagatgggaatagaaagaagaggatctacccagaccaggaccctgctgcccaatctcagctctggctttctggatctgtgcttctctggtagaggaaccctgaggactgatctactcttgcagttctaaaaccatggcccatgcctcgctattccctgggacacaacaatattgaacgtaggctagttaatagccctacaatctcctctaagtgttcgagtgaaaggaagagtcacatgtgtctcactttaaaccaaaagctagaaatgattaaacttagtgaggaaagcatgttgaaagtccagacaggctggaagcgaggtctcctgtgccaaacagcaggccaagttgcacatgcaaaggaaatgttctcgaagcaaattaaaagtattactccagtgaacacacaatgacaagaaagcgaaacagttttattgctgatgtggagaaagttttagtggtctggatagaagatcaaaccagccacaacgttctgttaagcctaaacctaatccagagcaaggccctaatgctcttcaattctatggaggctgagagttgaggaagctgtggaagaaaagtttgaagctagcagagaataattcatgaggttgaaagaaagaagctgtctccagaacataaaagtgcaaggtgaagcagcaagtgctgatggagaacctccagcatgtgatccagaagacctagctgaaataactgatgagggtgactgcattaaataacaaattttcattgtagacaaaacagccttctattcaaagaagatgccatctaggactttcatggctagagaggagtcaatggccggcttcaaagcttcaaaggaaatgccatgtctcctgttaggggctaatgcacctagtaactttaagtcaaagctcatgtgtatttaccgtaatgaaagtcctaggatcctaaagaagggtgctaaatctactctgcttgtgctctataagtagaagaacaaagcctagatgacagcacatctctttatagcatagttcactgaagattttaagcccaatattgagacccactgccaagaaagatagatcattttcaaaatattactgctcactgacaatgtgcctcatcacccaagagatgtgatggagatgtataaggagattaatgtggttttcatgcctattaacacaacatccattcttcagccaatgaatcaaggattaattttgactttcaagtcttatttaagaaacacattttgtatggcaatagctgccatagatagcagttcttctcatggatctagggaaagtaaactgaaaaccttgtggaaaagattcagcattctagatgcaattaagaatacctgtgattcatgggaagaagtcaggtatcaacatgaacagaagtttggaagaagttaattccaaccctcacggatgactttcagaggttcaagacttcagtggaggaagtaactgctgcagttacttgtggtggaaataacaagagaaatagaattagaagtggagcttgatgatgtgactgaattgctgcaacctcatgatcaaacttgaatggattaagaatctactcctggtgaagatgctttgaacattgctgaaaggacaaggatattaaaatattacattaatttagttgatacagcagtggcagggtttgagaagattgactctagttttgaaagaagttctatttgagtaaaatgctatcaaacagcaccacatgctacagagacatctttcatgaaagggagagtgaactgatgcagcaaacttctttgtcttattttaataaaatgttatacccacctcaacctttagcacccaccagtcagcagctatcaatatcaaggcaagaccattcaccaacaacaaaaaaaatgacaactcgctgaaggctcagatgatcattagcaattttcagcaataaagtgtttttaattaaggtatctgcattgatttttttttaagatgaaattttgctcttgtcacccaggctggagtgcagtgctgcaatctcagctcactgcagcctccgcctcccgggttcaagtgattcttctgcctcagcctccttagtggctgggattacaggtgcctagcaccacgcccagctaatttttatatttttggtagagacggggtttcaccatgttggccaggctggtcttgaactcctgacctcaggtgatatgcccgcctcggcctcccaaagtgctgggattacaagtgtgagccaccacgcccagcctgtgcattgattttttagatataatgctactgcacacttaatagactacagtcgagggtaaatataacttttatatgcactgggaaactaaaaaatccatgtaacttgctttactgcagtattcactttattgcagtggtctggaaccaaacccacaatatctccaaaatatgcctgtagtcagtgggacacatgatgcttctttggttgggagatttgtggacatgagtcttgaggaatcttgagaaattgaagaaatgatggaaagacaggctagtcagtggtcagaaggaaaggggtaggtgctgggtaaaagagcaaattgaaacaaagaacaaagagggaggaagagaatttatttatttttatttttatttttttgagactgagtctcactctgttgcccaggttagagtgcagtggcaccatctcagcttgccgcaacatccgcctcccgggttcaagcgattcttgggcctcagcctcccaagtagctgggactacaggcatgcaccaccacacccggctaatttttgtatttttaataaagacagggtttcactatgttggccaggctggtctcgaactcctgacctcgggtgacctgcccgccttggcctcccaaagtgctgggattacaggcatgagccactgtgcctggaaggaatagaatttaaaaagcatttttgaaatgggaagaaacagattttggaggataggagatggaaggaaccagaagaggagaaggtcaccatccaacttactgcattttctggagagtttcgtgtttcttcagcaggtgtaccagcctggtcttggtttggatgcctgtgactcttaccataaggtataaggccttagcctgcacattctcatcactgtccatcaatcccatagccagtggaatagcaaaatgatggttcatgaggcctagcctatccagcgcctcccagggtagttcacggatacgtggattggaatggattgtgtcttgtaggaggcgatgggcagtcttagaaaccaactctgaagatatctggcaagtggcaaaaatacgtttaagtaccctaaaatatctcttgtattcctctacagagcagtaaattgtgaggttgaggatggcctctattaaatcatccataagccttccactatattttcttctcatccaattttggtttgccatgctttcaagaatatcaagggaagttccttttcgcaccttggatttatccttttgttgactccttgaaattttctcttctactagagtcatagatgacaagtcccagtccttaacttggtaggatgaatacagatcacagcataggaagactggggtaccctcaggccaagggcgagcacggatcactgagttggggatggccatcaggagcaaagggccattgccgcccttgaccaaagaagcactgtggcatttggtaggcattgaatccatcccagccagccagctgcaacggagcaggaacctcatgtcggggacgattatacttggaatcaagagtagagaaatcaatatccttatcctccaaaagaggaaatttggtcttttgaatcacaagggacatgcttctctcttcttctacaacatgaggcacagtattgtcaaaagcaatgaaccgtttgttgacaagggtctctagcccctgtaattcctgccgcccttttccaaggtagacaaatctgggtacaaatactgtttcaaacataaagaagaagctaggaaggaagggtttagggacttcttgtatttcatctgcattttttaggatacgcaggtgaaccagctgagctggagggagcagctttaagcaagatactatgtagatacgctggttgaaagtcaacaacaggtcacttcgattactggcaaagcagagtggtccaaaatgcagggctgagtcgaactcggttacaagtctaccgtggaagtcccagatccggactgagccatcaatgccacctgtgacaaaaagtttcaggggaaggcagacatcaaatgaagtgatgtcacactcatgcaggcattttgtctctctccacacaaagctctgttttgattctgaagatgtcagaaagccttcatagtgccagagacaccagcagtagctttcagtgatggcacccacagaacctggcaagagtatcacacgttttagggggcagccacagaggattttgctgacaggctgaaggactaccttgttcacctgaagcacggcctctgtcaagtgtatgatgttatccgtgccataggaacagagcaaggcgtttccctgagggccttccagggtagacaatgccaatactgccccagagtgaacagtcttctctattcgggcacaactatagtgggaaagggttctcacaatgccactctcatgcccacagaacatcaatcctcctaggcctttttgcagatgggacctcccataggccaagcatcttactgtatccttacggtctgctgaagtgcacacaagatacttggctgtacaaggagagcgtgttgcatcaaacaccagcacctctgaactgcctattgccacaaagagttcctctctctctgagtcataggcccaagccaaagccttatccataacaagtagaggccaagtgataaccaggagatcccctgttactggagacaagaagcgcaataaaccatcctcagtggcacatagaatccgagtccagttatggccgcagcagacccgctgcacttgctggggagcagaaccacagacattgaagaggctataaaagtagggcaggtgatgcaatgaaaaactgtaggtggtctggcagaaaaaagtggtattatcaataaactgcagtctctgaagatcctcgtcaatattcagctgccgcagcaagttcccataagtgagattccattccctcactatgccttcactgcctgctgttagtaaggtgtggatctctggccggctatggatacatatcactgatgaggaatgggcttgaaagctgtggaggaagttaccttggtctaaaccccaagcgtggatctctccagccctgtttccagcatagaaattgccctgagagacacaagtaaaggagcaagtgatggaagagccactggcgacaggagtgaacttcacttcttccagctggccctgaccccggtgaatgaagaccctcactgtatcctcacacagagccaacagggatccctgggggccattcagggaaaatccctgtacaagctcatgatcagccataggtactatttgagccatctcgatgcccatgccatttggtaagataaaccaggtaaccacagcccccagggtaccagagagcagcaactcagcttctggatcatagaagaggcagctggtggagaaatgacagggcactgtacccagaaatctgaacgttcgacggtgatctccaaaaagcctcaggcgcatgtcaccacagtaagcaattaacatgtggtaggaacctgtgtggaccattgcttgaatgggcggccactgatccatcatgcgaagcctcatcttctctaccattcctttcatttctgtaccctttttttgtatccaaagtactgcctagaagaggatgagagatgaaagcctgactgtggaggtggatcattttccaaagtgtggggtagggaaggctgaatattcagatccctgttccctctggtgtgactaaggaaagactagacagcttgactttaggaatctcctagtacagcagctcccacttacccatggtttccctttctgtggtttcaactacctgtgtggtcaactgcagtccaaaaatatcaaaagaaaaattccagaaataaacaattcataagttttaaatggcatgctgttctgagtagcaggatgaaatctcaggcagtcccattccatcctgcctgggacttgaattatccctctgtccagcctatctacactacataccctatctgcctgttacgtcacttagtagccattgcagttatcagattaactgtcgcagtatcgctgtgcatgtgttcaagaaaccctcattttatttcataatggtcccaaagcacaagaatagtaatactggcaattcagatatgccacagagatgccacaaaatgcttcctttaagtgaaaaggtgaaggttcttgacttaataaggaaagcaattgtatgctgaggttgctaccatctatagtaagaatgaatcttcttggccgggtgcagtggctcacgcctgtaatcccagcactttgggaggccaaggcgggcggatcacgaggtcaggagttcgagaccagcctgaataacatggtgaaaccctgtctctactaaaaatacaaaaattaatcgggcatggtggtgcgtgcctgtaatcccagctactcaggaggctgaggcaggagaatcactggaacctgggaggcggaggttgcagtgagccaagatcgtgccactgcactccagcctgggcagcagagtgagactctgtctcaaaaataaaaaaaaaaaaaagaatgaatcttctgtgaaattgtgaaggaggaaagacaaattcatgctagttttgctgttgcacctcaagtgcacgcattatggacatagtgcatgatagcacttagttatgagggaaaaagcacaaaatttgtaggtgagccacatgaacacaaacatgttccaattgatggcagtcaggtttggtactatctgcaatttccgatgtccactgggggcttggaatgtatcccccatgaattcgtggggactattatactaggaattgggtatgtgatagaagcaccatgttcaaggcccttttcttggccttcagtctacttgatggagaatatgaattctgagggcctgataacatgaggtgaagaaggatcactgcatccagtcaaactgggatatggagatgggtactaaaatgagctaattcacagtcactaccatcattctaaaatgagggcagttcaggtgtgatgcatgtaaattgaattaagaaggagagggggaaaaacgaggtggctttacctgcatttttccacagggttccatccagtttaaggagacaaaacagttgaccttgatggagtagtagaagcagacaaaaggcttgttctgtggatggtgagactcccggtatagagtctcaggccagtcactcagtagaaccacatcattctttggttcttcatcattctgagagagaagaatgacctgagttaagagttctgagtccccactcattcactcatttcagaaatatttactggccaggtgtggtggcttgcacctgtaatctcaacactttgggaggccaaggcaagcagatagcttgagcctaggagtttgagaccaatctgggcaacacagcaaagccccatctctacaaaaaatacaaaaattagctgggcatggtggtgcatgactgtagtcccagctactcggaaggctaagtaagacaggaggatcgcttgagcccaggaggtcaggccacagtgagccatgactgtagcactgcacgccagcatgggtgacacagcgagaccctgtctcaataagtttaataaataaataaatatttactgagag

SEQ ID NO: 2783 - DNA, 5263 bp, Homo sapiens
gtctcggctcactgcaggctctgcctcccaggttcacacaattctcctgcctcagcctccgaagtagctgggactacaggtgcccgccaccacgcccggctaatttttttgtatttttagtagagatggggtttcaccgtgttaagccaggatggtctcaatctcctgacctcgtgatccgcccacctcggcctcccaaagtgctgagattacaggtgtgagccactgcgcccggccgaattactgcttctttctaaagttatgcctgcttgagtctgaatataaccattttaaagaaaatcaaagaacatccccctccctcccacaaatgcataaatataggtttctctaaaagcctgggtcgcactgactacggctttttggaaatttgtcctctgtccctccatggaagacaaatctagcattttgtaaaaaattaaacagtaacaacaaacaactccctattggctgcttttcacaggatgcctctcccttgaagcagccaccctctttccctaagcgcttattttccctcccctcccctccccttccttccggttgttaaaactttcaccagtgagaggatggtgtactgcagtaaggcaagcacttgcagtgtgtcaggcatttgagatatagggaggagacagtaactatggggcaatgagggtggatggctattgctaagtgccactgatgcctcaagaaggataatgaacatcagagagcaagtaccaggcaactggaagccagatgtggaagcccgaggaccactagttgcatacagagaatctctcatctgcagtggaagggaagagaaagtgaggactaagcccagggcttaatagagtggcagaatttcagacagttaaaacacccaaccaaggcaggtctgatatgtaaggtcaaggacccaattgggaaaacctaacacatgagatggcaatatctgcttggatcccccccaaagacttttacttcctgaacccctcagaacattctgaacctatacatatgcctcccccattccttgctagcactctccattcccaatattacactggcccttcttgtgcaagacaatgtatgcacctttcagagtcctctatgactcagctggggacatgctgggcttgctaagggagaatagggactatactgaactgtaagatgtagtcagcatggactgacaggagctggaggagattctgagagcacttgaagagggggaccagaacataaggtagaagagaggacaatttttgacttgaaagggtttttctaagatacagaatttaactccctagcataagtatcccaggtgttggtgtaaacttgctgctagcatggcttctagaaagctggaaaaagtgatggcccatgttgaacaaagttaaaattccagaatttctatgggagacaatggaggaagggaaggaaaggagaggaaaggagggagggagaccatattgtggggagacagaggaatatagactattgccacatcctatgcctcttctctccactcttgtttaattgaccacttgggcccctgaagaaactggatgggttagggagggtcattgtagaccatcacaagctcaatcaagtataatcccaattgcatgctgccagatgtatcttcattagaccagatctatactgccttaagtatatgggtatacagctgttgatttagtgcaggcattcttttctcttccagtcagaatcagaaacagttcacattttcatggaaatgataatacacattaacagttttgctccaaggccatgctaagtccaaagaagtgtggaccagctggacatccacagaacatcacattgatccattacaacaatgccaccatgttgattgggctggatgagcaagaagtggctagcacactgcagaccttggaaagctatgaacaagaggaacatggtttggaaatgtttgtcccagccaccatgtccagatgaggaaacagaattccatggaagtggaatgaccagcacttggtcccacagctggatgtggcccagccagggctgaagccagacggtggagtctcagcctggactgttcagacttgggtctttccctccatccttcacccaccacacaccttgatttaacccaggaaaaaactttccagtgggccacagaaatggagcagattctgctcggatagagactgcttctgaggttcatctgtgtcttcagcagaatcccccaggctggtggacgcaggagggagcgaggaggcaggagtccccacggacatggctgcacagcctggggccacagggcttccaagagggagccagtctgcagcagaaaagcccagagggcagcttccgcacacacacaagcacagcccccacccccgacactgcagacagggcctcttccggaaggcgctcccccaagctcatgtcccacagcctgggcttgttggaggccatctggcctgcagatgctggtgagcctccatggtgtctgtccccactgtggcagggacaaagtccccaagaggaagagaggacctgactgctcttcagagcttgacacacagcacccccagccagaagctgacctcccacttgtttgaggcagtgttcaaggggctgtccacagcaagagagatgggactgggctccatctccaaagaggcctccctgagccagcacagaggaaggacaaagaaaagattgaaaaaagcagagttggggctctctggtgccattgcgctgcctccattcagctaagatgccctgcctctccttccacctaaagcagcttctgccacttaggagacccccctctccccaaacactgaatggcacgggttggccagcttaggaactccgttgactaagccagaccttcctcctttccgcctgcccctagagtgtgagagggcacagcaagcagctgtcctccctgctggtggtcaccacctccagcactggctctgtttccctttgaacattaattagcaggtgggttctgatttgagagtgaagcattctttgggggtgcccagctgagagcagtggtctggtggagcagcgtgcaggactctctggaaggctcacccgttatagcagagctggaaatgtgatttccaggcctgagtcggatggtgggggagggtcgccctccagcctggtgactggaggtgaattcccggatctcctgggtcttggcttcttcctctgtgaactctgacttgggggttgttgggaggtgatttagtgctgttctaacatatgctggtatctgcccttcacaacgcggggacagaggcggatggcagtgttttcactgctgtccctgtggacatggagggtgctatgtggggagaagtgccacaacccaaaatctcagcacattagtcctgagtggaaaacctcctctgacagtttcttcagcaagcaaagtgcatttctactgtgctgatcaccctcatcccacttgatcatgttcatacccagacctgagctagaccctcaaccaaattagtccccagccaatctgggacctcttggagaccgtagggtaaggaaaagtggtgagggacatagcttacttgagcttaggattcctttggttcctgaaggtaaggagggaaacacttgggctgatggagggcctatttcaggtctcaccaacaaagaagggacaggtgaaataagaatacatgaggccaggcacagtggctcacacctgtaatcccagcattttgggaggccaaggtgggcggatcacttgaggtcaggagttcaagaccagcctggccaacgtggtgaaaccccgtctctactaaaaatacaaaaattagccgggcggtagtgacatgcacctgtaatcccagctactcaggaggctgaggcatgagaattgcaccactgcacttttgagacagagctagaccctgtctcaaaaaaaaaaaaaaaatacatgggccacatgaacaaacaggctctcttcaaatagaagctggttggtcacatcaccccattgacaagatccctgtctagctagagatagccttccgagacacatgaccagcctttgaatcctgggaccgccacttacaactgggggaccttgggcaaaatagttggcctctctaagccccagtttacccatctataaaatagggatgataaaatcaactcttagcgttgccttgtgaatcaggctaagtggtgtaggcagtgttggcccaattccaaaagctcaaggctgtaaccaatgaaaagagcttatggactcatgaaagagacaaagaaacccacccgtcaggagttgcaggcagtgagtgctgttggaacatcagaaatgggtacttcactctggctgggggtgatccgaagcgccccccaggtggggaaggagggaaccatccaggtacgggctgcacatgtgttcatggaactgcaagcagggtgggggatgaaaaggaagcgtgaggtatatacagaatgtgggaggaggtggattgagaagggctcaatgccctgagccaaagctgtgaaccacatttcagtgatcacaagggctacaagctgggaaggcacgatcacctttgggttttagaaaggttatttcgccagctgtaagagaaggaggcagggcaccctgaaggcagggaggccaggtagtaggtggttctgttctgtggtggaggatcctgggctcggaactgaggtagaggcagtggagaggtggctccaagagctgggacttgggcggtgtcactgtggaggctgaaggagagggaatcactcaagttgctggcatgggtggttgatggtaccattcactgggagaggattcagagaagggaaaggtgacccgttcagttcccaacatgtcaaaattgaagtgcccaaacaaatagagatactcagttacacagcacatagtaggaactttataaatacctgttgaatgaatatggttggggtctaggctgcagctcagcagggatggcagcccaaggtgacaaagtacgagtcttcacacacgaggatggacagcgtggagctcttgggttcagaagacgctccttggccaggtgcagtggctcacacctgtaatcccagcactttaggaggccgaggtgggaggattgcttgagcccaggagcttaagaccagtcttgggcaacatggaataaaccctacgtctacaaaaaatacaaaaaaattatctgggtgtggtggcatgcgcctgtagtcccagctactcaag

SEQ ID NO: 2784 - DNA, 3383 bp, Homo sapiens
gccccctcctctgcccacctcacaaggcttaatgatgttctttgtgcttgctgcccatagttcccgtgcatgtgtggaatgcttcattcaaaaaccatgatgctggatggaagctacagtgagtctgaggccaacagcctggctgggtaccccagaagccatatcctgacagaagaagaaagtgttttcctaggggctccaaggctgttcctagaagagggcatagacatcgagggggcctggccagtcattgacagacggacttgttgaccacacgcccctcaccaaacaatgcagcagctactggaccaccctgagcagcactcatctctcagagaagcccaggagccttccagctgccctgaccccagaccccgtggggctgctccatgttcatgctgtctcgcgtcacacttcacatctctctgggaccttctgttcttgtgtgtgaactaattcacaagaactcccctcctataaacaaggattcaaatgcctcctagacattcttagaccctcagattgcctaggagtcagttgtggagggaaaaggaaaaactgaagtacaagcttaggggcattctggataggagataggaaattaagaacaaaaaacaccctgtaaacccattgaacttgattaagtgcctacctagaagggaaaagagctgagatcccagacaggaaatgatttggcctgtgggagtatggcaacccacaggattctgcaatattagaggagattattcatttatccatccattcaaccattcattaaatattgaggtcccactctgtgccaggtacggtagaaatgagaaaatagtctctttccttagagatcttctctaagttgtgctcattctacatatggcatgatgtacttctgctctttcccctccttcaaccccgcttaccccacagacccattctgtttgctgttgcttttactcttaggcatataaggcagggtccaggagaggccaggtccagaactttcaactatcctcctccagtgaagttacacagatagcactaattttgcccagcaatgacatgtagcaatgtgcatggagtattgccagccagagaaacttacccaggctcaccacggtgtacagtttttttattggggtcggtcatggatttatagctgattgcccacatggctgactttagtcttttgcccctccagaggttaagctggtaccttgaggtccagggcacctatcataaatcacattgttggcatagactatctggtgtggcccaaggccccagtagacaaagacccttctatctcacaggacattccaagggcatagaggttgcttcctagtaaaggttagtcctttactacacagcaactcttgtcaattccctattgttaatgttaattgcggtgttactattatatattcaggcaataaacattttaaagtatctctgcactaggtacattggggtccaaattaagaataagagtagtcgaagctctcagagaaggaactagtaaaggaaataccacacaaatatctataatataagattaagagtgtttagtgcctcagtaatagttcagtgtgagatgggaattccaagggaggaaaaacagtcccaccagggagacagacctcatggagaaagcagccctgagatgccccttgaaggtcaggattttaagaagaagaaatggagcagaatgcatcctagatctgggctgtctcatatggtagccactagccacatgtctatttaaatttaaattagtaaaaattaaaaatattagccaggtgtggtggtgtgtgcctggggttctagctactcaggaggctgaggcgggaggattgcttgagcccaggaattccaggctgccgtgagctgtgatcaagccactgcagtccagcctgagtgacagagcgagaccctatctctaaaataataattattattatttaaattagttgaagttaaataaaattgaaaactcagttccttggttacaccatccacactcaagtgggcttagtaagcacagttgctagtagctactgcactgggctgggcagcctaaagaccaggaagctctaccagccaagagaccagcttgagcggacgcatggggagaatgggaaggtttgccattgcagagaacagggtttgtgggcaagtcattcattttggcaggatcctaggctgtgataagaggaggtgagcgactagctttttccacaacactagggatcaaggcaggtccccaccatgccggtgcttatgaggacagcttccccactatggagttgctggacccaagactactagatttcccagtctcacagaccaatgaagaacaaaaatgcataaatatgggtaattgggtggtacagggcatctggacttgtttagaaacctttttttcttttctgagacagagtttcactcttgttgctcaggctggagtgcaatggcttgatcttggctcaccacaacctctgcctcccgggttcaagcaattctcctgcctcagccctggagtagctgggattacaggcatgcgccaccatgcctggctaacttttgtattttttagtagagatggggtttctccatgttagtcagcctggtcttgaactcctgacctcaggtgatccgcctgcctcagcctcccaaagtgctgtgattacaggcgtgagccaccacacccggccagaaaccttttatctatagagactctcccaggccacagtgctgctcgaagaatgataattctattgtcattaaatatatcatattgctttgcttgtaagtcttatttaattccaacccttctctgcttctgactgcattgttttcatgcattatggctcatataacatagttgcctgttcacaaattaaaacaaatatttatttttgctagcttctatgttaaactggagttaattctatagcagacatatttagaatcataaacagtgttttatcatgcagggccatgatacaatgacaccattgtatttagcattgccttattacagtatactagtctgacactacttgagaaaagtaggaaatttaaagaggtaaagtggagacaacattggtaggagtagaaaacaggaactaaggaaatagtgagaacatgggatgattcaccctggaggcaggaagacagagaagcaaacacaattgttatcaggaatgcatgaatgatactttacttcactgaatctaagacatggtgaaatgtaagatgcacccatattttatgtactgagaaaaaatactaacaatcaaattctggaatgccaatgattataatatgaatcctgatttcaccaatatgaaactgtgaaaaaatgttaatgttacaataaaagaaat

SEQ ID NO: 2785 - DNA, 3525 bp, Homo sapiens
agaactgcagatagtacagcttccacaggagcaagggatgtctgagcacaagtggctgagttccgagtgactttatgaagcactttctaccttcctctccggcatgaaaacagggattctgcacctgcatcatggacagtctggcaaaagcctctgctctgcctccggggacaagaaactagagcaaataaccgttttgaaattagatcctggcaaaattaccaacaatcaatgatggaaactgaagggagattgatttaaatcttcaatgacagttgtacagaagttgaagaaacacgtcatctttccaaagaagagtgagtagcttggttggtggtaccctaaaattagggcatgattaaggtacgtcatttcttttagttcaatcaaagtgctttgctgtttccatttcagagaatttcttattctttttttcaatttctctctcttcctcttcttcctctcattagtagatgtcttttataattgatgtcatttactgtcctttcatcaaatgtatgccacatcacttaggcgaaccagcagacagggcaccaaaatacacattagaggagactggcttccatgagacgcttcgactgtctcatcggggcacttgtaataagcatcttggtgccactgaatgcaatgctgtattcaaataatagctttcatcttcactctttttaaatataaaagtaaaccttgaagccctttgaaggacctaaccaaacaacatacctatgaaaatagatcagtaaggctttgagaaacattcttaagtaaaatctgtaaagcatctttgcattttttttcaagaaagacctccaggtaaatgatggcttttaataagacacatgacaatctcaattacaagaatcattagtgtgtgtcctgtgcgccattttatgttcccagcaggatatatcttttctcgtctagggtttccagggctgtctactgttctctatgtgtaaaacgtatttaagtgttcccccaatgctgcactaatgttgaaacaaaacaaaacaaaaacgaagaaacctttgtcaagtggtcagacagactggaactagaggattataggtaagagagataaaatgaagggttgaaagctataatttctatttatgtggtggcaaccaaatcagctgttggagtcaggcaatttaaagatgtggctactggagctcagagtctgggaagaagacacttctgcgtctgacagtgaatcaggctcccagttttgaagatgtgctgtaggtagttctcgctgaatccatttcccagttggtttctattccccgccccattcctgtgtccccacactttccacttgattttacctctttgacaattctatattttactttccttcctctcattccccttttcccaccccctttttttactgtagttcttggcctctgactactgttccatgctggatgtccccagaaaatagagtatgtttagaaaggagacagtgcatctcagaagggcctccccagtccactagtccattttttaatgtgttgtgctctatgggtgtcaggaatatttgtagatgaagtaatttgtggcatgaattttgatagaagcaggatcaccaacaaaatgataaatgtaggtacctgtctaccttgcataatattcactatgatcttgagaatttcaatgtataatttgtctttattcttatttttcattagaattaacagaatctcagagctggtagaaagtatagaaactgtatatacaactctcatattcagatgaagaaaatgatgcacaaaaaatcaactgtcctaagccattcagcttgtctataagtgctgttggcttaattatagttttgcatatatttaggcaaagaaaatactttctcagaaactggttaggactgtttgagaagaaatataatcatcaaaatatatacacagtaaaatgtaaccgtccatcattcaacataggcaagaatatatattgaattgcctgagtgtattattcgtatagcaaaacttacttgaatttctaataaatcttctgacctctgtatatgtataaaatatataaaccaaccaaattctgtacataaatatatttttggataccagtacaatccctatttcacttttgtgtattccagttatttattactcacagttctgtagttttaaccagaacaaagggattacccagaagaaaagaagacccagcattgttcactgaggatagatgtgggatcagttcctttcaggtattaattgtaatgttgctaaacatattaccatgaatctgtagtatcaaaattcagatattaaacttgggaggatttatagtccaacttgtagtaactaaataataaaatggtggcatgattatagttcaatttttttctttatgaagagcttagggtaacaatgctttgttcctgtatgttgcacttttaaattacagtaaagtgtttccctgaaaacaaataatatggcatgcaataaaggggaaaagtggatatgagaacttatccttgccagtatatttgaaatgtgactaaacatttttacagtgaatatgttcatattgaaaagaaattacaatttcctttaaccaagtactgggtcactatttcttccaacttagttattgaagaaacactcagctaccatagatttgctaggccgaagtttctcaaactttagctgtgtcagcattacttggggggttaattggaatgcatattgctgggcttgatgatcagagtttctgagaacttgtgttcctaacaagttctccggcgatgcagtagtatagagaggcattgttctggagacatgcttaattttaggtacaacttattttgacttgagaactttctctttattaaaatagcaaaggcggtgtagatgaaaataaataaattgtattcatttgggttttctcatttgcaacagaccacatcagcattaccactggaaagaatgacttaggagagtggttgttttaatgagagattctttacatgccattgaaagacaggaaaccttaaaagaaaaacaaaactgataatcaactcctaaatggggatttgaattagctaaaatcttttttttttcaaatgcctactacaaagtcaaagttcattctcctagactagcaaatacttttttatcaatatttgtttatattttcccataattatccttatttcacctgccacaaaagaattaatcattttatgtcctcagtcttcagccctccctaaagtacccaatagctcttgtccttctataagtcatcacctacgtgtactttaagaccccgctaattcaataattttatttaaacgttgataggattctattaaatttaaggtatattattaattaaactagaggacatctgctgtagtgaataaattatccatgatttaaaagcaaaattcaaaggtagacaaggccacctgcggccatagaggctgtgtaacttcagaaagaacacttatgagttaatgataggaatggc

SEQ ID NO: 2786 - DNA, 5802 bp, Homo sapiens
caaatgtctttagtcccaaatgtcttcctcgctacacaatgaaccagttcccctccagctcgccgccaacccaggacgcagcccggctcagagtgacccccagtgggcagtgaagatgagatcctctacatccttagggcagctcagagggccactcagcggccaagtccggccggggagggccgagggctctgtttgaggtcaccctggagaccggcctcagagtccagggagagtgcgcgggcggccgccggctgaatgaagcctgggacgcgggagccgcgccgcgcgcagtgtctgcagtgccggaggtctgggaggctccgggcgaagcctccctgctgcaggttatgatgatgtcagacaatgctaaaggcagagcagctcattcatggaagaaaagagggagtatttcttctctaagtaatcatgaattttggcgaaaggaaattcatgggcgcatcaaagattctatgagtactgtgtcttatatggaagaacccagtcagcgtgatgatatctctcgccttacagttcagatggaaaacacctatcagttgggtgtgttcttttatctctcactcctattttaaacttctaaattggtgactgattctcttaaaaatgatatttgataacctggcattgtcttcaattctagcacaatataagggactttaatgaattgagtgatttgatgttgctttagtttcttcctcagcaaaaaggtaacaacacttgctgtcttacttttctttactaatgtttcccaaatgccaaacaattcactgggtggcactgatgcatacagtatactactgacttaacaaattcactgagtatttctgggtacatagatatgacttaaatgaaagagataagtattgatattttatccaacaaaaccaatcagtgttgttaggtgaaggaaaaaaaaaaactcaaagcaaaggcaaatgactcatagtcccctgttgacagagacgtttatccattaccactgaggttttgagtctttgaaaacaaagatctttgcacctgccgctatactcccaggtggagtccgtggcaaatatcttttcccatccatgtttcctcatagacccacttgttttctctaaaagcgtacctgcccactattacctgaattcatacataattactgctatatggaaattccacagagatttaccaaggggcaaagaaagactctatgggccaaggtgattccatctgtggccagttaaccccaagaaaattatagaccatcagcctgtcccctctggccttgtagccagttttctacaggagtccccaagactacatggattacacggctccataattagccaatctactggtattttcacagtgcctgtggtggacagctaatattcctgccatccaatatacttttatacttctctggtaacctcactaaatttcctttgaaattccaccaacatcaccacttttgatcctagcattctaatgaagctggcactggctttatagatagagcagtgactgattctaggatggcatataaccatggtgaatccaatcaaagactttgagattaaattcagaaaatgttgtttggcctgttgcagaagaacataaagccctgaaacttgaaggaatgtaggggctctggcaggatctgccaccttgccctgacttgaaactgagagaaaacaacagaatcctggtgtcatcatttgagtcctaaatccaattggctaccctttaacttttcagttaggcaagctaagtttgggtcaggttttccctcacttgcaactaaaagttcttagccatggggtgtctatgactttgaactgtgcatgctggaagggtttgaatcagatttgaacaagacagggccagtgaaatgtgaatctctgtgtttctacataaggatattttttgcaacttgttttctcaaataaagcatcttatcagttttagaagtactgagtatgaaccacattagaaaagtaattttagaaaaagcttagtatagatgaaatatacctgtattttcctacaatagtctatgtgaattttttaataattaaaatattttatgcttgacaattccctttttatagcattcaaccagccattttattaatacttaatcaaaactgtgtttccacttctacttgtttctgggtttatttcacatatgaaaggtattttgtgagtgtattagtccgtttttgcattgctataaagaaatacctgagactgtaatttataaagaaaacaggtttatttggctcatggttctagagactatacaggaaacgtggtgccaacatctgcttctggtaagacctcagtaagcttttaggcatggcagaagggaaggagagttggcatgtcacatggcaagagagggaacaagagaggtgccaggctgttttaaacacccagctctcatgtgaactaatagaggaagaactatagagcaagaactcagtaattaccgctgggacagcaccaagccattcatgagggatccaccttcctggccccaacacctcccaccaggccccacctccaacactggggatcacatttcaatatgagatttgaaggggacaaatatccaaactatatcagtgggactttggtaaatagtttatcatatctttacaatgtaatactggccagaaaagtagagggaaatatcagccaatcaccagcactattatgtttaattaatttttcattccattcaataatgtttgcctcatctaaacacatcttaaatgagagcatttacataaataattacagctacaaaaaatgagatgaaacatgagtatcattcatgagaggagaaaagggaatagaaaaggaaagtgtgtttcttttaataaaataccatttatatatttctcattaattactaaaacaaatataaaagaaaatgcaggctgtggcatctgtcgtatctgaatttgaatactaattttgctaattccttgagcaaggtatttagcatcattgaatctcagtgtcttcacttgtaaatagggataatagtctatacatcacatggatgctatgagactcaaatgatgttatatgtttaaatctctccattcatcatgttactactcctgaaagtgactgactcaaggaccttactatagatcactaagaataaaagccttccatgatattcattgtaacttcatattaattatggaataagttttccacaggactttttctggaactgagtatagtggcacctggttgtttgcaaacatggactgcgagcaccgagccaaactagattggcggccatctttgctaccacatcaagacagcctgccttgagaatgaagccagcacagtagaaagtagatccaaaatattgagagagaaagagagagattatttgagttcagcttccatgaagtgctcaggccctgtctctatgtcaggttttcttagagcctgtcaatctctcagcattgattttacaccaccacatggggtccttcctaatcccacaggcctcactgtctccagacttacgtcctctttcatcttgctgccttctcagcaaggtaaatccccaattcttccttcagcatgcaataactacaataacagcaataacactaataagatcacatatctaaggagtgttttattgtgtgacaagcactgttctaaacatattcaatttattgtctcatttaattctaacaaaaaaaaatgtagtaattattattattaccccaatgtggggtagtggaggcccacatacattaagtaaacttatctttatctactttttaaggacaagttttgtttgtttttaaaattttttttgtcttgatccttcaggtctttgccttttgatttctaaaacacgttttttctcctaaggaaaaaaaaaatctcgagaaagaagaaaagctttgccattcacatcagtttactctgaaactagttttaggagcttatttcagaagtcagaaactgaacattgatggatgattctggatgtttaggggaaaggtaacaaagaagtaagaaaagaatacttcattaccatatttcaaagtattttcaaaacaggatctggttaatgactttttttttaatctaagcgaagtatggaaaggacattggtagcactgtacaacgggaactactggaaacagactcaagtgccaccaggaccctctttccagcactaacctatgtgcactttcttctcttttggtggcctggcctccttaccaccatgaaaaacatgtcctccagcaggtcctcagagtcacatggtaacttttgccaccagaaagaggctgactcttttttcctacttgcagtttaaaataaaaattccaaaaaaagactctcattgtcctggcctagagcattgtcaccctgggttaatcaaccatgccctaggcttgggttcgcaggagatgatggggagatctttaagaaccactttctagattcaatctccacccccacccttccacgatttaagtggaattcaacaatttctatattatcatcaaaataaaaataacgatttatagaacctcaagaggctcacctaactgaactgcagtcagaggctgtaaccttctggttaagttcagccagtgggaaacctcagctgagaggcagagggagtgagaagtgtgaggtggagctgtttatttccctggctcctgcctgtgagttcatcacagcctggttacattcttcaaccaaaggacagaaactgctcccaagggagccctctccacatgacccttctgggatctattaaaagctcttcctctattccccaatcttggggtgggaggggtgggctgacaaccttactttcactggctgaggggtgctgcactatcccttgtgattttctacagcccactcagaacttcctcctggaattattttaactatagggtgccatatgtttcatttgaccctgacagatacagtcatcacaaacaaacacttattactagatattgacatatattaaaagagaattgaatagaattcttgatctcattccttcatctttatcaattcaacaaataatgactgggcttctgtatgccaggccctgggcacatgttcatgtcatgcaatgacattagtatatgaccaaagtgatgatatggctaatattcctgggatgcaggaggaagaagattcatttgaagcttctcctctgaacgtggatgaaatgtggtcgagaatataagctctagcatcagataaacctgggtgtgcaccccagctctgcctctctgtgtgattctgggcaggttactcaatgtatataaatctctgtttccccacctgccaaatggagataacagtgagattcacctcagagatctattggaagactatataaggtaatatgaagtgcttatcgcactgcctgacatgtagcaacggcttaataaaaagtattcattattatatatgtatacaatatacagtcatatatcatatataatgattatctataaaatttaattctatttaaattcagaaatcatacattaaaaatttcttatgcctttagcattgtattagactctgaggaggataaaatccgagcttgcttaccatttcactggaaacgcaggtcctcccaaacattttcctgtggtcaccgtcaatcatattttgaaagatgtagtaaccagctatctacaagtagaagaatatgaaccagagctctgtagacagatgactaaaaccatttctgaggtacgtgtgtgatttgcc

SEQ ID NO: 2787 - DNA, 15929 bp, Homo sapiens
agggtggctaatctgatggtgagatcctgaaaaaagagaataaatgttttcatcctgctttctttaacccatgaaggtgcaggaagagattgacttcattctccatagaaggcctagctggctctgtggcacaatggaaagtgcattgtctataggaggccttgtgtacatacacatgtgcactcacacatgggggagagcctataatctttgctgacaacagcatgcagtgtataaatctctgtagctcagacccagaacctgaaaaatttagacctaacattactttggcccagtaagaatgttagctggaaattagtttatagcccaggagctattttttaaagatctgtaggcttactagccatgacaatgatgacaataatgatgatgaaaatgacatcatcattaccaatagctactgccatctattgatcccataacatgtgatcatatctctgtcctcagaacaatccatttcacagatgaagaaacagactcagtgagcacgtgatcacttctcacaactaatggagccaagattctgtccttatggctccagagacctcttttttttcccactgtaccacaacactcaccaggactggagtgccacctatgacctcattgcataatggatggcttgtcctcaaatgggcccgggtccaaaaaagccccaggctcagccagagcagggcagaggacagatgacggaggacagatggcctgctgcagtgaggaactactctctcttctgagagcttcagagacctgcagagacatagggactaccagctgcagagagaagtaactttctcgagggcctcctttctggtgagagcagcagatgtcaggatgatgaccaatagcagagaggagctaccctctccagggcctcctctctgcttgagagctgagcactcaatgggaagatctgcttacagagaagatgatctgcctacagagaggagctatgcactaagggtttcctctgagctgttctaacacttagtaaagctttctttgtcttgttcacccttcacttgtttgcatacctcattcttctagaggcaagacaggaactaaggcaaagatgccaccagccacagaggtttctggccagaaaatcaataccccaaagatcctgtaacagtgcaagaaggagaaaagtgttctatagttttatatctcagtcttttagtgagcctgtgtctctaaactgtgaacttcaaacagagcttctcgacccccccaacactccccttaggcaggacaagatggctagaatgaactgaagttgagtatttctcttcccctatgtagaaggctaaggcatgctggagcatgctatttcctttcttccaggttggttaggctctgataaaatcccaatagtttaggctctgataaaatagtttctcctgaggccaggcctttttgactagaagagaatgatctgacttacttcaaatagttcctcctccctctcctcaccagaagaacaagatcttttttttttttttctgatattcactgtgagaacctagttgaactcctgaaaccagaactcacaaaagtgggaggccctcctttgaatgggtccccctggactgtttaactctcatacttatttactgtgaatgcccagcaattcatcaattacagttcaggtttttctaccccatactggttcccacaaaggtttctgctcaagggtttctgctgcagtaatttgtgattctaagtattttcttgtcagtctttccaatttaaggggcagtaaacctcacttctctgatggatctaagagttgttaattaatcagtttgttcagccttttatttgttgttaggatgtagtgacaacttccaagctccttacgtactggattgcaaaccagaagtcaaactattccttagaaatgaaggggaagtaaagtcattttcagatgacaggatactaaaagaatatgtcaccagaagacttgcccttaaggaatgactaaagcaagtgctcagaacagaaaggaaataataacaaaagacttcaggacctcaggaagaaagaaagaaaagtggatatgaccataaaatgtaatcaattatttaaacaaaagtaataacaatgtagcgtgatgttaacatgtatgtaagtaaaatgaatgacaacaataatataaaggtcagaaggggagaaatggaagtatcctgttgtaagtttcttatgctatacgcgaactggtataatatcatttgaaggtaggctataataagttaaagatgtgttctgttaatcctaagaaatatgaaaataacacaataacaaagagttacagcaaataagacaacaaaagagataaagttggatcataaaaataatcaatttgaaaaaagtcagggaaaaacagaaaaaagagcaaaaacatatgggataaattgagaaaaacagtgagatgacaggaattaaacctaactatatgaataattacattaaatgtaaatggcctaaacaacaccagtaaaaggcaatttgtcaaattagattttttaaaatgctaatccaactatgtgctttttaccaacacaaaaaggcactttaaatgtaaagacataactatgttaaagaaaaaggatgggaaaaagatacaatgtaaagactaacaaagaatctagagtggctatattaatataaaagtggatttcaagcaaagaatattatcaagcataaagaagaacatttaaaaatgttaaagggatcaacttgtcaagagaccataataatcctaaatgtttatgcacctaataacagagctccaaagtacataaaacagaaatcaataaaactataaggagaaattaacaaatacagatataaattagatattttaatacctctctctcaataattgatagaatgagtaaagaaaaagatcaccaaggatatagatgacttgaacaacactactaataaaatatacctacttggcatttatagaacacgtcatgcagaaatagcagaatacacattgtttacaagggcacgtgaaacatttttcaagatatattctatattctgagccataaacaatgcataatacatttaaaaggattcaagtcaaacaaagtatgttttcggagcaatctgtaattaaaatagaattctttagcagaaatctatctggaaaattcccaaaggtttggaaacaaagtaatgtgtttgtcaataaccaggggtaaaataagaaatcaaaaggaaaattagaaaatatcttgaaaaataatcaaatgagaacacaatatatcaacaatagtggaatgccacttcagcaatatgtagaaggaaatatacagcactggatttctactttagaaaaaagaaaacatctcaagccaatgacctcatcttccactttaaaaattagaaaagaagagcaaattaagccaaagtaagcattaaaagggaaataataaagatcagaatgaaaaatcaataaaatagcagacagaaaaaaatagaaaaaatcaataaaaccaaaagctagttctttgaatagatcaataaaatttaaaaacctctaggtgtattgatttaaaaaattacttaagacacaaattcatcaatattaggatttataaaggtgggatcactcagattctacagatattaaaaggataataaggaagtattgtaaacttttatgcctataaattttaaaacttagataaaatggataaattcctggcaaggcacaatctaccagagcccactcaaaaagaaagaaagaacccagacaatcctctatttacggaataaattgaatgtttagtttaaaatgtatgcatgaagaaaattcccggttgacatggcttcactagtgaactctaccaaacattaagagaaggaaaaataacaatccttacaaacgttttctgaaaattgaagagatgagaataattccaaattattttatgagcctattattgctctgattttaaagtgaaacaaagaaaactatagatgaataactaactctcatgaacataaatgcaacatttctaaagaaatttagcaaatctaatccaacaatatgtaaaaaggataaaacatggtgaacaagaagggtttatcccgggaatacattgattgggttttgatgttcaaaacccaatcaatgtaaatcactattaactacaaaataaaagcaatatgatcatctaaatagatgtagaaaaaaaatctgaaaaaaacccaacacccattcctgattaaaaactattagaaaactaggaatagaaaagcattttctcaaccaattgaacaattgaagggtagctatgaaaaacctacagctaatatcatatttcatgataaaagatggagttttcttactctaaattcaagaatcagggaaaagtgtctgctctcaccactctatttaacagtgctggaaatattagccagcaaaacagataaagaaaaataaataaatggcatagactggaaagattcatagttggcacaattatgtatatataaaatcctcaggaatgtacactttacatactagaatttaaaagtaagtttagcaactgtgttagttcgttttcatgctgctgataaagacatacctgagactggacaatttacaaaagaaaggtttattggacctatagttccacatgtctggggaggcctcacaatcatggcggcaggcaaggaggggcaagtcacatcttatgtggatggcaacaggcaaagagagagcttgtgcagggaaactcctgtttttaaaaccaccagatctcatgacacccattcactgtcaggagaacagcatgggaaagacccacccccatgattcaattgtctcccacaaggcccctcccataccacatgggaattatgggagctacaagatgagatttgggtggggacacagagccaaaccacatcagcaacatgtcagaacacagaaaaaatgtaaaatatcactgtatttctatgtactagtagtgaactgtcagatgttaaaattcaattgcttagaatggcatcaaaaatatgaaatactggccaggcgttatggctcttgcctgtactcccattgctttggaaggctgaggcgggtggatacctttgaggccaggagttcaagaccatcctgagcaacagggcaaaaccttgtctctactaaaaatacaaaaaattagctgggcatggtggcctgtacctataatcccagctacttgggaggctgagacacaacaatcacttgaacctgggatgcagaggttgcagggagctgagattgaaccactgtactccagcctggggaacaaactgagactctgtctcaaaaaaaaagaaagaaatacttatgggtaaatctgacaaaataagtgtaagacctgtacactaaaaactacaaaacattgctgaaataaattaaagaagacctaaataatcggagagatatactttgtttaaaggtcagaagtctcagtattgctaaaatgagaactcttcccaatgcagtgctaatcaaatttctagcaggctttttgtagaaattgaaaagcagatttgaaattcatatggaagtgcgaacaaaaccaaaagagccaatataactttaaaaaagagaaaagatgaagttctaaaactatctgctttcaagatttattataaagctacaagtgatcaaaatattctagtactagcagcaagatagaggaaaagatcaatgaaccaaatagaaagtccagaaatagacacactcaaaaatatggacaactgattttggacaatattgcaaaagcaattcaatgaagaaaggatagccttttcaacaaacagtactggaagagttagattcctgtatgcagaaacagacaaaaacaatgaacttggatgcaaacgtgcattatataaaaagaagtgattcaaatggattgcagatctcaatgtaaaatctaaaactataaacctttagaagaaaacataaaagaaaatcttcatgaccttgggttaggcagagtttttaggtatgacaccaaacacacagtccataaaaaataaattgataaattagactttatcaaaatttaaaattttcattctttgaaagatactctgaagagattgaaaaaataagccacagattgggagaaaatgtttgccaagaatacacatctgataatgcacttatatccagaatatatgaagaattcttaaaactcaataataagaaaatagccccattaaaaataaaataggcaaaggatttcaacagacatttccccaaagaagatatatggatggtaataagcacatgagaagatgtcagcatcattagggaagttcaaattaaaaccaccatgtgataccactacatgtattttagaattgctaaaattaagaagactgaccatatggggtgaggatatggaggaaatgaaattctcatacaatgctattggtaatgtaaaatcaaactaccactttggaaaacagattaaagtttcgtgaaaagttaaacatgcacctaccacatgtcccagcctctcagttctaccagaaaagaaagcagatatccatacagagatttgtacaccaatgttcatggtacatttattggtaaatagccccaaactggagacaactcaaaagttcatcaacagatgaatggataaacaaattgtgatatatccatacaatggactattactcagtaaaaaagaaaaaaaagaaaataatagtaatggataatcacaacatgcataaatctcaaaaataattatattaagtaaaacaaaccagtcaaaaaagaccatatactctttattccattttaataaaactatagaaaatgaaaatctttggtgatataaaacaaactagtagtgaggaagagaggcttgggagggaaattataaattacatgaagcaacttttgggagtgatagaaatatttactatattgattgttatgatggtttcatggatatatacatatgcaaaaacatatctacacttcaaatatgtggaatttttgtaggttatttatacagcaataagcctgctcaaaaaagtaaatcgagcaatggagggtaccaagattttacttgcatatgactgttctctatctagcctgcaaacaggtgcacacaaaatctgcaactttaactggagcttgccaggcaacacctctgcaacattatgcaaatcactgtgagaaagagacaataattatgtcaaaaaccaccaaaatatgtttgtttccacacactttttttaaaattcccagatctgggctgtctacagtatgtgcctgccagttaacctaacttggggcttttcactttggtttaaagaatctgaaattgagctctgctcaagttaagtgcatgtggtgattcatgtgcatggaaagtaccttgggctgaccacaaactagagttccctacaactacatcaatgtcaaaactaaccactgtctcctagcttgtttgtttaaaaaaaaaaatcccatggtcttcaatttggtcatttaaaaataatctacaaggtatactgtttttctgttcttgttatttcctaacttttaaggtttctatttttccaccctgtagatcttgttctcactagagaataatttctacattatgcccaggttcttctgagctatgaaggggcccagatttaagggctatttttgacaccctaaatgtgctgagacaagtcattaaggtggtcctgccaggacacagccatctaaagcagcaatctgcttcttgccagaaaatctcgtgcctctgcagagccttttccagaatgaaccacaccatgctgaggtagggtagaaggggcagtacaccaataggcctgggtattctagaacaataggcctagaacttctcatcagctcctgtttcttttcatctctaggaaaggagaaagagactacctactgcatttctgtcactcgctgaaaaggacactctgtcagaaaatcttctagcaaacttcaaagggcaaaatcaccccttgttactgataaagcccagagagcttcagcagctaacattccctggacagggcacagcaaggatttgaacctaggtcagtctggccagaacacccacaagctttccttaactcagtgtgctatctccccacgactaggtcactactgctttataatcacctttgtagccaccagtggattttgctcatcagtatttttcaggcaattgatactttagatattcagctgcaagacgtatgcagttttcattgacatcttttggagaaactgacaaacctggacttgacttaatgcctttggaaccttccaagatgttatataactctagatagaaggctgggcctccatgatgtcaggaatgttgcattcttatttccccatagataaacccatttgtccacaaagtcaaggagtcaggcagaggcccttgccatggggctttttaggataaagcaacaagcctggactttgctctacaacagggttttgcatagggagtggtatgaccagatccctcaagaaagaaagcttagagaccaggccagagtccactgcagtagcccagtcaagagaggatggtgacttggacttgtagtagagccagttagaatgaaagaaattgacacattcagaaatggttttagagatagagtcaaactggacctgataaagaactagagaagcggagtgaggataaagagaagagccatgactgactcggaagattttgtcttgaaaaacttgagaactcaagacagagtgaaataaaatcacatgtgggaaaaatctcctgctttgttttggactactttgaagtgaaatgcctgttaagcctaagtggggtaggtcatggcgtacatgactgtgggctcaggatggatacaggcattcaggagttgtgagcaaatagaacttaaagccatgagagaagaagggatcaccaagagagacagtgtggcatagagaagaaaaggggtggaagacgatccctgggcagaaaagtccttagagcagaggcaacaggcatgaccaagaagactaagaaagaacattcagtacagcaggaggagagcaaaaaatgtgtggtattctagaagcaaagagaataaagggcttcaggaaggagcagtcaagtgtgtcaaataagataaagacagacaagtcccctggattgggtaggaataaaataacaacagactgccatacaaatggttctatctacaccatctaaaagaatatagtttattctccatacatttaagaaacacctgccatatgccaggtatcctttcaagcactgaaatgcagattcataaaacatggtctctgctctcaaggagctcacagtggtaaggaggaaacaggcaatagcgagtgttctcattgcattcgtgaccccattgatcttgcaacagccccatgcatcagttattgccattataccattttaccgataaggaaactgtggcagggaggggtcaagcaccttgggtatttgacagcaaaaccaaggcttggtggtatcataaaacttccaagtagtaattcacaaaggtgactgggaaatggaagtgaccagaaatctttgcactatgaggacaagttcatgaccctgatacattcttgtccaggtagtatagctccagaccaaatgtctgcggccacccacccaaaaacttgttggataaaaatgactacacctatagtcaaatgatttttgacaaaggtgccaaacagttagataggaaaaagaaagttattttcaataaatgttgctggagcaaccagatatccatatggaaaaaaaatcttgaccacctacctcacaccaaacactaatattaacttgagatggatcataaacctaagtctgaaaactaatagtaaagttcttgagaagagaacatgggagaatgtcttcatgatgttcaggtaggcaaagatattttaagacacaaaaaagcaataagcataaaatttgtaaagaggtgactggggctttatcaaaattaaaatttatgtgtattaaaagacatcatgaataaagggaaaagggcagccacagactgggagaaactctttactatacatatacctaactgaggctcatatccagattatatgaagaactccttcatactgatacctagggtcttgattgcatgccccgaaatcagttgattcttcccttttgaaatgcattcccacaaggatccagcctttgggaagccatgcaagtagaggcagaagttgtttcagcttcggaaagggccactctgctgaggagtgtccttgaccggcagagagaagatgttcctgcagccatgctgattccagggggatatagaatttggggcctgggaatgtttaaaaatgaaagccagttaatagttttatttttcttttaacatgacagacaggagaacaaccagcaggactccaggcttaccctgacatttttgtcaagtatatgcgggttctccagagagccagaatcaaaagatgtgtgtatatacagccatgtgttgcataacaacaaagatacattctgtgaaatgtgtccttaggcaatttcatcgttgtgcaaacatcatagggtgtatttgcacacacctagatggcatagcctaccacacacctggactatgtggtatagcttgtcactcctaggctttgtacagcatgctactatactgaatactgtaggcaattataacacaatggtaggtatatatgtctatgtagacatatctaacatagaaaaggtacagtaacaatacagtataaaaagtgaaaattgcacacttatatagggcacttccaatcaatggagcttgtagaactggaagttgctctgggcgagtccgtgagcaactaagacattacactgtgcgcttaggctacactaaatttctaaaaatattttttaaaatatataagttagccttagcttactgtaacttttttacttcataaactttaaacttctttttaacattttgactcttttgtaataacacttagcttaaaacaaaatcacactgtaaagctctacgaaaatattgtctttctctatatccctattctataagcttttttctatttagaaattttttatttttaaattttaaacctttttgttgaaaactaagacataaacacacattagcataggcctacacagggtcaggatcatcagtatcagtatcttccgcctccacatctcgtcccactggagggtcttcagggatgataacatgcacggagctgtcatctcctatgatagcaacgcctttttctggaacaccgcctgaaggacctgactgaggatcttcttgaggaggtgtcactcttttcagaaatatgtccatagcatcttgcttagttgtttctttttttcatcacagatttgtttgtaaacagataatgcaccacgaacattcctctctattaataaaaacctttcagtgtcgggggtcactttcaaactttttaaagaaaaagttgaggtctgcaaaagcttctgccaaatgcttcactgtgaattttctcaggggttcttcttttcttctcctgcagtttcttttctcttgcctctcttcagctatggattctggttccagttcctacaactcattagtcagtttctcaggaaccgttgtttgctgtctcaaccacagccttgttgagtaatatgctgtcctgtgatattgtgatggctatgaaatcactaggtgataggaattttattatattataataatatattatatattataattataatatataatttatatatagaatatataatatattatgctattataatctcatgagaccaccatcagatatgtgatcctttattgaccaaaacattgttatgcagtgtgtgactgtatatataggtatatgaagaaatttatattaaggaatcggttcacatgattatggaggctgacaagtccaaaatctgcagggtgggctggcaacctggagacccaggaagagtcaatgttgcagttcaagtctgaaggccataggctgcagaatcccctcttgcttaatcttctgttttattcagtctttcaactgattggatgaggcccatcctcattatgagggtgatctgctttactcaaagcccatccatttcaatgtaaaaatctcatccaaaaacacctacagaaacatctggaataatgtttggccacatgtctagacactgtagcccagccaaagtgacgcttaaaatgaaccatcacaccaattgtgctattgacctgtacccactgaggtgagacatgatcagagactgggcaattttcacagtttggacacagctatgagcaacatagcagtgattcagcaagctcacaatagctttaccaggcagcaaattgaagcagattacagctactaggaaagacgcttctcattttgtgagatgtgctcccgtggctgaaagattgtgtgaattaggtagattgagggaagggccaattgatttagagtactgcaatcaagacaactggatagcctagtgatgccagctcagaaaaagaatagtaaagtatagtgaaaacaaaaattcaatttaacctggttctagcagaacaccagcaaataaggaaaacaaacaaacaaacaaacaaacaaacaaaaaacagctgcagagaaaactcaagaagccccatagagagggtactttgggatctgatgcatgcttgctgatggtgcccatccatcctgtctctgctggacgcctaacagtgttcctcacctgcactgtaggtgtccaatgcatgctaagtaaaagtgatattaagagctgcgtgccaaatttcatttcacattatatctcagaatttcttttagtttttctggaaatgtaactactataatggaccttacaaatgcacaaatggggccgggtgctgtggctcatgcctgtaatcccagcattttgggaggccgaggtgggtggatcacttgaagtcagaagtttgagaccagcctggccaacatgaagaaactgtgtctctactaaaactacaaaaattagccggacttggtggtaggcacctgtaatcccagctactcaggatgctgaagcaggagaatcacttgaacctgggaggcagaggctgaggtgagctgagatcacaccaatgcactccagcccaggcaacagagagactctgtctcaaaaaaaaaaaaaaaaaaagcacaaatggtattctgtatctgaaaattgtttggattaacttttgattcttgcctggttaaagaattacaattcttacctcagatcatgcttaaactatcttatttcttctcatcacaataaaataaattagtgtcatttttatacttgattgcctcaaggatattttaacacaattttgtttcttatcttttgtaccactcatttgaaaacttatggtcttaatgcaaataatctgaaagtaataaaagtataactcctagtaatttccatattgctgcctgtagaaaagttataaacatcccaatttattctggcaagaaaaaaatttttagtaagcaaaagccttgactgaccaagtgcttcacaaaagaggatatctaaatggccaataagcacatgaaaatgttctcaaaccattatttatcaaggaaatgcaaattaaaaccacaacaagataccataacacacccacttaagtgtctaaagagactgaccataccaaatgttggcaagtagacaaagcaattggagctctcactgctggtagaaatgcaaaatgatacagtaacattggacaaatgtttgggattttctagcaaaattaaacattcacctctcagatcacccaggaattctactcctaggtttttctcaaggagaagttaagtgcaaatatccatcaaaatgctcataaattttatttgtaatagctaaaaacaagacacaactcaaatacctattaaatgtttatctagacacaatccaaatgtaatacagtcatgctctgcacaatcatggtcccatgaaattataatggaaggaaaaattcctatcacccaagtgcacactgtttataaagtccacagcggtgtacaataacatcctaggctttcacattcactcaccactcactcactgactcaccagagcaacttccagtcctgcaagctccattcatggtaagtgccctgtacaggcgtgccatttttatcttttataccatatttttaccataccttttttaatttttaggtatgtttggatacatgaatatttaccattgtgttacaattgccaacagtattcagtacaataacatgcagcaaacgtttgtagcctaggagcaataggccttacagcctgggtatgcagtaggctgcaaagtgtagaattgtgtaagtacactctatgatgttcacacaacacaaaattacctaatgacgcatttctcagaatgtatccttgtgactgtcactgtctagacatacatacaatgaaaaactactcagcaatgaaaaagaataaactgctgacacacaaacttggatgaatctcaaaaacattctggatgaaagaaactactcaaaaagaatgtttactgtatgattccatttttatgtttaagaacaggtaaaattaacctgtgatgacagacatcagagtcatggttactcctgaggagaggggtttactagatgggacaggaggggactctctccttctctagggtggcagaaatgctctggatcctggagtgggtgatggttgcatggggtcatacataaataaaacttgctttttacatatagattttattctatgtaatttatatctcaatttttaaactgcagaacaaaataaagatggagagcagggagctgtgctttttccattttactcccaggtgccagaaaggagcacttctggaggggctgaggctacaggaggttagagaacttctgcaggtccagagacagcttagaaccaagctctggctggtcttccctccagcagctgggaggagggcctctctccacttgacagagcagcccagccccaacttggcagcctgcaagtgaaaacagcttctctgtagaaagtactagaacatccaccccctttcacagtgcggctggcttcctccatcagtctctacaggtgtcagaaggcattgatagcaccctaaccacagccccggggactctccatgcccagtcataattcaacggcaccagggtgacccctcagtggagaggcaggctttctttgagactgtgaacattgaaccaggaccacttgcccctgacggtctttccaggcagactgggagacagtggcattgggaccattctttcttgggctactctgggccagacatctaatcaaatgctctctttcccatccactgattccataagccccagagtgagtcaggtttctcaccccaagtggaggggccactcacgctagggggctatgttcctgcgttcagatccctcctttcttcctctgtcctctcccccatctcttcagctgtactttctcctgtgctcactttattctctagattaatttcttgcctcatccttacactcttgagttcagaataacttctgaacttctctctcccagggttcacaccagttgcccaaagaggactgtaattgggccactccaggaccaatcactgtggcaggggcacagactctctgattggccaaccaggtgatgggatcacccttggctgacagtcccactccctgcagccagggaagagcagagtcaaaaagaaagcaaagccacgcatgcagagaggttaccagtgtccatccagacgcccacttcacagacaggtagccaagcgccagagcc

SEQ ID NO: 2788 - DNA, 2217 bp, Homo sapiens
gagcccaggactgaggtaggggttacttcgggctgaggggattagcaaaggcttgtgaagtggctaaagccgtgacctggatatttcaggactcaaatccacccgcattggaattctctgggtgactgcccagcccctttggcaggacagccagccacaggccctgattgtgcaggacttcctgcctctgcaaaggcagtcgggggctgagcagggttctacccggctgggtccaggcagaagtttttcctccccacctccgggtttgtcctcatcatcggtcactcccattcacagctttaagattctggaggccaagaatttgactccccccggatccatggtctgtggataccaatgttccgactggagacggggagcccgcgagacccgggtctccagggtctgcccaaggaagttgctcatgggagcagacctctagagcaggatttgaggccaggccaaagagaaccccagagatgaaaggcctcctcccactggcttggttcctggcttgtagtgtgcctgctgtgcaaggaggcttgctggacctaaaatcaatgatcgagaaggtgacagggaagaacgccctgacaaactacggcttctacggctgttactgcggctggggcggccgaggaacccccaaggatggcaccgattgagcccgggcccttctgccatgtgaacctctgtgcctgtgaccggaagctcgtctactgcctcaagagaaacctacggagctacaacccacagtaccaatactttcccaacatcctctgctcctaggcctccccagcgagctcctcccagaccaagacttttgttctgtttttctacaacacagagtactgactctgcctggttcctgagagaggctcctaagtcacagacctcagtctttctcgaagcttggcggacccccagggccacactgtaccctccagcgagtcccaggagagtgactctggtcataggacttggtagggtcccagggtccctaggcctccacttctgagggcagcccctctggtgccaagagctctcctccaactcagggttggctgtgtctcttttcttctctgaagacagcgtcctggctccagttggaacactttcctgagatgcacttacttctcagcttctgcgatcagattatcatcaccaccaccctccagagaatttttacgcaagaagagccaaattgactctctaaatctggtgtatgggtattaaataaaattcattctcaaggctaataaaaaccacattggcattttcctctgctgtgggggatcgctggtgcctctttctctgccactggggcaataaacccaaagatgtctacattatctccgaaacagaagggaagattagtaaatgcagggttttctgggatgagcttcaggctttctcttgggctaattttcttacaccttggggtcctctccagtattgggtctcattcttcctcgatggggtcagggaaagataactggtgattatgccagcttcagcttccaggccagagagggtggcattcaaatcccagtgctggcttcttcagctgtgtggtcttggacccgttactgaacctctttgactttcagtctctttgagaaataaactgtcttgttccttgcaatgtaaaatgagacttctaaagcccaccttgatgctgatatggagaatgctgaggttctaggatttcacacagcaggaatttttttttaataggtgtcagctgtggggtttattttttacaaagtaaggacattaaaaaaaccaacccgtctatcaattcataaaagaaaggatgttctgataccaagactgaaagaagaaaggatgtattccaaaacaaaggaacatccttccaagaaaggacctatggcttctttattccgacataccccaaaataactgcatgataaataggtctatatttaaaaagctctagtgtcgaatgttttcaaaataaaatttaattttatgagattaccctgaatgcaccagtgctttagaaaagtttgatttagactcggtgtctatatttgacaatgccacacagggagggacttaaatgctgaatttgctcatgaaatatttaaaatcaaagccatttcccagatccaattttgaatgggtatgtgggggaaattgaagtcttcactctaatcccattttccttcaattgtgatattctggatgacagag

SEQ ID NO: 2789 - DNA, 9496 bp, Homo sapiens
ctgacctcaggtgatccacccacctccgcctcccaaagtgctgggattagaggcgtgagtcaccgtgcctggcccgttagagagttttaaacagttctccagggcgttttcctctgactaaagtcaccctgtgatcttaccatctgttaagtgacatggaatccctgtgctgagagacacactggggaagagatgtccccaaatgaccgacctgggattccagattagctggcctctaagccaggggcatggttcacccagcccaaaggatctcgtcttaggaatagctctggatgcccacttctgtcacctgagagatttttgtgtgaggaatctctgatcccagaaagcagcacagtttgcagttgtaagagcaattctgtctacactgacccagacatccctttccccaatctgggaccttctgagaccagcaggatgagaagcagtgttggcccagatgctaggggtgggtcaggtgtgacagtgaatggctggcaagcatcccaacagctggaaacagctgcaacttctgaatggcagggaaacttaatttggtgatgtcagtttctctgggcagttggatgaagacttgaacccgtattgtcaggagtttcaaaggtgaccaagcaaaatgaacacgtattccttactctctcttctacactcaccatgtactatatgtgaggcccgtctaaactctagggatcagctgggagccagacagaaagagtattccccttttaaaggatgccacattccagtgctggagctggacaggacacctggacagggtaattgcatgtcctggtcagtgctggagttatgtaatacacagcacatacccagggtcttgcaaactccagttggtcctagagttggacagcacatgtgtgatcccaggggactgaactctggtaattattcaaggcagatgtagcacactatgatcacagggtcagtgcacactgtggccagggctgcagtaaacaacccaaacccattgttcgtgtgcatgaaacaacacaaacccactgcgtcttttgagatgcaaaattggtaatgatgttttcatgaagtttggtttatcagtgagttattttatggatcttatttttggtatcttactcaagaaatctttgcctaatctaagcatgcaatgactttctcctttgttttcttctagtgtttctacaagttttacttcttcaatttagatctgttactaagattaactttgagttaatctaattgcatggtgtgaggtaatgttctcaattcatctttttgcatgtggatgttgggttgttctagagacactattgaggccaggtgcagtgggcctgtaatcccagcactttgggaggccaaggtgcgcagatcacttgaggtcaggaggtcaagaccagcctggccaacatggtggaacccagtctctaccaaaaatacaaaaattagctgggtgtggtggtgcacgcctgtagtcccagctactctggaggctgaggcagaagaatcccttgaacctgggaggtggagggtacagtgagctgagatcacaccactgcactccagcctgggcaacagagcaagactcagtctcaattaaaaataaataaataaataaataaaaataaaaaaagaaaatattgaaatgaaaatgtctcctaatctcattgcatggtccagtttccccctttaccctcttttcttctgatttccatcattctacatggttgcaattgtggtgcctttgctataatgctcttggtgattgtggggacactgtaagcatttcatgaggttacagggcctttgtaattttccatggaaggctgcagatactgggagacaggagctcaggtggggaggacctgggccctcaggtcaggtcccctaagggcacctcagtgccctcttctgcctggctgtgtgatctggtgcatgttcctattcttctgaagcatcaacttcccatggggaaactgggggtaatgcctcccttccagaggtgacttcatagtcaatcagaagattttaggaaagagaggcctgctttgattccattgttttcagagctctttttgtttgaggccctatggtttgttttcagggtttgttcttaaaatgaatgttgcaaagaagccctttgcttctttttatcaggttttggagtctgaccgcctgagttagaatcctggtctgtcactgttgcggctggtgacttgacttctctggggtttcctttctgactttctaaatggggctgatgtcagcacttctcacggtggtgggggacggggtgcaccgtgaggatgaagtgggatcctgccggttacctggcttgtggaggagagtatttcagacagtgggcatgacatgtgcaaaggtcctgggccagaagggccaggcgtggtggatcacacctctaatcccagaactttgggaggctgaggagggtggatcatttgaggtcaggagtttgagatcatcctggccaacatggcaaaaccctgcctctactaaaaagacaaaaattagccggccgtggtggcaggcacctataatcccagctacttgggaggctaaggcacgagaatcccttgaacccgggaggtggaggttgtagtgagccgagatcatgccactgcactccagcctgggggacagagcaacactctgtctccaggaaaagaaaaaaaaaaaaaggtcctggggcagaaggaagtagctgagtcaacaggctggaggccggaatagagagagtaagaggggttgtgcaatgctgaaaaatccagtgaggccagattcttacccagcatggggacttcacaggtgaaagagccaatccatggactcaagaactgatgggggggcacagactcctagagcatcaatgccagccaggtgtggtcagcaaaaggcaggagtctgctgcgaggagagccctgacctagctgtggtggcagcgagaccaggggtctggggtgagaacttcacctcggatctcctttcctgcaggggttacttgattgcagctccctctgtttttcgcgcgggcgtggaggaagtcatcagcgtgaccatctttaactctccaagggaagtcacggtccaggctcagctggtggcccagggtgagccggtggtgcagagccagggagccatcctggataaagggacaatcaaactcaaggtaagccgttgatttttaaaatcataaacctgaccttggaaataaagaattgaattgggccaggcgtggtggctcacacatgtaatcccagcactttggaaggccgaggtgggtggatcacctgaggtcaggagttcgagatcagcctgggcaacatggtgaaaccgcatctctactaaaaatacaaaattagccaggcgtggtggcacatgcctgtaatcccagctactcgggaggctgaggcaggagaatcgcttgaacctgggaggcggaggatgctgtgagccgagattgcaccattgcactccagcctgggcaacaagagtaaatctccgtctcaccaaaaaaaaaaaaaaaaagaaaagaaaaaaaaaaaagaattgaattgggatggaataagagaaattgcatgtgttgtgagaaaaatcatttttaaaaaagagatgtaaaaaatgaataatgaggctgggtgccatgctcacatctgtaatcccagcactttgcgaggctgaggtgggttgatctctggagcccaggaattcaaggccagcctggaaaacatggtaaaatcctgtctctacaaaaaaaaaaaatacaaaaattatccattagctaggcatggtggttcacgcctgttctcacaaccacttgggaggctgaggtaggaggatcgcttgagactgggaggttgaggctgcagtgaactatgatcgcaccactgcactccagcctgggcaacagagtgaggccctatttaaaaaaaaatgagagaataatgaaatttagaaaaggagaaatccaccgataatccagttttcatacttttcactttttcatgttttccacacattcttgttcatgcacatacattttcttttcatagtttcagttaaaggacacacaccactggccgggcgcagtggctcatgcctgtaatcctagcactctgggaggccgaggagggtggatcacctgaggtcaggaatttgagaccagcctggtcaacatggcaaaaccccatctctactaaaaatacaaaagttaactgggcatggtggcgcacacctgtaatcccagctactcgggggctgaggcaggagaattgcctcaacccatgggacggaggttgcagtgagccaagatctcaccacttcactccagcctgggcaacagagtgaaactccgtctcaaaaaacaaaacaaaacaaaacataacaaaagaaaacaaaacaccgtggtgtttcctagtccctcttatcacactgttgtaaacaacttccatgtttccaagtctctgtaattggaatttccatttcattgtaagcagcatcctattgcacccctcttaaatatcagtttgctaagcccccagctagattttttctagattgtttcagtggttttttttttcttttttttttttgagatgaagtctcactctgtctcccaggctggagtgcaatggtacaatctcagctcactgcaacctctgaccctggtttcaagcgattctcgtgccccagcctcccaagtagctgggacctcaggcatgcaccatcaagactggctaattttgtgtgtgtgtgtgtgtgtgtgtgtgtgtgtgtgtgtgtatttttagtagagatggggttttaccatgttggccagactggtctgaaactcctgacctcaagtgatccacccaccttggcctcccaaagtgctgagattacaggcatgagccaccctgcctgggctgttttcagtgttttgatactgtaatccttaagtcgccagaatgtttgtatgtaaagccatattagcattctggatgccttctttaggctaaacagccaaattgaagaattaccagcaggacccaagcctctcactgggtcttgctgtgtcctggaatacacagcagtacctgttcatggaaccacctgcagtacattagggatcagatttctccactgcctctcagacattgaatattgttatttttaaattattatatgtaccaaactatgtaaataattttatgacatgggttttcaaactggagtccttggatttcagatattatgtaagccctggaattgcggcatttggggggttagctattccttaacttttaccacatgctcaaaggagtctacgaatgaatgggctaaattgagaattattttaaattataaggcgcccatctccattgatcagaatggaggctgagatagttccttttgtatgaggtataccactagtgcctatttgctgcaggacagtggtcttcctgccttactttttttttttttttttaagcagtcttgctttttctcccaggctggagtgcagtgatgcaatcttggctcactgcaacctccgcttcctgggttcaagtgattctcctgcctcagcctccccagtagctgggattacaggtgtgcaccaccgtgcccagctaatttttttgtatttttaatagagatggggtttcatcatgttggccaggctggtctcaaactcctgacctcagttgatctgcccacctcagccctcccaaagtgttgggattacaggcgtgagccacagcacctggcccctccattacatttgatgatagaaccctttctctaaggcagcagttctcactcaagggggcttttgccctacagggcacatttcgtaaagtttggagacatttttggttgtcacagctgggttggggctgggcggtgccaggtgctactggcatctggtgggtggaggccacagctgcaactcaacatcttacaatgcgcaggatcccttacagcaaagaaggatgtggccccagaagtccacattcaggaaaccctgaaccaaaaccctagagcagcagtccccaacctttttggcaccagggaccagtttcatggaagacagttttttccacggaccagggagcagaagaaatggtttcaggatgattcaagggcattccatttattgtgtgctttatttctattattattacactgtaatatataacgaaataatgatataactcaccataactgaagaaacagtgcaagccctgagcttgttttccttcaactagatggtcccacctgggggtgatgtgagacagtaacagatcatcaggcattagattgtcataaagagcatgcaatctagacccctcccatgcacagttcacaatagggttcacactcctatgagaatctaatgccaccactgatctgatgggaggcggagcttaggcagtaatgtgagtgatggggagcggctgtaaatacagatgaaggttcatttgctcacccactgctcacctcctgctgtgtagccccattcctaacaggccattgactggtaccagtctgtggcccaggggttgagggtccctgccctagggcttcaatgcctacagaagcataaggaaaaaagaaaaaaaaaaaaagaccctagaactccctttcctggcttcctgtgattggatttcttttcctccctcctcccttccttcctctctctctctcctgcctttcctttgtgtgattagatttttctctctctttctctctttttggagacagagtcttgctctgtcgcccagggtggagtgcagtggcacgatctcagctcactgcaacctctgcctcctgggttcaagtgattttcctgcctcagcctcctgagtagctgggactgcagacgcccccaccatgcccagctaatttttgtattttcaatagaggtggggtttcaccatgttggctactgtggtctcaaactcctgacctcaagtgatccacctgcctcagcctcccaaagtgctggcattacaggtgtgagccactgcacccagcctagatctgctttcttatgagtcaggaagccatttccctggagcaggtgttaagatgatgtgcagtccctggccaccacacgttagaagacactcttcacagcacagatgctgggaatttgtaagagagactaacaaagggttgtataattctgggagaggggccaagggctcttaagactagacttgagattcccaagaaagatgcttaagatccttagcatttggccaggcacagtgactggtgcctgtaatcctagctacttgggaggctgaaactggaggatcgcttgaggccaggagttggagaccagcctgggcaacatagttgagagcctgtcccctgtctctacaaactgaaaataaaaaattagccgggcatggtggcctgcacctgtagtcccagccactcagtaggccaaggtaggaggattgcttgagtccaggagatcgaggttgcagtgagacgtgatcgcaccacagcactctagtctgggcaacagagcaagagcctgtctttaaacacggaaagaaggctggaggtccttcttgccttctctccctgtgggaggcatcctcttccctgggaaggtgtgaagctctaggggctgccgtttggggtcggccccctttatgtgctcagcatagtctcttgcccgccagcctccctgtccctccagcatacggtcctcagcacctccggtatctccctcctgcccatccttgccctgctcttgggtggccgggacctttcctccctcttcagcctctggccagtgttgagatatttccagaaacagggccaggtgaggattttgggattggagtagtgggtgaggtttattgctttggttggtcttgacggggaaactgcagtcagaagagacctcacaggtccagaaggctggtcctgcgggtggcaggtaggagaggtccctctgaggctgttcagagcagacaggaggtgggtggctggagagagggctgggacggaccccgtgtggcttcagagagcgggggtcctagtgcaccccgacctcacccacacaatggtcatgacagtgcagaactgtgatgatcagtcagataatctggtagattgttccccgtgatggtcaccagggtccatccaccccttgagggaccacatgagtagatgctgacataggggtcctcagaagaggaacaccccacagttggatagttttatttttacattttttttattttttattttttgagatggagtctcactctgtcacctaggctggagtgcagctgtaccatctcagctcactgcaacctctgccttctgggttcaagcgattctgctgcctcagcctcctgagtcgctgggactataggcgcctgccatcacacctggctaatttttgtattttcagtagagacggggcttcgccatgttggccaggctggtcccgaactcctgacctcaggtgatctgcccacctcagcctcccaaagtgctgggatgacaggcgtgagccactgtgcccagccatttgggtggttttaggaacaggtgggtgcacatagctccccaggtgatctgcttggaggtaatgtccacctgctgggtgcccagggatggctgagagggtaactatcatcaaataccggtcacatagagggaggtaatatggtttggttgtgtccccacctaaatctcatcttgaattgtagctcccataatttccacacgttgtgggagggacccagagggagataattgaatcatggggtggtttcccccatactgttctcatggtaatgaataagtctcacaagagctgatgattttataaggggaaacccctttttgcttggctctcattctctcttgcctgccaccatgtaagacgtgcctttcacctttcgccatgattgtgagacctccccagccacgtgaaactgtgagtccattaaacctctttttctttataaattacccagtctcgggtatgtctttatcaccagtgtgaaaacagactaatacaggaggcattacttttgtttgttttaagcatgaaaggagcttttatagtgcatgactcacatgccagggcgttctgcccatctgcttaaaaaaaaataagaggacggccaggtgccatggctcacacctgtaatcccagcactttgggaggctgagtcgggaggatcacatgagcccaggagtttgagcccagcctgggcaacatagtgagaccccatctctaccaaaaaataaaataaaataaattagctgggcatggtggtgcatgcctgcagtcctggcttctcagtaggctgaggcaggaggatcgcatgagcccaggagtttgaggctgtagtgagctctgatcgcaccattggactccagtctggcgacagagcaagatattgtctctaaaaacaaaagaaagaaagagaaagagaaagaaagaaag

SEQ ID NO: 2790 - DNA, 4097 bp, Homo sapiens
ctttgttttctgtcctgcctctgccgcccacagcttgaattcggagtgatttaccactgcacagaggagcggctgtacacgggccggcggggtcggggcgccttctgcaatggccagcggctccgggtctccggggagacagatctctcaaaggccttggttctgacagaaattggccccaaacgtgaccctgcgaccctgaagctgttcctgagtaacatggagcggctgctgcatgccaaggcgcatgggtaggaggttcagttcggggaacaccctgcagcccgaggaggaagaacggaacacggacttgctaaaactcccctgggatttgaggaggaagcctgacgtggaaagagtgggaggggcacatgaacatcagactcagggaagccctgtgaggggcccgcctgcagtagatactcctatagccaggcctctggagatgcgtgggcacctgtgttgcttctgatcagaatccatggaactgacctcatgctgctcaaccagcgaatggtgcaaatacttacagtccttcccgagggggcctggcgtcagacaggtttatcaaagcccagtgaatcctctttgtctcttgccttcccagtagggctgtgctgtgagccctagccatgtgagaccactgacacttaatgtcacgttcagtagaggaggattcaattctctggttgctgcatctcaggtgctcagtagctaggtcagctgggagctgtcatggcacaaggcatttgcgtctggcggaggcctgttggttggtggctccaggccctatattcagcctccagagctttggcagaagtgctgtgcttcatttttcactagggaaaatgcccagccggggtacctggctgaagtcggcttgcacaccacagaaaaggctccactcccgcctgcatctgtcctcccttccctctccccagggtccgagtgattggaagctccacattggcactctgccacctggcctcaggggccgcggatgcctattaccagtttggcctgcactgctgggatctggcggctgccacagtcatcatcagagaagcaggcggcatcgtgatagacacttcgggtggacccctcgacctcatggcttgcagagtggttgcggccagcacccgggagatggcgatgctcatagctcaggccttacagacgattaactatgggcgggatgatgagaagtgactgcggctgaggcaaagctgctcccaaggcctccctgggctgctgtgggctcctggggaggtggccctcgtggcccacgctccatgccagtggctcacgctctgctcctggctaccccagagggagttgtcacgctacagtgagtggctggccttttaaatcgacgtctctctcaccaggatttggtgtttagctgtttctctctttaatctcacgtagcctttttcaggttagtacgtgttcttctgtcagggccaaaactcaaatctcctgtgaaatacgtattgataatccaatcttgatttttccccccagaatataaatctcaggtaataaggctttagaactgctgataaagcggatcgttctcaggccctccccccggagtacttcagaatgcaataaatcaaaataatggccctgtgtgtatctgtttcctctataagcatgtcgcctgattcccaaacaactctgtggctctcatccactgctgtggatctatgctctcaggaagctttgcgaatgaaacccaaagtccatgcgaatgaaacccaaagtccatgcgaatgaaacccaaagtccagtgtgtgccagctgctgcctctgatgaataccctgaaggcgaccccagtaatatcatgtgagtgttcagaagccaagacatgggacagacagaaggaaactaatctctgaaagctgttgtttctgtgatcagcttttttgtttttgtttgagttggggtcttgctctgtctcccagcctggagtgcagtggtgtgatcacagctcactgtagccttgacctcaggactcaagtgatcttcctgccttagccttctgagttgggaccacaggcatgcactagcatgccaggctaatttttaaaaattttttggtagagatggggtctcactgtgttgcccaggctggtctcaaactcctggactcaagtgatcctctcacctcagccttccaaagtgctgggattgaatcaccacacctggccaatctgtgatcagtttaaagaggagaaactgggccttacttgtttctctttaggaggcggaatggtatgtaagaataattctaatgaggctattaactggctggccagacatctttcctgaagtttaagaatgagaaagtcttggctgggtgcggtggctcatgcctgtaattccagcactttggggagccgaggcaggtggatcacttgaggccaggagtttgagaccagcctggacaacataatgaaaccctatctctactaaaaatacaaaaattagctgggtatggtggcgcatgcctgtaattccagctacttgtgaggctgaggcccgagaatcatttgaacccgggaggtggaggttgcagtgagctgagatcgcacccctgcactccagcctgggcgacaggagactctgtctcaaaaaaaaaaagaagaaagattaactgaatttaaaaaataacatattcccagaggttcactgtagggtgagcactgtgtcctgccacgtttggaatcgttttgtctttgaagaagtggagcctctcccagggctggctcggtgcccttgtctttccagcaacagcgttagttatagtcatctttgagactggcttttctttcatctctggagagagcttgattcgtcatcttattgctttgtctgaactaattttgtttagtagagcttttcaataaatagtttggattttttaaatgagtttaaaatatgctcatgtttctccaaattgctgattattcctttaggccttcgttagcccatcttaattttctcagaatctactcaaaacagatctgagtatttatacagatgtgcaagaaatttcttacattctcatggattttgagatgtagtgcttattagtcaaataatatctggaagttttcttcaacaaaataactctcgcagcacgttgagaggctgaggcaggattgaggccaggcattccagatcagcctgggcagcatagcaagaccccatctctacaaaaaaaaacccaaaactagatggatgtggtgcacagctacttggaaggttgaagtgggaggatcctttgagcccaggagtttgaggttacagtgagctatgattgcaccactgcatttccagcctaagccacagaatgagaccctgtctctataataaaagtttttaattagccaggtgtggtggtgcgtgcctgtagtcctagctgcttgggaggctcaggcaggaggatggctggaacccaggaggtcgaggctgcagtgagccattattgttccactgcactccagcctgggtgacagagcgagaccctgtctcaacaaacaaaacaaacaaaaaaacaaaaagaaagaactgctcccctccccaacctcaggaaaggccctcccagcccttgggtcaggacagcaggaggccctgagggagcttgagctgactcctgcttctgcttctgcttctgctctgtccggagtctcaggctgcctttagcaagtattccgcatgagcgtcatccctgcggcttcaggagaagcagagtgaaccttggagaaaagagaggcacccaaggtggggacctgcgggcttgcctcattcatccctggacaagcctcccagaaacgaaatgggctgctcacctctgtgatcctcagagttagcaaaactgcttgctatgtcatttagacctcttacaaaatgatattcatctatcactggtgatgacattcattctgaattccactcataggcttcaggatacttgccctcatttttttttcccttcatttcaacagttttcactgagtgtcttgtggacatgagtcatcaaatgttttgctgcctttatgatccaatcccaaataaaaagtaaaacatt

SEQ ID NO: 2791 - DNA, 52623 bp, Homo sapiens
tgtgcacatgtaccctaaaacttaaaatataataataaaaaaagaaaaaaaaaagaatgatcaaaagaaaaaaaaaagactgggcaatttataaaggaaagaagtttaattgactcacagttccatgtggctggggaggcctcatgatcatggcggaaggcaaatgaggagcaaagtcacatcttacgtggaggtgggcaggaaagcatgtgcaagggaactaccctttagaaaaccatcagatctcctgagacttattcactatcacaagaacagcatggggaagacccgcccccatgattcagttccctcccactggatccctctcatgacatgtgggaattatgggagctacataaaattcaagatgagatttgggtagggacacagccaaaccatatcacacataaagctatatttcaataattttctttcctccttaggcctccaagcaactttgaaggttgttttatacacgatcttgtgagtggcatttctaggaaagccccagtcattcttataagctccccctcttctcaccctgcatactagagccaaacttgagggaagctgctttgcctgggtgaggtttgggtttagtgccttcaatttccataagatgtgtattcttataagaagttctggctggatgcagtggctcacacctgtaatcacgacactttgggaggccaaggtgggaggatctcttgaagctaggagttcaagacctgcctacacaacatagcaaggccttggctctacaaaaaaccttttttttttttttttttttttttttttgagacgaagtcttgctctgtcgccaggctggagtgcagtggcgcaatcttggctcactgcaacctccgcctcccgggttcaagcgactccccctacctcagcctcccgagtacctggcactacaggctcatgccaccatgcccagctaattttttgcattttagtacagacgaggtttcacgatgttggccaggatattctcaatctcctgacctcgtgatctgccctcctcggcctcccaaagtgctgggattacaggcgtgagccaccatgcccagcctacaaaaaaagttaaaaaaaattagctgtgtgatgccatgtacctgtagtcccagatgctcaggaggctgaggcgggaggatggcttgagcccagaagatcaaagttgccatgtgccatgatggcgccacttcacttcagcctgggcaactgaacaagaccctgtacccctgcaacccaccccccaccacaagaaattcctactttcattcaaactaatttgtgcatttcttgcaaccaaacaaactttcactagaattacttggatattctgctactcctatgtgaaacagaaattataaactgtgccctggtattcaagagggatgtttggatgtgataagtacaacttgtcacagaagctgagcatacacatatgtgggcaggacacagttaaagagcagcaaggggcagccagcgaattgctgagggagataaataaagaacgctagtgcctagaatagatattttttttcctgctggaaaccaggtgtaattgtccattcatgagatcacagcaatgtgctttctaaaacctggaggaaaggctgctctcagtgcttagtaaaatccacatacagtgggtatgattgatgtctcccagagtaaagcaagaaactgcctgtaaacgaggacttgaagaatttgtgaacagctaaaatgccaacctgaatgcaatttgtcattagaaagaggaaatcaaatccttccttttccaaatcaaattgacacaagtcaaactgtgtcctttttggataaacagtagttaaacagaaaaagcagggtcaccttggagcattcaaagttggtagtgccaacctggcactgtctggatgagcgatgctactctggaaatcaccagctttctatgcctggagagtggctctgctgagacagggatagtgacctggatgaacacctctacaactctacaactgtccaccaccctcctttgctctaatgctacactcccatcactttttttttaagacagggtcttgctctgttgcccaggctggggtgcagtggtgtgatcatggctcattgaagcctcgacctcctgggcttaagctatccttccacctcagcctccagagtagctgagaccacaggcacatgccaccatgtccggctaactttctgattttttgtagagatggggtttcaccatgttgcccaggctggtctctaatttctagccccaagtgatccacctgcctcggcctcccaaagtgctgggattacaggcgtgagccactgtccctggccaatttgataatatatcttcttcagtattttgctcgttagaagacaatgtctcagaaaggagtaggggtattttagccactagaaagaaatatcctttactgaaaagtaacatattttctgtctggtttgtacatttcaatgagcttgaatggcaaaagttcagcattcctgttttcagccaactctggtgcactaataaagctaagtgtaagatcctggctggtagcctaccacaaatcaacttcacggttgctcctaagtcatctatattaccatagaagtttattttaaaaaccatctctccattgccataggaataatcttgggggccataatttctaaaggcatttacacaaactttgcagaaggtacttaagaaatgtgtttacattggaagcattcatatcttcagaatttccagcatttcacttgtgatagagcacacaggaacagaaatagaacgtgagaaataaggttgtgtattaggttgctagggctgccatcacaaaataccacagcctcagtggcttaaacaacaggcatttattttctcacagtttttgttgcaggaaggtcttgaattcagaggtttccaaacttttggctttcctgggccacattggaagaagaagaattatcttgggccacacataaaatacactaacgatagctgatgagctaaaaaaaaaaaaatctcaaaaaaatgtcctaatgttttaagaaagtttatcaatttgtgtttggccacattcaaagccatcctgggccacatgcagccagtgggctgtgggttggacaagcttgttgtagatcaaggtgccagcagggttggcttcctctgaggcttctatcctggattctgtagatggctacccttgatttacagatggctcgcctcttgctgcctcttcacatggtcttccctctgtgcatgcaggactcttcttcttctaaggatgccagtcatattgggtttgccccccttcctatttaaaaaacagatttacggggtacaagtgcaattttgttacatggatatactgtggagtggtgaagtctgggcttttagtgtaaccatcacctgaatagtgtacattgtatccattaggtaacttctcattcctcacctctctcccactttcccacttttggagtctccagtgtttgttattccactctgtaggtccatgtggacccattgtttagctcctgcttataaatgacaacatgtagtatttgactctctgtttctaagttttttcacttaatatagtggcctccatttccatccattttgctgtaaaagacatgatttcattcttttttatggctgagtcgtattcatataaatatatatacacacaccacattttctttatccagtcatccattaatagacacttaggctgattccatatctttgctattataaatggtgctatcataaacacatgagtgcagatatctttttaaacttttaaaagtttttaaattttcttcatgtcagacaggtaatattccaacattgccacaaggttcgagggtgacacatctcacacatgtacgtgaacaaccaatcatcatgctcatgaactacaaaaggatcagatcggaaagaaatacagcacttttgcatttccacaaatgacaacatctaagtcacaccaccacttcccagacggccttctgtgagtcagcctatgccaattcgtttgtttatgtgggcatcttacaaaggttgtggtatcgaagttctttttctctttcagttccttaacatacttatgtgattatttatagtttctttcttgctaatttttttgtgatgtaaaaattctaaacaggggtgtgtttaccaaccacctggttccagctctcagggcctttgctgcttcaacagagcctgcccttttgtctcccagtctccctctttcctcttctctctctccccatggtctcttccctcatgggttcatcgctcctaagataaaggagtccccagggttccagatgaagaaaaacaatctttccctagaacagtgtttccaaaccacgagacatgattctaggtgattttaggtgacacacagatgtgccattaaatgacattttgctacatactgaaaaagccatttccttttaattctcttctagtcctttagatttcatgaaagggaaagttttgatttagtactattatgcttttaatgcttctctaacactcaatcttcatttttaacaaagaaagagcagatctcagagtcagagtctccagcacacaagaatttcataacaaagtttagtttttacagtttttaatttttactaacattttcaatgtatgccagctgatatatcattttccatttacaataataaacaattgtgttccctttcaaaaataaatttctcattagtagtaataaacggaaatctcctaatgctaaatgacgagttaatgggtgcagcacaccagcattgcacatgtatacatatgtaactaacctgcacattgtgcacatgtaccctaaaacttaaagtataataataataataataataaaaaaaataacattccttgaattcaaaaagtaggtgacttgaagaagcaaataatagtacgggtagtacatgaatatgttaaaactgtgagggtggtacttagatggctaaagtttgtccattagttcaaagccattgagacgtaaaatgtggcagggaggcagataggtgctactcagaacaggctggtttctctaagcaaacataggagccatttattcctcttcttcttccaccgataccaccactgtcatcatcatcaccatggccatcaccagtccctcgatcatcacctccataactgccaccactatcatctacatacaactatgtactgtgttaacatcttaccaccttcatcaccatccctctgtccacactggtatagcccaggtctttaccaccacaggcctctgttactgcagcaacctcctgcctggggtctatacttccagtctttcttacttccagttcacctatacatacatacaaaccccctttcattccactagtttcttactgtagaactgacagtccttcctactgaattacttgatcaaatctaaattcttctacctacctttcacgactcccccttctctcctctttctctcctcttttctgttttctctctagaatgaccccccttctcatttaggttgccataattttcttgtgaatgtttttctatgccattaaatgtttctctaaaagcacaatttttaatagctctgaagtatgaatgttctacaatctatttaaccctttattattggatattttagttattttcattttctcactataatgaacaatgctgccatgaaaattcttgtatgtaaacgaggatcacaccttttatctctttcttacttcttcatcttgcaggaagccaaacaaataatcactgatcaagtaaagcttaagggaaaacaaggacattctgaaatgtccctttaaacaagaatcttgaattgttgaaaataaaaaatgtatttggatctgatgaccttgtttcattttctgagcaaagagaagtagaacagcagcaagatgacatggctttgccctttcagaagccaacagagatatttattacccaagtctcacaaatgctgaaattgtgattggaagcctttcagcttcctgcataaccccaggagcctcaggttgcaggtcaatggcctgatgaagtgacagcctctagccccaactatctgtacaccagtggagattagaagcatgtcctgggactggtttggagaaataagttatttttctttggtaggaaacaggggcaaggctggtgagaagacactgccctaaatatgatataatccagctgtccaaacatggacaactgagttcagccagtcatccattcccccaaatccagatgtttgccattacacaatctcagactatcttttcttctactgagtgtaacttgtactaattatgtttgtcagagtagcatttgtttttaattagaagacatctattttgaatcagctgggactccttagctgtatcacagagacacagcctatgttattaataatctttaaatcataactgccttttgctttgtggcaaattgttgaggttttcattccatctcagagttcaaatataagaaacatcgagactgcactaaaattggagtcgattattattaatagtatttgttaaaatgcaggtaattctattctatctaaacattctgcaaacacaaaattcccacgatggcagtgggcttttaatatttgcacatctttgtgtgtggaagtctccaactattatgtttcatagttagacctgctttcaaattccatcctaacatgtggtcttgctaaggtcacgaacaatgtctatgagcttaacttcctcatctgaaaattagaggattataaatgtcattgtaagaattaaatatcataaaatattttaaacacacagcagagtgcttaaaatgtagtctatgtgtaaatatatgctgattccttccattcctttaaaaatctatagacaggagtctgacttttctaaatggccatctggtcttacctccaggagactgaagcacattttccacgggtttagatgtagagctttagttcttccacctgagagacagttagcaagaaaagtaagggagaaatgctataggaacactcttgagtatgctggaagcaagtgaggactgttttgtaatctcactatgcttccttatgaaacacaattctagaccattctctgacctgatgttttgcttgctgagagcattctctgatgggaaacaccaagagagacacaaggcctgctgagataacagagagcctgttctccttcttgtccactgtcctgtcagtgcctactgccttccctgtcttctggttcttttccttcctctcttggctcttttcaggttctctgctttgctctgatctgctttgcatggctcctgctttcccctcaccatcaccaccttgcaccacctccttgcttcaacttccagtggttttgtctagtctatgagtccaacttaaggcagcatcaaggtgagacacacagcaaatatttgcaggacagaatatgagaggtccagcagtgggtatcgttctccagagcatgcctgaggactccccgagaccacccgaaggctggccaccacccagaagctggccctcacctggaggctggccctcacttgcaggccagccctcacctggagcctggcccttacccggaggctggggctcacctgcaggctgactctcacctggaggctgcccctcacccagaggctggccctcacctggaggctgaccctcacctggagggtcctcacctggaacctagacctcacctggatactggccctcacctggtttctggcctgcacaggtgcagcgtatcccccacttggtttcctgacccttctcaggccaggcagaagccaaacctagtctctgctttctctagtccctactggctctgctgtcatattctgttcctaagagctccaagcatgtatattcacatgaacagaaagtagcttgcaaaaacagttaacaggtactgaccctgtacaccaggtattctgccaactgccctacgtccattatgcactgagggtttgtgtttcctcaggactcatatgttgaagctctggtgcctagtgtggctatatttggaggtggggcttctgaggaagtaattaaggttaaatgaggccataaggaggaggattctgatccaacaggattagtgtccttataagaagagacagcaaagcgctcacacaccacgaaaagcaagcaggtggctatctgcaaacctaggccagaacactcaccaagcacccactctactgccaccttaagtttggaattccactctccagaactgtgagaaaataaatttctattgtttaagccatccagtcttttttttgttatgatattttttatggcatcctcagaagactaatacatgcactagttaatttaatctgctcaataatcacattaggtgttatgttatttccatttaaaagactgagaaaatggaggcacagggagggcaagtcatctacccccaaacacccaattattaaatggtaaaaggatttgaacccagataatctcagtcaagaacccaagttcttagcaactccagctttgcttgggcctataccatcaaaccaaaaaaaaatacaccctgcttaagttatggaggaagcaaacttctttcaaagtgtaaacgtggcaaagataattttgcaaaaaaaattgttttccattcagaagtattgaatttgacttaagacacaatgacagtgaaaatgaatgaattaatagtgggttaaatcatcggcatttatgtaatttttattgaactcaaaatctttttgatttacataattacatttaatattcactaattttcaatttcacaaatgtattttcaaattgtcattcattgctagtaagccttaaatcactctgccatgcagtctcggctgaaaagacacaggccctgctttgaggaggtcactcatggtgggaaaacaaacatgtacacaagggcatggcctgacacatttacacaataaatattttttcaaggctctaccatgggccaagtgctataagaatgatggtaagaggactaggagtttgcaagagtgtatgtgtgtgtgagtgtgtgtgtgagagagtatgtgtgtgagagtctggtgaacatgggtgtgagagggccctcagagagggaaaacagtgtgaaaagccttggaagtgtgaacagatcgaatgtgtgtgtatgtgagtgtgtgtgtgtaagagtgtgtgtgtgtctggtgggcatgggtgtgagaaggccctcagagagggaaaacgtgaaaaggcttggaagggtgaacagattgtgtgtgtgtgtgtgtgtgtctgaggtagtggaggtggtggggttgggtgtggatagaagaggacattcagtagaggaaaggacttgtgatgcatgatgaagaggttgaacaagattaattttttctattttattttttggtgtcttctctctcaatagaaaccaatattttacagaatgtgggactgaagttataagtgtaaaatcctgacagctagaaaattgtttttgtgctgtgcatttaaacttaagcaaggcttgcatatgtgagggcatgcacaatatctcagctccagtccttgtggctggctcagtgggaagatgctgagccaggtgcctagtgccagcctagagtgaggaggatacaaatatctatcaaagcaatatgagcacattgttttataaaaattatatacaaggggctgggtgcagtgactcacacctgtattctcagcactttgggaggcctaggcgggtggattacttgagcgcaggaatttgagatcagcctgggcaacatagtgagattctgtctctataaaaatacaaaaattagccaggcctggtggcatgtgcctgtagtcccagctactcaggaggctggggtgggagaatcacttaagcctgggaggttgaggctgcagtcagctgtgatagcaccactgcactccagcctgggtgacagagcaaaactctgtctcaagaaaaaaaaaaaaaaaaaaaagaaagaaagaaagaaaaagaaaaagaaagtaccatatacaaggacttggaacacaatgcatcagtctctggccaaaaatcttcccaagttcagcttgggaagaggagatgattatttgtaattcatttaatagtatctgttttgaattcttctcatggttcctccatgtcagtaagtatataactatactccttatcaattttagaaattatctactaatttcctgctctgacagatgagggattagctcacctgaagcagttcttctgccattcattcccaaatagttacaacattcttttttctttcctatgttggttacctttgaaactttaaatatttacatcagtatttcttgaattatcaaatacaggaattgtttctcaactttgctttttataagatgaaaatattagtctccttactcttactgcagggtttatctctcactttatcccctactttaccatttgtagttttccactaacatcatcatggcagaaatatttagattgctttctgtgtgcataatgaagatttgtttaggggttcagtctaactgtacaaagttagtaaatcacggttacattgttaagagtacatacagattgctcattacagggtcaaatagttcactttgattacatttttctaccatatgtaggtttgttttttttctgttgttttgattgccttgtctcccctgctttttgtgtttattgcctttttaagcctcacacatagtatcatatctctggaaacaaccttgccccttgttttccagtttcctgtgtcccaagtcatcctgacttttcgtttactctttcatttttccagatcacatcctcaagtatcttctgacaatgaatgtggaggaggtaaactttaaggatccttgcaaacctgacaataattttattatgtcactttactaatattttggtaacgtatagaattttaggttgcgaataattttctttcagttctttggaggcatttcttatttgtcttttagcctcagttgcagttaatgagaagccttttgcgtaattcttgtttatttgtaagcgaactctttcatctttctgaaagcattacaatttttcctttatctctaatgttctgacattccacaatgatgtgcctgggaattgtcatgtcaataactgctcagatgcaatgtagccttcaaacatacttcctggcagagaaagcatcagtgtacttcttcctgcacggctgacagaaaagacagactcgcagaccaaataaaaatgtggggatcacacagcttattaaatcaattaaaaatgtaatgcataaagacaaaagctaagggaaatcaattatgtaagttaacccttaagtaaggttgcaagcagggtagaagaaccacactactggtcctgggtacacaacctgtatgtgtctctctcttctctctccctctctctgccacatcagccttccccactgatggtagcttagtaggaccaaagttggatagtgtttaggccagggagcccagagatggaagccccccagggccatggcacagacttgccctgttggagagatgcagggcaggtatgtctggccatagctatagctagccaattagcctgcttagtagctgtgggtttcagtactgtttcttgagcagaggacatgtgaagccaaaatggtgttgctaatgggtagttggattaggcctctgaatactaaatacatcttgtcttatgtatattcagcaatttctgagtattcactgagcatggtgaatattcaatatatcatgactattttgtatccaggtgccttatgtatatttaatgcctcatgaatattaattatcttttggttcttccatcccttctatgtataacacagacatattccacttactacataatctgtacttaagatatcttaagtgtttcattcccatcccatttgttttcttttctccgatagcagaattgcatcttttcaaacaatgcaactggacattctggttattaatcttttttcatttatcctgatatatatatatatatatatatatatatatatatacacacacacacatatatatacccatatatatatatatggatagactttcactttgaatactcatgtcttatttcataaatgttcgtgcactctttctctgacaatttcttcccatcaatttttccttatttttgctttctagaacctatattagtagaaaggtcaatcaactaaattaatcatttctattgcttaccttttcactgctatctccctattcttcatcttcttgtaccactgtttggaaaaatttctcagctttctctttcagtttgtctattaactttctgaattctgtaaccacatttttaaaacagactttattttttgaacagttttagatttaccaaaacattgaaaagaccatacaaagagttcccatataccatgtaccccatttctcctattagtaacatcttacattagtaagtgacagtggtcacagttgataaacctatattatattgatacattattattaaccaaagctcatagcttatttagatgtccttagcttttaactactgttctttttcttgaccaggaccctatgcaagctaccacattacatgtaattgcattgtctcttcaggctcctcttgactatagcagtttctcagactttccttgcttttgatgacttgactgttttgaggaatactgatcagatattttgtaggatggcccactatttgaatttatctaatgtttttctcatgatattactgggtcagtgagttactgggaggaggatcacagtggtaaagtgccatttgcatcacgccatgtcaatagaacattctatcaacatgatttatgatgtttgatgttgaccttgatcacctggctgagactgtgtttgttaagtttctccacttcagagttacgcttttcttgctcttaccctttccacactgtactcttcggtaggaagtgactatgcacagtccacactcaaggaatgggaatttatgttccccaacttgagggtgaagcatctacataatttatctgaaattcttctccatgggagatttgtctcagtaaccacattttaaatttccaaaattccattcttgttctttgattgtctctttctcacagcatcctattcatacatgctgtatcttctctaatttttctgacaatatcattgtaggattttggcagcaaggacctctttggttctctaaatttctgtttccttgacagtttgcttctcttagtctttccctgacattacagtttgttttcaaatttctggagacccttgcttacttattcatattcatgtcaaaatcaataaacagcagggctcagagctctgcctaggggagtagagcttattggccaacgggcttcactttaggatgagtgggaagggagctgtcccttctgctggtagcccctcttaacatcagaatgcagtttattggagacattaacactcacactaactatcctggttaatcttagacagcatgtttggtctcattagagaataaccttcttcatgttagtggggttagggatgctgaatgcctggctgctggccattctgagcactggattggaggggttgctgtgggtcattttgttccacagactgaccattaaataacactccaattttatacctcactcctcactcttgttctccattgaaccacgtgcagtttccaagtctggagtgtccctgggactctagcaggtagaaccctaaagacactccagtctctctccacacagggcaatgggtctggatgtggcatgctccaccctgcttcagtggtcagtgctctttcatctgcttcctccctcctgggaacctgctgagcactctcctactctgattggccccctcctgtccttgctgttatttcttggcatcattttagtgagggagaggagagaagcattatgccatttgtcaccttgaacacggctctacttgttttaattataaaagtatggtgaattaattaaggtaggctaaataactgtaacaaattaaccctaaaacatataagatatagtagcagcttctttcatattagtgtaatggtccaaagtttctggcagtggcctccctcaatgcagggattcaggcacccagactctacctttcctgtgactttgccatttcccagtgtctcgctgctatctgcacctggccagcagaagaggagacagagcagggaggtgacatgcctactttttaaaagctttgggccagtggcatatagatcacatccgctcacactggactgctgagaaccagtcttgtacccacggttagactcaaggaggttggagacccagtccctgcctgggcagccacttgctagctgcacctgtgtgtgacgaaagggaggatggatctggttgtgcatttctctggtctcctttgccacacatgtatgggtcgaggatggggtgacaggctatggtaagaattgggcagaagacacttttctcagtgacaatagccagtcttaatcatagcagtcttaatcataccttcatccctgcatgtgccgtaaggctgtgccatgcttctcattgagctaccctagctgctttgaagggaagctgaaaggaaacaatgctcatttaataaatccatgtgtcaggcattgtgctaggagatttacatgcaaccccgacaacacacattttctttgagtcacaacaaaagctgttgctctctgtttatgaaatttatgctccctgtgggaaaggcatagtatgtggggatcattttaaagaagtaagttggcagaaaattatcattcacctactaagtgctagacatgatgccaggtcttaggaagacaaagatgggaaagactccatgcctaatttccagaagctcagatttctctaaaatgcaaacaaatcatcacaataaaatgtgataagtgctatcgtgggagacagaggagagggagaatcttctctgcctacaagggcagggaggttgggaagaggggttcagagaaggtgtcacaatggagatgtctagcatttgagtagggtcttaagagatagttaggatttttccaaagagaaaggggcagtgggatattcaggcagagggaccaacatacagaggtcaagagtcatggattttccaggcaagtaatgtggtgcctgatacaagggcatcccaggaaggtgaggcaggagtggtgatgtgatagtgaggaggaggatggtagcaatcgccagcccataatccacttcctgccagaacttgcagtctctggctgtctcccccttctgtccaatacattccagagtcagctgtcctcaccagcaattttagcttcctcagagaatggagtggacagcttacttgagaccagggcttctcaacctccttagcacaattgacatttggggccagataatgccttgtggtgggggctgtgttgtgcatgatagaagggttacagagtccctgcctctactcattagatgccagaagcacttcctaaggtgtgacaactaaaaatgtctccagacattgcccagtgtgccctggaaagcagaatggccctgcttgagaaccaccgttttagacaaatatcacctttctctcatctaccatagaataaagcatagtgttgatatggtttcgctgtgtccccatccaaatctcatcttgaattcccacatgttgtgggagggactgggtgggagataatcgaatcatggagacgggtctttcctgtgctgttcttgtgatagtgaataagtctcaggatatctgatggttttaaaaacaggagtttccctgcacaagctctctttttccactgccatccatgtaagatgtgacttgctcctccttgccttctgccataattgtgaggtttccccagccacgtggaactgtaagtccattgaacttctttttcttcccagtctcgaatatatcttcatcagcagcatgaaaacggactaatacaagtgttttgcagacagtgggtccatgtgtaagctgaggacacatctcctttgagccagagggtctatttcatcagccaacagttctgacttgcttcagagtagtgctctgaggagcagccaatatacaatagttaccctctattttacattttgcttactttaaacatgtctgtcttttatttttaatattaaagccaggaagacatttagtagataattattttctcaaattgaaggtcaagtcactttttaaaaataaactgattgagacccaggcagattaaaaattatttttgaatgctctttctatcttttcaggacaaagtgacctcttttgtgctttatgacctaaccctcccaaaataatacttcatttacttgcagatcccccagcagtctatctggggcaaatatcagtcaggctcccacattttgtcaactacatgttgactttgcttgctcgcacatctggcatctaaaacatatggattaggctttaatcaacagcccagaatattatcattttaggcacctgtcagagaattcatcccagaattgactgtagcccagcatttgccaaaattgcagttgagacatctgattttcagagagaccatctaaagggcacatcaactcctgattctctcagttctctaagctctgcccccgcgcaaagtcagctcatcagagaacagtaggtccagactctgttattaatcaaacttttcacagaagtgcatttggtgggaaaaagttgttatttcattttttttcttggtagagggaaataaaagaaatacccatctgtggaaaaaaatatgtattttgcaaaatcatggtcaaagttgctgccaattataatccgagtccatttgctaagaatgaatcgagttctggctctggtagccaggtaggagggccaagcatgtgctttcagacagcaaacaaactggttccaagcacagcaccagggaaggccagagagaaagtttcaggtcttaccaggctgccaggatgttggggaggactagaggcaaagcaatgaagcacgttctgggctgacaagagtatgcctgggggctggggtggggatgggggcatctgccatactcaggagggctatgcctatgttttggctctctggagactttcaaaattaaccctttagacacaagtgggtcctatggtgagctccagggagaaaaaatgacattttccctccaagtgagatggaggatgcagggcatttaatttaacttgagagagtgaatatataaatggacaatggccagaccatacataaaaataggactccttcataatctgcagcaacctgcacaggaagccaactgattatctatagtaaccagcccaggaagccaactgattatccatagtaaccagcccagaaaaccagccgattatctacactaaccagcccagaaaaccaactgattatctgtagtaaccagcccaagaaaccaactgtctacagtaaccagcccaggaagccaactggttatctacagtaaccagtccaggaaaccaactgatagtaaccagcccaggaaaccaactgatagtaaccagcccaggaaaccaatggattatctatagtaaccagccccaggaagccagcctgctacgtcagacttataggaagtcagactactatctctagcaataatccaggaagccaaacagtaaccccaaagtagacttgattaaaactgacagcttccctaatttttgtcctcaccccaacttaggaccaactacagaaacccaaatatacacacctaaccaacctcctagtgagaggtgacagagtgctggcagtcctcatagcccttgctcactgtcggcacctcctctgcctgggctcccaatttggtggcacttgaggagcccttcagcccgccgctgcattgtgggagcccctttctgggctggccaaggccagagccggctccctcagcttgcagggaggtgtggagggagaggcgccagcgggaaccagggctgcacaccgcacttgcaggctagctggagttccgggtgggcataggcttggcggccccgcactcggagcagccagccagccctgccagccctgggcaatgaggggcttagcatccggaccagcagctgcagagggtgtactgggtcccccagcagtgccagcccactggcgctgcgctcgatttctcactgggccttagctgccttcccgtggggcagggcttgggacctgcagaccaccatgcctgagcctcccaccccctccatgggctcctgtgtggcccgagcctccccgacgagcaccaccccctgctccagggcgcccagtcccatcgaccacccaagggctgaggagtgcgggtgcacggcactgggactggcaagcagctccacctgcagccctggtgcgggatccactgggtgaagccagctgggctcctgagtcttgtggggacgttgagaatctttatatctagctcagggattgtaaatacaccaatcggcactctgtatctagctcaaggtttgtaaacaaaccaatcagcaccctgtgtctagctcagggtttgtgaatgcaccaatggacactctgtatctagctactctggtggggccttggagaacctttatgtctagctcagggattgtaaatacaccaattggcactctgtatctagctcaaggtttgtaaacacaccaatcagcactctgtgtctagctcagggtttgtgaatgcaccaatcccacactctgtatctagctgctctggtggggccttggagaacctttgtgtccatactctgtatctaactaatctgatggggccttggagaacccatatgtctagctcagggattgtaaactcaccaatcagcgccctgtcaaaacagaccactgggctttaccaatcagcaggacatgggtgggcccagataagagaataaaagcaggctgcccgagctagcagtggcaacccgcttgggtccccttccacactctggaagctttgttctttcgctctttgcaataaatcttgctactgctcactctttgggtccacgctgcttttatgagctgtaacactcaccacgaaggtctgcagcttcactcctgagtcagcgagaccacgaacccaccagaaggaagaaactctgaacacatctgaacatcagaaggaacaaactccggacacgccgcctttaagaactctaacattcacgcgagggtccgcggcttcattcttgaagtaagtgagaccaagaacccaccaattccggacacactaggatgccctgcttctaattagctcaactgcagcttcccgatgccaacagcctctgatcaggggacacctgaagccttctctttcttccatgataaagtttttccattcagagctgcgcagcgcaagcgtcctgggcccataaagttttcccactcctctgcctgcctttgattttctgccaaatacgagtcatggtggctgactgtcttgcaattgcaaattttgaataagtagtttttgctcattttcatttgattggtctctttttattctcacagaatgttgaaagtaatgtaacctaatcttgaactccaagcaagtaaagcatgctagagcaatacccatggaggggcatgcatgtagcatggtcccaccccgtccatacatgtgcacccagtttcttcagtctggaatggccttgtcccctctcttccccctggaggaatcctacccatcctcccaggcttggcgtgaacatttctgcttctgaggacccttccctgcctgtcatcagcaaaatccctggagttcccttattcctccatgttagagtgatgacagcagctcagcataaaatgtcaacaggaaagaaagacacatttcctgagtcattatctatttcctgaaggctttttacatgtgacatttcactaaatcctcccttaactttgtgaagtaggaactccttcctccatttcccaaatggtgaaagcaagactgtaactcattttacaaaattgaagatgtatttctctttcccagttcccttttgagcttcttattaagattatttctgatgcatcttacttctttaatgcagagcaaattctggacaaatgaaagctgtttcatccaggcttggggactgaatgaataaataaatgaatgggttatcatggggcagaaaaaatgaatttgtttacaagcttagtctggcttaaatgactcattactcaaaagcatagaccatatggttcccttaggtaaagggatctaactcaaactttttcatccacccagaccccgtttctatggacaggagatgagtcataaaattccaggtggaggcgtcaagtgtttccaactctggctgtgttggtttggaggctttgatgcctgtgggtcacgttctgaagacttaccagggagcagcaagtgagaagacaaatgtcagcaggtgatatataatctgtgcttaagcaacaggggaagaaaacacttggtaagcagtgtatgagagaatgcatcattttgcccagccttagggagtccgcatctttggtacttttaattattttaaacatttttatggaaaagttgtcatagcaacaacatcaacaaatattttgaagtgaaaaattctatttccagcaccttcaagtaataattttcattttttgctcattttccacccatgtctaaccacacataagcattttatatacttgtgaccacaaagcaatgtctattttgtgtcctgcttttttgcgtaacatcatgccaaaaatattttctatgtttctgaaggcttcatatttaaaatgttcctctgcctaatatttcatatgttactaaactattcccacattgttaggtaatttgttcacttctcaaatttttaccattttttaggacatgttgccaaaagcatcttcttgcatataactatttattctcattattgccttagaatgaatgcaaaggaatagtgtttctgacatctttgtggcttctgctacattaataccatgttgctttgcagaagcactctgctaatttagaaaaccagcagtttgaggaggatgccttgttatgaagcctgtgcagacttatccttatggtggagggctagacagtcaatggatgcagcaactccttaaaaagaattaaaaggcatttgctgaggtagccatgtgggctgcacacgtgggaaaaattaactccaaggctgccttgattagaatttttctgaagcaaaacaattttgctctggatatgtgaactcttataatggtaatagagggttttccttttctctcttctgagttttgcatctcttaggcctaggtgtgactacaaaaccagagactggcttttacaagcacactggagttcttacctgcaaacaggagcccatctttcaaagatctttccataggaacctctcatataattgcttaaacatgaaaactttcttagggaattgcattcatggccagtttttaaactacaaaaggaaacttagactcattttattatttatttattatttttgtttgtttgtttgtttttttgagacagagtttcgctcttgttgcccaggctggagtgcaatggtgtgatctcggctcactgcaacctccgcctcccaggttcaagagattctcctgccttagcctcccgagtagctaggatgacaggcatgcaccaccacgcctggctaattttgtatttttagtagagatggggtttctccatgctggtcaggctggtctcgaactcctgatctcaggtgatccacctgcctcagcctcccaaagtggtgggattacaggcatgagccaccacacccagcccaatttatctttttatttccacaagagatactcaccagtttggtgagcaagcagtgaaaagtaagccaggctggtatgtcaagttcataatgataattatagttgccatcctaggagcactcactgtgtgacaggttcagtgctgagtctcatctggatcattccactggccttctccctgtggccctgctttcactctgacccctactatctaatccccacacatcaaccagagtgatcatctcagaacacaagtcagatagatcactcctctactcaaaatccttcagtggtttccatctcacttggagtgcaaacccaagtcctcacaggagcctgcccctcacccttcttatctcccactgcaccccctcactgcctgtattagtcagttctcatgctgctagtaaagacatacccaagacagggtaatttataaaggaaagaggcttaagggactcacagttccacatggctagggaggccttacaatcatggcagaagacaaagaaagagcaaagggatctcttacatggcatgaggcaagagagagcatgggcaggggaactcccatttataaaaccatcagatcttgtgagacttattcactactgtgagaatagtatggggaaaccaccccaagtttcaattatctccacctggccccacccttgacatgtgggaattgttacatttcaaggtgagatttgggtggagacacagccaaaccatatcactctcttccagccatgttgaacccctggctgttccttaaacattccaaacatgctctgacttcaaggtcaatggaatgtgagctgtatattgcatgtgcctagacataaagtattccccactactaagtgatggagcccaaacaattgtcctgaatgctgactgcagaccacctttggttgtctccattctgtgagtttaaatgcagatagaacacattgcaataaaactatgggctttgattagcagtgagtgatatgtgatctgaagattttggggggtggcaaatgcttatattttgtctattaatttaatatcccccaataaaattgactgcaagtgttggctaaaggattgagccatgaccttgtctgtttgacactgcaggtatttccaggcaagcagagggtatatccacatgatattctgcaatttgtgatttagggcagggattggtaaaattttcctatacagagagagagattaagtattttaagcattgcaggtcattgtagcatgaacaaaactttatttacaaaagaaggaagtggtcaggttttccagtccctgatctaggggcacatgtgggagctcaagccaatatttgggagcacaggtctgacatgagagttcctcattggaaaataaatcacattcttttttttcttatactttcagtgtctggcacctcacctggcacataggagacattcagtaaaaacctttcaaaataaatgactgaatgaatgaatgtatagagtttggagtgcatagatctttttctatatgtacagagagatcttgttcattcacaaatttattagacaaaacatttattaagtgtcccctatgtgccagacactggggctcagtaaaaaagatgggatttgcatcagacctcacagaacacagggtcaatatggggagacagatgttcaagggggactatcagcaaaatgtgaaaattgttaacacagaggaagttcagggggttttagaagcactttggtttggagggcactctatgttatggtccaggagagtccactagtctctgcgcttgtcaatcaagaagcagcaatggcacaaacccacaaatgcagggaacagagcttatgtaagtgaaggacgtggtcatctttgtaaacatgaataaattgtttagttgtaagcactgtattcaataagggaggttcaaactgcttgcataagagggctttctagctattaatcaagtggaaagcactgttgtgaaggctgtattgggaattttgaacaccatttgatttctcttcaagcctctttgagggagtattatgttcagagccagccttttaacaatgcactatatttaatctttttaccacttttgacctttttctctaaaaattatttccattattccaaatttcattttgcctttgctatacctcttttgtaaatttttctttaggagataaagaacccattaaatgctgtgaagtccctgcctgcctttaatatgggagggatatgggagctctaatagaaggtcactggattgtgagaaaaatagattcacagtgggcacagatttctttttgtatatatgctggcagcagtgcctggctgtaactataagaaaaatggtaaactccatccttgcactttattagaatgacgtttcttacattaaaactggtcaaactataacaaaaggcctaacattcacgtcatcagagttctgaagagagatgaaaaagatggggctgaaaaattacttgaagaaatagtggctgaacacttcctaaatttgacaaaatatataatttaacagttgcaagaagctcagtgaaccccaaacagggtaagttaaaaaaaaaaatcacaccaagacacatcatatcaaacttctaaaaattaaagacaaagaaggataccttgaaagtagtgagagggaaacaaaaccttacctgaggggaaaacaaatcaaatgacgatgtatttctcatcagaaaccatggaggctagaagaaagtggcacaacgttttccaaatgctgaaagaaaaaaactgtcgaccgagactcatagtcccagcaaaaatatcctcaggaatgaaacagaaatcaaaacattctcaaagtaaaatgaagataatttgtcattagcatacctgccctaaaaggatagcaaactgaacttctctgagcagaaagggaaccataaaagaagaaaccctgaatcatcaagaaggaagaaaaaaacacagtaagcatgatactgtgatacaataaagcatacagtagttctcccttatctttgggtgatattctctgagacccctggtggaggcctaaaactgtggacagtactgaaccctatatatatatactgtgtatatactgtgtttttttcatatacaaacatacaggctgggtgcagtggctcacacctgtaatcctagcacttagggaggccgaggcaggaggatcacatgagcccaggagtttgagaccagcctgggcaacatacagagatctctctataaaaaatgctaaacaaatttttaaaaatttaaaaaagaaaacatttaataaatatgtataataaagtttaagttataaattaagcatagtaagagatcaacaataacttatgataaaatgaaacaattataacatatactgtgtaaaagtcatgtgaatgtggtctctctctctctaaatatcttatcatatgtagcattttcagactgcggtcgaccactggtaactgaaaccttggaaagtgaaactgcagataagggggactactgtatataatttggtttttatttacagttcctggctcagagctcctaaaacatttgtaaaatcctgagtaactgaagcaataggagtattcttgttaaagtatttggccttttgtcacttgttcctgaaacaactcccaagcaggtaaaagatgtattttttgttattcataacaaactcctttcaaccacacctgaatttatgttaacaaggtgatttttggaaagcctgcagaaaacagaaaatgtggggctcactgctgggaaaactagtcatgagattggagggttggaacttttagccccaccccccaacctccagggaagggagaggaggggttgaaggttgacttggtaaccaaaggccaatgatgtaatcaatcatatctatgtaataaagtctccatgtacatacgaaaggacaggccgggtgcggtggctcagcctgtaatcccagcactttgggaggccgaggcctgcggatcacgaggtcaggagatcgagaccatcctggctaacaaggtgaaaccccgtctctactaaaaatacaaaaaattagccaggcgtggtgacatgcgcctgtagtcctagccactcgggagcctgaggcaggagaatctcttgaacccaagaggcagaggttgcagtgagcagagattgtgccaatgcactacagcctgggcgacagagcaagactccatctcaaaaaaaaaaaaaaaaaaaaaaaaggaagaaaatacaaaaggacagttggaggcggtggctcagcctgtaatctcagtctcagcactttgtgaggctgaggcctgcggatcacgaggtcaggagattgagaccatcctggctaacacagtgaaaccccgtctctactaaaaatacaaaaaattagccgggcgtggtggctcacacctgtaatctcagcactttggaaggctaaggcctgcggatcacgaggtcaagagatcgagaccaacctggccaacatggtgaaaccccgtctctattaaaaatgcagaaattagctgggcatagtggcacataatcccagctactcgggaggctgaggcaggagaatcacttgagatagcgccactgcactccagactggagatagagcttcttctcttcttcttcttcccttgagctttctaaaatatatttggtggtgaaagcaaaagcataatgttgtctactgtggttttaaatgtagaggaaattgttacaataattatactataaaggaggaaggataaaggaatataaagagaagtaagtttctatacctcattcggactgataaaacgacaacacctgtagaatgtcttctgtatatatattacctattattctacctattaatataaggtaatacatagagcaaccactaaaaaagcaatatttagataaaagtaaaaaattctataggcacatcaaatttgaattctaaaatatgtttaactcacacgaaagcaggaaagagaaagagacatgaaaaatagacatcacaggctgggtgtggcggctcatgcctgtaataccagcactttgggaggccgaggtgggcagatcgtctgaggtcaagaccagcctgggcaacatggtgaaaccccgtctctactaaaaatacaaaaattagccagggatggtggcgggtgcctgtaatcccagttacttgggaggctgaggcaggagaatggcttgggcccaggaggcagaggctgcagtgagccaagattgcgccactgcactccagcctgggcgactgagcaggactctgcctcaaaaaaaaaaaaaaaaaaaaggaaaagaaaagtgacatcacaattacctaatacctgtgggacttaaaacctagatgacaggttgatgggtgcagcaaaccaccatggcgcatgtatacctatgtaacaaacctgcatgttcagcacatgtatcccagaacttaaagtaaaataaaaaagaaagaaaaatagacatcaaacaaaacaaaagttaaaatggcacacttatgcataaacattaattaccttaaacgtaaatggtcctaatagaccaaataaaagagagatcggtggagtgaattaaataaggctcagctacagatggtcccaacttataatggttcgacttataattttttcactctacaatggtgtgaagcagtagtaattcagtggaaaccatactttgagtacctatacaatcattctgtttttcactttcagtacagattacatgacctattgagcactttattataaatagacttcgtgttagatgattttgcccaactgtgggcaaatgtaagtgttctgagcatgtttaaggtaggctaggataagctatgatgttcagtaggttacatttattaaagtatttttgacctggaatattttcaacttatgatgggtttatcagaacataataagctgaggagcatcaacatatgccaagaagctaaaagaaactcactttaaatataaagatataggccagtggaaagcaaaaagatggaaacagttatatcatgtacacactaattaaaggaaagcagaagtggctattttaacatcatataaagtggacttcagagcaaagaaaattattggagacataaaggaacattatataatgacaaaagggccaatccacgcacaattcatagcctaaatgtgtatgcaacagagttataaaacatgtgaagagaaaggtgaaatagataagtccatagttatggttggtgacttcaacactctcaacaatttatataacaactagacataaaattagcaaggatattgaagaactcaacaccagcatcaactaacaacatctattgagtgtttataatacattccacctatctatagcagaatgcctcttgttttaaagtgctcatgggatatataccaagatcaacaatatcctgggccataaaacaaacctcaaaaaatttaagcaaattgtaattatacagtgtgttctatgaccacaaaagaatcacactagaaaagataaaaaaatctccaaacacttggaaacaacacacttctaaataattcgtggatcaaaaaagaagtctcaagggaaataaaatacattgaactgaatgaaaatagaaacaacacaccagaatttataggacacagttaagcagtgctgggggggaaacttatagcactaaatgcatatattagaaaataacaaacgtgttaaataaataatataagctatcatctcaagaacctaggtaaagaagagaaaactaaatccaaagcaaggagagggaaagaaataataaaaagaagagcagaaattgatgaaattgaaaacagaaaaaaatgtagaaaaccaatgaaagaaattgctgggccttagcaaaggtcaagcatgtttacaaactgctagcaagactgacaacgaaaaaaagaagatacaaattaccaacatcaggaatgaaacaaaatatcactacagaccttacggacctgaaaagaataataagagaatacttggagcatctctacaaacataaacttgatgttggttggtggcagatttgacattatgttgatataacttggtaaatttagataaaatggaccaactcctcaaaaaacaccaactaccataagtcatccaatatgaaatagataatttgaacagctctataactattaaggaaattgaatttgtaatttaaaattttccccaaagaaatctctaggcctagcagggctcagtggcttatgccaataatcccagcactttgggaggccaaggtgggtggatcacaaggtcaagagatagagaccattctggccaacgtgatgaaaccccatctctactaaaaatacaaaaattagctgggtgtggtggcacgcacctgcagtcccagctacttgggaggctgaggcaggagaatcgcttgaacctgggaggtggaggttgcagtgagccaagatcacgtcactgcactccagcctcacagcagagtgagactctgactcaaaaaaaaaaaaaaaaaaaaaaaaaagaaatctctaggcccagattgtttcactggagaattctaccaaactttaaaggaaaatcaataccaattctgtaaaatctctccacacaatagaagaggaaggattacttcccagttcattttatgaagctggtgttatcttgatatccaaagcagaaaaatatcatacatgaaaagaaaactacagactaatattcctcattgatatacagttgcaaaacttatttaataaaggaagtccactctcactactctaataaaacttaatgttggaggttgtagccagtgcaataaagcaaggaaaggaaacagacatacagaccatagggaaggaataaaactgttcttatttgcaaatgatatgtctgtctacatagaaatgccaagatatttaccaaaaaaaacttccaaaaataacaggtgaattcatcaatgtcacaaaacttaagataatatgcaaaacatattaaagaacataaaaatgttcaaaatgtaatattcaaaaatgtaataccatttaaaatcaaagagaaaggcagaggaacttttaggtataaatataacaaaatgtatacagggcttgtatgctgaaaactatagaactctgaaagaaatctaagaagatctaaataaacaagagttgtgacatgtttatggactataagactcaacatagcaaagatgtcaattctccccaaattgatacacagatttaatgcaattcctatgaaaatatcagcaagatttttaatagacatagacaacattattctaaaattcatgtggaaaggcaaaagaaatacaatagctaaaaccatttctaaaaaataagagcacaatgggaggaggtataatagccatacttgatttcaagacttattatatagctacagtaatcaagactgtgtggtattgtggagggatagacacacagatggcgggaacagaatagcgcagtggtttcccagcctttttggtaccagggatgggttttgtggaagacagtttttctatggaccatgggggtgaggtacagggatggttttggggtgattcaagcacattacatttattgtgcactttatttctattattattacattgtaatagataatgaagtaattatacaactcaccataatgtagaatcagcgggagacctaagcttgtttccctgcagctagacgttcctatctgagtgtgatgggagacaatgacagaccatcaggcattagattctcataaggagcatgcaacctagatccctcacatgcacagttcacaatagggttcgtgctcctttgagaatctaatgccttggctgatctgataggaggtggagctcaggtggtaatgcaagcaagcgatggggagtggctgtaaatacagatgaagcttcacttgttggcctgctgctcacctcctgctgtgtggctgggttcctaatgggctgtggggcggggaaccttggaatagagaacccagaagtagaccccccccaaaaaatattcggttgatatttacaaaggtctaaaagaaattcaatgcaggaaagagctttctcagcaaatggtgctagagcaattggacatccataagcaaaaaaagtgaatcttgacctaagtctcacaccttataaaaaaattatgtcaaaatggatcatgggcttaaatgtaaaactataaaaattatagaaaaaaagaatataggagaaaacctccaggatctagagctacaaagagttcttagatggaagaccaaaagcataattcataaaaggagaattgataaattggactttatcaataaaaacttttgctctgtggaagaccctatcaagtagaggagatgagctaaaaacgtttgcaaaccacatattcaagaaaaggctagtatttcaaatatacaaggaactctgataattcaacagtaaaaaaaaaaaacaaaaaaaaacccaaacagtttaattagaaaataagaaaaagacataaatatttcatccaagtggatatacagacagaaaataaacacatggaaagatgctgaacaacattagcttttagagaaatgcaagttaaaaccgcaatgagctatcaccacacacttatcagaataactaaaattaaaaatagtgaaaatataacatgctggacaggatgcagagaaaatgaagcatttatacattgctggtaggaatgtaaagtggtatgccactctggaaaacaatttgagtttccaaaaagaattaaacacagaattactattcaacgaagtaattgtagttttgggcgttttatccaagataaatgaagacttacatttatacagacacatgtacacaaatatttatagcacctttatttgaaatagcccaaactggaacacagcttacacatgaaatcggtaagtccaagagatatctgcactcccatgttccctgcagcgctatttacagtagtcacaaatggaattaacctaatgttcatggatggatggatgaatatattttttacaaaatgttattcagtcttaaaaaagaaaaccctgccatttgtgactacgtggataaacctagaggacctgtccttcagtggctgaatggttaaacagacagatgttatcattgggagaaactgtaatgggcacattgggttcctctgtgttattatttttttttacaactgcaagtgaatctaaaattatctcaaaataataaatctattcattattctccagctttaataaggtataattgacaaaaaactatatatttatggtgtccaatgtgatgttttgatatatgtatacattgtgaaatggttggcgaattaacatatctatcacctcacatatttgtcatacttcgtggtgagtacatttaagatttactctttcagcaattttcaagtacattattaactttagttactatgctgtgtattagatttccagaactacctattgatcttaactgaactttgtaccctttgaccactatctctccatcttctcccctcctgccattccacagcccctggcatccactattctactctctgcttctatgagtttgactttttttttttttgagacggagtctcactctgtctcccccaagctggagtgcagtagcgcgatcttggctcactgcaagctccgcctcccgggttcaagctattctcctgcctcagcctgccgagtagctgggactacaggcacctgccaccatgcctggctaattttttgtatttttagtagagacgtggtttccccgtgttagctcctgacctcgtgatccgcccgactccgcctcccaaagtgctgggattgcaggcgtgagacaccgctcccggccatgagtttgactttttaaaatttaatttgatttgattttattattattatactttaacttttagggtacatgtgcacaatatgcaggttagtaacatatgtacacatgtgccatgctggtgtgctgcacccattaactcgtcgtttagcattaggtatatctcctaatgctatccctctcccctccccctaccccacaacagtccccaaagtgtgatgttccccttcctgtgtccatgtgttctcattgttcaattcccacctatgagtgagaatatgtggtgtttggttttttgttcttgtgatagtttactgagaatgatgatttccaatttcatccatgtccctacaaaggacatgaactcatcattttttatggctgcatagtattccatggtgtatatgtgccacattttattaatccagtctatcattgttggacattcaggttggttccaagtctttgctattgtgaatagtgccacaataaacatacgtgtgcatgtatctttatagcagcatgatttatagtcctttgggtatatacccagtaatgggatggctgggtcaaatggtatttctagttctagatccctgaggaatcaccacactgacttccacaatggttgaactagtttacggtcccaccaacagtgtaaaagtgttcctatttctctacatcctctccagcacctgttgtctcctgactttttaatgatttccattctaactggtgtgagatggtatctcattgtggttttgattttcatttctctgatagccagtaatggtgagcattttttcatgtgttctttggctgcataaatgtcttcttttgagaagtgtctgttcatgtccttcacccactttttgatggggttgtttgtttttttcttgtaaacttgtttgagttcattgtagattctggatattagccctttgtcagatgagtaggttgtgaaaattttctcccattttgtaggttgcctgattcactctgatggtagtttcttttgctgtgcagaagctctttagtttaatgagatcccatttgtcaattttggcttttgttgccattgcttttggtgttttagacatgaagtccttgcccatgcctatgtcctggaagagtttgactttttaagattccacatataagtgagatcatgcaatatttgtctttctgtgcctgggttatttcacttagatagtgtcctccaggtttatccacgttgttaaaaatggcaaggaaatctgaatgccaatggaagactgaatagtactttaaaaaattattcatccatccatccataaacattaggttaattccatttgtgactgttgtatatagtgctgcaatgaacatgggagtgtgagtgtctcttagacatactgatttcacttcctttggttatatatccagaagtgggattgctgaatcatatggtagttgtatttttaatattttgaggaccctccatactattttccataatggctatactagtttatattcctgccaatattacacaagagttccttttctccatatctttgccaatacttattttatgtctttttgataatagccattgcaacaagcatgagttgatatttcattgtggttttaatttacatttccccaattagtgatgttgagcactttttcatctgttggccatttgtatgtcatcttttgagaaatgtcttttcatctcctttgcccattcttacaattttaattgggttatttgtcttcttgctgttgagttgtttgagttctctaaatattttggatattaacctcttatcaggtgtgtaatttgcagatattttctctcattccataatttgtctctactctgttggttgttttctttactatgcagaagcttttcagtttgatgcaatcccatctatttttggttttattacctgggctccaaaattgtaagtttaatttttaaaatctagtaatgagaagcttaaaaaaatcagaatcaggaagtatttattgagcccttactttggccagagaccattttaggagctgaggatacatcaaggaatgcaagaatctaaatccctgtcctcacagggcatctattttagagcaatagagagaattaacaaagacgaaaattcataatataatgttgagtattaggaaatactgttaccaaaaataaaacaacctaaggagatagagaatgtttgggggaaagggtagaaggcttttatagataaattgttcaagggaagcgttttaggagaagatcacatcaaaattgctcaagggaagtctcaggagaagatggcatctctgtggagatttaagatgattagtttgatttgggacatgtttcactgagacactacctgggtatagatagccaggtaaagctgtcccgaaggtaggaatagagacagagtttggagtaattttcatgaggatgaatgtttaatggacatagggctaaatgagataagtaagagtgggagcatgcagagaggataggaaaaaccaaggacacaatctttaggagtcagtaggaatgttctactcctcccagtgaaggctgctttgaatgagactgagccagacttccttagttttctttgtgagttgctccttttcttctcaccatcctaatactggagcttatcagtctatagccttgaggctcttttcttctttatctctaccactcccttggagctctcatccagcctgaacccttctcctgagctctagactcttatatccaactgcctatcttcacttcatttgggtatctacctaattttcttgaattaaatttgggaatataggtattgatagagtaaaaatgcagtttttaaatatatattatatatatattatatatatatttatatacatgcatacagagagagagagagagattgagagagagaaagagatgggatcttgccatgttgcccaggcttgtcttaagctcttgagctcaagcaatccatctgctttggcctcctaaagtgctgggaattacaggcatgaaccactgtgcccagccttagaaatgcagggagtttctaacagatcctaaaatttatgaatgtattttgatttcataggatttggtgcatcctggccccaaattttaacaaggccctttcttttaagtttccttcaaatactttctattttattgacatacatctttttgtatactttatttatagtccatgttttgcagctactaaagaggaaaaaatataatactgggtgaaaatgaagaaagcagaaatggaatggatgaaatgaccttattacctctttttctgattttttaaaatggtggttccatcaatataaatgagttttgcagagggagatatcatattgtgaaataattcctatttcaagctccaaacatattttattctgagatgtatgcatattctctagtccatagcgaaccatttccaagcagtcagaaatatctcatgtaattaaaagtcattccaaatcaccttaaagtttggtcagttttgttaatcctatgtatttaagataaaaagggaagacacatccttacttatgttatcaccacatttagaacagaggtgcaatgaggccatttgccaattcctgtggaaattgttttcatgtcttgagacaacagcacattctgcctctgctctcaatatataatattatatataatatattaatatcatattacatatataatatataatataacttcagtgccagtaaagatgtattagttatctatctctgtgttacaaattagcccacaacttggtggcataaaacaacaacatggattatctctgtttccatgggtcagaaatcttaactggtcttctgactcaagagctatcacaagcaggatgaagatatcagccttaagcattccatttgaaaactggcacaagacaaggatgccctttctcaccactcctattcaacatagtattggaaattctggccagggcaatcaggcaagagaaagaaataaagcgtattcaaatagaaagagaagaagtcaaattgtctctgtttgcaggtgacatgattgtatatttagaaaaccccattgtctcagcctagaatctccttaagctgataagcagcttcagcaatgtctcagtatcgggggaaattcagccagatatcaggtgaaattcacccctgatatttcatgtaggtttttttctattttctctaagtgttggctggtctgagaaataaagggacagagtacaaaagagagaaattttaaagctgggtgtccaggggagacatcacatgttggcaggttctgtgatgccccctgagctgtaaaaccagcaagtttttattagtgattttcaaaaggggagggagtgtacgaatagggtgtgagtcacagagatcacatgcttcacaaggtaataagatatcacaaggtaaatggaggcagggtgagatcacaggaccacaggaccacggtgaaattaaaattgctaatgaagtttagggcatgcattgccattgataacatctcatcaggagacagagtttgagagcagacaagcggtctgaccaaaatttattaggtgggaatttcctcatcctaataagtctgggagcactatgggagactggaatttatttcatccctacagctgcaaccatagaagatagactttcccaaagcagccatttcatttcccaaagaggcctaccatcagggatgcattctctttctcagggacgttccttgctgagaaaaagaattcagtgatatttctcccatttgcttttgaaagaagagaaatatggctctgttctgcccagctcaccggcagtcagagtttaaggttatctctcttgttccctgaatattgctgttatcctgttcttttttcaaggtgcccaaatttcatattgttcaaacacacatgctctacaaacaatttgtgcagttaacacaatcatcacagggtcctgaggcgacatacatcctcctcagcttacgaagatgatggtactaagagattaaaataaagacaggcataggatatcacaagggtattgattggggaagtgataagtgtccatgaaatcttcacaatttatgttcagagattgcggtaaagacaggcataagaaattataaaagtattaatttggggaactaataagtgtccatgaaatcttcacaatttatgtttttctgccatggcttcagccagtccctctgttcggggtccctgatttcccccaacatctcaggatacaaaatcaacgtgcaaaaatcaaaagcatccctgtacaccaacaacagacaaacagagagccaaatcatgagtgaactcccattcacaattgctacaaagagactaaaatacctaggaataccacttacaaggggtgtgacgtacctcttcaaggagaactccaaaccactgctcaaggaaataagagaggacacaaacaaatggaaaaacattccatgcttgtggacaggaagaatcaatattgtgaaaatggccatactgcccaaagtaatttatagattcactgctgtttccattaaattaccattgacattcttcacagaattagaaaaacctactttaaaattaatatgaaactaaaaaagagcctgcatagccaagacaaccctaagcaaagagaataaagctggaggcatcaggctacctgacttgaaactatactacaaagctacagtaaccaaaacagcatggtactggtatcaaaacaggtatacagactaatggaacagaacagaggcctcagaagtaatgtcacacatctacaaccatctgatttttgacaaacctgacaaaaaaaagcaatggggaaaggattccctatttaataaatggtcttgggaaaactggctagccatatgcaggaaactgaaactggactccttccttacaccttatacaaaaattaactcaagatggattaaagacttaaacataacacctgaaaccataaaaaccctagaagaaaacctaggcaataccattcaggtcataggcgtgggcaaagacttcatgaaaaaaacaccaaaagcaatggcaacaaaagccaaaattgactaatgggatctaactaaattaaagagcttctgcacagcaaaagaaacgatcattagagtgaacaggcaacctacagaatgggagaaaatttttgcaatctatccatctgacaaagggctaatatccagaatctataaataacttatacaaatttacaagaaaaaaaaaccccatcaaaaagtgggcaaaagatatgaacagacacttttcataagaagacatttatgtggccaacaaacatatgaaaaaaagctcatcattactggtcattagagaaatgcaaatcaaaaccacaatgagataccatctcatgccagttagaatggtgatcattaaaaagtcaggagacaacagatgctggagaggatgtggagaaataggaatgcttttatgctattggtgggagtgtaaattggttcaaccattgtggaagacagtatggcgattcctaaaggatctagaaccaaaaataccacttgacccagcaatccctttactgggtatataccgaaaggattataaatcattctactataaagacacatgcataccatatgtttattgcagcactgttcacaatagcaaagatttggaaccaagccaaatgcccatcaatgatagactggataaagaaaatgtggcacatatacaccatatgcagccataaaaagggatgagttcatgtcttttgcagggacgtggatgaagctggaaagcatcattctcagcaaactaacacaagaacagaaaaccaaacactgcatgttctcactcataagtgggaggtgaacaatgagaacacatggacgcagggggaggggtacatcacacactggagactgtcgaggggtggggtggggggctaggggagggatagcattaggagaaatacctaatataggtgacgggttcatgggaccagcaaatcaccatggcacgtgtatacttatgtaacaaacctgcacattctgcacatgtatcccagaacttaaagtatgggaaaaaaaaaaaaaaacaaaaccaggaaaaccgtttttttttaaaaaagataccagcttgggctgcagtgaactcaaggctagactggggtaggagagtcttccaagctcactgactggatcggcaggattctgtctcttttctcatgagcctttccatagggcagcccacaacgtgactacttactgcatcagagaaagcaagcaagaagatacagagaaagacagacagagagagagagagagagagagagagaatgcgaacagtagagaagttagtcttttataagctaccaatcttgtaagtgacatgccatcactttagctgcactcttgttgccaaaagcaagtcactaggcccagcctacactcaagtgtaggagaatatataagtaccaggaggcagagatggttgggggacattttagaggcagtcctgccacttgatgcatggatatttgttgaatgaatgaataattgcataaatgaggttatatagtttgatgctaatcataatgaaggatcaaactatggcatcccagacaaagtcaatatgtatcattgtatacttacaggtgaaagtacatttcagtggaggtccactttcaaaaggatctggctgctacagtcagatatttttgtagctttgttgagtcagtgggacaagaagggcacttccttaaaatgtttatttgtgtctggttgggttctgccaacctggatgtggaaggcaaatattaccagtgaactgtcactggctcactcaagaagattcaggcttacaaaattcttaggcatatacaaaatctttccttgattaaacaaaaaaaggttattagcaccctcccaatgtgctttttgaagtaatacatttatccaatagacataaaataaagacttctggctgctaaatgaatgaatgccaatggcaaatatgaaataacttttgcagttatctacctcaatgtagacactgcattcagaaagtatgctgtgaaaccatgctaagtatcatgcctgagccagcctcaaagtgagagtcactgaaacaaatgttcctataaaaagcctgcatcaggaagtcctagccagggcaactaggcaagagaacaaaaaaaggcatccaaattggaaaagaagatgaactatctttctttactgatgatatgattctatatatagaaaaacctaaggactctgccaaaagtctcctggaactgatacgaattcaataaagtttcaggatacaaaatcaatgtacaaaaataagtcgcatttctatacactaataatgttctagctgaaaaccaaatcaagaacacaacaacatttacaatagccacacaaaaaagaaatatctaggaattcatctaacaggaagatgaaagatctgtacaaggacagccacaaaacactgctgaaagaaatagacaacacaaataaatggaaagctattccatgctcatggattggaagaatcaatactgttaaaatggccatattgcccaaagcaattgcagattcaatgctatccctatgaaaataccaatatcatttttcacagaattagaaaaaaatctgttctaaaattcatttgaaaccaaaaaagagccctagcctgaatagtaaaagcaatcctaagcaaaaagaacaaagttggagacatcacattacctgacttcaaaatctactacagggatacagtaaccaaaacagcatggtactggcacaaaaacaaacacatagactcatggaacaaaatagagaacccagaaataaaactgcacacctacaaccatctgttctttgacaaaattgacaaaaataagcaatgggaaaaggacttcttattcaatgaatggtgctgggataaccgggtagctatatgcagaatgatactagatccctatctcttatcttacaaaaattaactcaagatggattaaaggtttaaatgtaagacttcaaatgataaaaatattagaaaaaaacctaggaaatgcacttcttgatattaactttggaaaataatttatggctaagtccccaaaagcaattgcaacaaaaacaaatattaacaaataggacctaattaaactaaagagcttctgcacagcaaattactaatggagtaaacagacagcctacagaatgggagaaaatatttgcaaactatgtgtctgacaaagatctaatatccagaagctacaaggaacttaaatcaacaagcaaaaaccaaataatccaatttaaaaatgggcaaaggacatgaagagacacttctcaaaagaagccatacaagtgatgaacaaaaattgagaaagtgctcaccagataaatgcaaatcaaaaccacaatgagaagccatctcacaccagtcagaatgatgattatttagaagtaaaacataacagatgctggcaaggttgagaagaaaagggaatggttgtacactgttgaggggaatgcaaactaactcagcctatgtggaaaacggtttggagatctttcaaagaaattaaaatagaactgccatctgacctagaaatctcattattgggtgtatatccaaaagaaaacaaatcattctaccaaaaaaaccacatgcactcatgtgttcactatgtcattatttacaatagcaaagacatggaatcaacctaagtgcccatcagcggtggattggagaaagaagatgtggtacatatacaccacggaatactatgcagccataaaaaagaatgaaatcatgtcctttgcagcaacatggatgcagctggaggccattatcctaagcaaattaactcaagaatagaaaatcaaatactgaatgttgtcacttataagtaggggctaaacattgaatacagatagacataaagatgggaacagaagacactggggactactggatgggggagagaggggagtgtgagctgaaaaaacacctattgggtactatgcccactatcttggtgatgggatcatttggaacccaaacctcagtgtcacacaatatacccatgtagcaaacctgcacatgtaccctttaatctataataaaagctgaaattatatatatataaatcaagttggaaaaaaactttaaaagaagttttttaattaaaaaattctgcagcacagctctctcaatgtcccatcttcttcccaggatttgtggttgttgattatgccagatttccaaaacaatccttgctacagccagcactggccctaccagtagtgaggttaggtgtgtgaaaggaaaacaaatctcgagaccccaaactcactaagccaaagggaaaagtcaagctgagaactgcatcagggaaacctacctcccattttagtcctaaataagatagctacaaagataaaaatgctacattcctccctcacggtggtcaccactggatgtcatctgagggctgaggaatcactgtcttgctcaaaagcatcccctttctgtcattggtcttgagttggggaaatgtgtggaatgccccgtgagggctgggtaggtcccttggggctgtgaacaggcaaagagcctcctccaccacagctcagctggcttttccactggaccactgttgtacatcaactgcattaagcatataatctcagattcatctcccaatcccattaggggtgatgctgcctaccatttcacagacgagaaagccaaggcttagggagaccaagtaacaggatttgagtgcagcatcatctagcttgattgccacaacatgattcctgttcagggtctgttctgtcctgggttgaatagtgacccctcacccccaaattcacatctatctggaacctcagaatgtttcttgaattggaaacagggtatttgcagatgtaaatagttaaaatgagggcatactggattatggtgggccctcaatccagggactgatatctttatcagagaaaggagatggagatttagacacagatgcatacacagggaaaaagccatgccaagagggaggcagtgactggagtgatgagtctgctacccaagaaggccatggactgctgggatccaccaggtgctgggaagagaaaaggaaggtgatatgtttttgttctgtgtcccacccaaatctcatgttgaattgtaacccccacgtgtcaggggaggaacctggtgggaggtgattgggtcatggggaggacttccctcatgctattcttgtgatagtgagtgagttctcatgagatctgatggtataaaagtgtgtggcacttccccctttgctctctctctcttgctccacatggtaagacatgctttcttccccttcaccttcgccgtgattgtaagtttcctgagacctcctagacatgcttcctttacagcctggggaactatgagtcaattaaacctcttttcttctcaaattacccagtctcagatagttcttttttttttttttaagaagttccaggatacatgtgcagaacatgtgcaggtttgttacataggtatatgtgtgccatggtggcttgctgcacctactgacctgtcctctaagttccctcccctcactccccatcctccaacaggccctggtctgttttatcctcttccctgtgtccatgtgttctcattgttcaactccaacttatgagtgagaacatgtggtgtttggttgtctgttcctgtgttagtttgctgaggatgatggcttccagcttcatccatgtccctgaaaaggacatgatctcattcctttatatggctttgtagtatttcatggtgtatatgtgccacattttttttatccaatctatcactgatggacatttgagctggttccatgactttgctattgtaagcaatgcttcaataaaaatacgtgtgcatgtgtctttatagtagaataatttataatccactgggtacataccctgtgatgggattgctgggtcaaatgatatttctggttctagatccttgaggaattgccatactgtcttccacaatggttgaactaatttacactcccaccaacagtgtaaaagcgttcctgtttctccacagccttgacagcatctattgtttcttgaattttaataactgtcattctgactggcatgagatggtatctcattgtggttttgatttgcatttctctaatgattagtgaggttgagcttctttaataggtttgttggccacacaaatgtcttcttttgagaagtgtctgttcatatcttttgcccactttttgatggggttgtttgcttttttcttgtaaatttgtttaaattccctgtaaattctggatactatacctttgtcagatgggtgtagattgcaaaaattttctcccattctgtaggttgcctgttcactgtgatgatagtttcttttgctgtgcagaaagtctttagtttaattagatcccattcatcaattttggcttttgttgcaattgcttttggtgtttttgtcatgaagtctttgcccatacctatgttttgaatggtgttgcctaggttttcttctagggtttttatggtttcaggtgttacgtttaagtctttaatccatcttgagttaatttttgtataaggtggaagggagggttccagtttctgttttctgtttgaaagtaatatctgctctgtttgctcagaagtgcctcttttttgtataaggtgtaaggaaggggtccagttttagttttaggcatattgctagccagttttcacagcacaatttattgaataggagatcctttccccatttctagtttttggttgtacatgtgtgatgttatttctgaggtccctgttcagttccattggtctatatgtctgttttcgtacaagtaccatgctgtcgtggttactgtagccttgtagaatagtttcaagtcaggtagcatgatgcctccagttttgtttttttttgcttaggattgtctttggttatatggggtcttctttgattccatatgaaatttaaagtagtttttttctaattatttgaagaatatcagttgtagtttgatgggaatagcattgaatctataaattactttggacagtatgaccattttcatgatattgattcttcctatccatgatgatgggattttttccattagtttgtgtccttcttatttcttggagcagtggtttgtagttctccttgaagaggtccttcacatctcttgttagctgtattcctagtattttattctctttgtagtcattgtgaatgggaattcattcatgatttggctctctgcttgtctattgttggtgtaaagtaatgcttgtgatttttgcacactgattttgtatcctgaaactttgctgaagttgcttatcagtttaaggagtttttgagctgagattatgttttttttttttaaatatacaatcatgtcatctgcaaacagagacaatttgatttcctctcttcctatttgaatatcctttatttctttctcttgcctgatttccctggccagatcttccaatactatgttgaataggagaggtgagagtgggcttccttgtcttgcaccagttttcaaagggaatgcttccagcttttgcccattcaatatattggctatgggtttgtcataaatggctcttattattttgagataagttccatcaatatctagtttactgagcgtttttaacatgaaacaatgttgaattttatcaaagaccttttatgcatctattgagataatcatgtggtttttgtctttggttctgtttatgtgatggattatgtttattgatttgtgtacattgaaccagctttgcatcaaggaaagaagcccacttgttcatggtggataagttttttgaggtgctgctggattcagtttgccagtgttttattgaagatttttgcatcaatgttcatcagggatattggtccgaagttttcttttttagttgtgtcacttccaggctttggtatcaggatgatactggcttcatagaatttgttagggaggagtctctccttttcaattgtttggaatactttcagaaggaatggtaccagctcctctttttacttctggtagaattcagctgtgaatccatttaatcctgggctttttttttttttggttggtagagtattaattactgcctcaatttcagaacttgttattggtctagtcagggatttgacttcttcctggtttagtcttgggagggtgtatgtgtccaggaatttatcagtttcttctagatttcctagtttatttgcgtggaggtgtttgtagtcttctctgatggtagtttgtatttctgcggtgttggtggtgatatcccctttatcatttttattgtgtctatttgattattctctcttttcttctttattcatctatctagcattctatctattttgttaattttaaaaaaaacaactcctgaattcattgatttttttggagcggggtttatgtctctatctccttcagttcttctctgatcttagttattttctgtcttctgctggcttttggattagtttgctcttgctcctctagctcttttacttgtaatattagggtgttgatttgagatctttctagctttctgatgtaggtatttagtgatataaatttccctcttaacactgctttagctgtgtcccagagattctggtatgttgtctcttcattgtcactggtttcaaagaacttattgatttctgtcttattttcatcatttacccaggagtcattgaggaataggttgttcaatttccatgtaattgtgtggttgagtgagtttcttaatcctgagttctaatttgattgcactgtagtctgagagactgttatgatttcagttcttttgcatttgctgaggagtgttttacttacaactatgtggtcggttttataataagtgccatgtggcacttagaagaatgtatattcttttgatttggggtgtagtgttctgtagatgtctattaggtctacttgagccagagctgagttcaagtcctgaatatccctcttaatattctgtcttgttgatatgtctaatattgacagtggggtgttaaagtctcccaatattattgtgtgggagtctaagaacttgttttatgaatctaggtggtcctgtattgggtgcatatatatttagaatagttagttcttcttgttgaattgttccctttaccattatgtaatgcccttctttgtcttttttgatctttgtcattttaaagtctgttttgtcagagactaggattgcaacccctgttttttttttttttttttgctttccatttgcttggtaaattttcctccatccctttattttgagcctatgtgtgtctttgcacatgagttgggtctcctgaatacagcacaccaatgggtcctgaatctttatccaatttgccactctgtgtctttttattggggcatttagcccatttacatttaaggtcagtatttttatgtgtgaatttgattctgttatcatgatgctatctggttattttgcacactagttgatgcagtttcttcatagtgtcattggtcttcatatttttgtgtgtttttgcagtggttggtaccagtttttcctttccagattaagtgcttctttgaggagctcttacaaggcaggcctggtggtaacaaaattccacagtatttgcttgtctggagaggattttatttatccttcacttatgaagcttagtttgtctagatatgaaattctgagttgaaaattcttttatctaagaatgctgaatattggcccccattgtcctctggctgtaaagtttctgctgaaaggtcttctgttagtctgatgggcttccctttgtaggtaaagcatagtgacctggcctttctctctggctgcccttaatattttttccttcatttcaaccttggagaatctgatgattatgtgtcttgaagttgaccttctcatgaagtatcttagtcgtgttctctgtatttcccgaatttgaattttggcctctcttgctaggtttaggaagttctcttggataatatccagaagtgtgttttccagcttgtttctgttctccccatctctttcaggtactccagtcaattgtagatttggttttttttataaagtcccatatttcttggaggcttttttcattccttttcattctcttttctctggtcttgtctgcatgccttatttcagcaagatggtgttcaaactctgatatcctttcttctgctcggttgatacttgcgtatgcttcacgaagttcttgtgccatgtttttcagctccatcaggtcgtttatgttcctctcttaactgattattctggttagcaattcctctttttatcaaggttcttagctgctttgcattgggttagaacgtgctcctttatctcagcgtagttttttattacccatcttctgaagcctacttctgtcaatttgtccatctcatcctctgtccagttctgtgcccttgctggagagacattgcaatcatttggaggagaagaggcactcttgccttttgggttttcagcgttttttttgttgattcttttgcatcttcatgagtttgtctagttttgatctttgaggctgctgatccttggatggggtttttatgggttttttttttttgttattgttgttgatgctgctgttgttgctttctgtttgtttctttttctttcaatggtcaggtccctcttctgtacggctgctgttgtttgctgggggttcacttcaggccctattggtctggttcacttccacacctagagatgtcactcaagaggctggagaacagcaaagatgcatgtctgctccttctgctggcatctctgaccttgaagggcactgacctgatgccaataggatcgctcctgtatagggtgtctgacatcccttttttagaatgtcaccagttgggttgcatggggaacaagacccatttaatgaagcactttgactatcccttggtggaaggggtgtgcttcgctggggggaaacccattcatctgggctgcctggatccttcagaactaccaggaggaaaggctaagtctgctggtccacagagactgcagccaccccttccgctaggggctcaggcccagggagatctaggttctgtccctgagtctttggctggagttattggagttcctgcagggaacccccacccagtgaggaaggatgagtcagggtcaggcctgaagaaacctctggccacagtctgccacagctgatgtgttgggctgtgggggatacatcttgggaccaagctgtccagcctccctggctccagcaggagaaaagcacagcctggagctatagagatggaggctgtccttccccagcgcaggaaggttagcgtgttaggctgttgtgagtcccagtgctggctgctgcccctcccccgaggagctcaaagggcttagacagcaggtagccacagctgtggtgctggtcactcctccgcaccaccaccccccgaccgccgagctccaaactccgtaggcttaagcagattccagctgagaggctgatgagaatctgcgagggtctgaggtggggatgctaggccctagtggtgtgggttcccaagtgggatcttccgatccatgagttgggcagttccatggaaaaatcactgtttccccagccgggtagcagctcactcactgcctcccttggctggcgggggtgggcactccccggccctgggaggctcttaagtgggccaccacacaacactgctcttccttcctctccgtggatcactccagccgcctagtcagttctgatgagagaacctggataccctggttgccagtgaagcactcacacacttattatatttctttttgatggaacctccgatcagggctgtttctagtcacccacccatcctggccccgcgccctcaggtagtactttatatcagtttgaaaacagactaatacagaataatttttctttaggggctttggaggaacgtggtctgccaacacactggttttggacttctctcctccagaacgtgagagaataattttttgttgtcacatgccaccctgttggtagtacttttgttatggcagccctaggaaactaatacagagtccctgtaataggcacaagctcacgtgtcctgaaggctacaggacttttaattccaccatttcagccaaggaccccaaataaacatttcccatgaggaagcctcccacgaccacaatttccttctctgtgtcctcttactctcttccttagggtccacgtttctttgtatcagggttgacattttaatacacattaaggattcatcaggaagtaagagattccatccaggaccacaaggcccacccatctttcttcccagagtcttccacttctcctcacctggtcaggtgggtcctgagatgcccagggctggatgccagacaccccagctgcccaggtactcctgccccgtagtgagacccacattttcaattcacggtggggtgaattttcaaagggaaccactttctttcatctttatctataggatatttcccaaataacatgtatgttactgagttcgtggacatcgtcaaagacagccagattctctttaaatatctgctgggcggccttcttccatagaattcaagaaaaaaaaaaatgactgtctggctatcgtcctctgtaaatcttgttctagcaagttctgcatccacttaactttatgaatttggattctgtggtttggattccatccccactcctccaccatccttttcccaatttaaaccattctaatctagaatttcaggcaaagttgggggctggggaagctaaatcgattgttttatttttgtctcttgctgccccctgctggtcaaattattgctttctttttctttttctttttcttttttctttttcctgtttaactcaggagatcaatggacaagtttctagggatgggtgggtgagggagaagcaagtgtcctagatgacaagacaatgtcagacaagtttcactacttgaggttctcggttttttttttaatgaagaaatggcaattgtgatatttaaaacatgtttagcttattggtctttttttttattttttaatttttaacactttttaagggacagggtcttgccctgttgcccaggctggaatgcagttgtgtgatcatagctcactgcagcctccacctactgggctcaagccatcctcccactcagcctcctgagtacctgggaccacaggcatgcaacaccacgtccagcttaattggtctttttaacacacacaaatacaatatactataatggtgcttccccagatcatttgatttctgaaattatcaacatgcactgctggtggtatggactagtgatgggtcacaatcttccttcaatctccttagcatgtcagggtctgcgactgcatccagcactgcacttagcactgaatttggggtgacagcgaggcactttgcaaccctctgatgggtttcctaccatagagctagggtgtggcctggactggtcctcagagagc

SEQ ID NO: 2792 - DNA, 11590 bp, Homo sapiens
ctacgttggtgaggctagtctcgaactcctgacctcaggtgatctgcccgccttggcctcccaaagtgctgggattacagacgtgagccaccgcgcccggcctgcttgtcattagttttatcacccaaccgtgactctcctggcattttagcctagtctttgccacttagaaaaagaaaaaattgacgcatcttgtaagttgctttaactctacaagttcaccttacgtgtctttctttttgttaaccttatttttttgaaagaacctaggacatttgacttacagtgtttctcactgtttggaacttgctgatttcatcctcagagtgcagtttgacatgttctctgtcccttttattccttgcaaattggttgctgaattcagaagttttatctgcctaggtctaatctttttggcaggattgcacacaatgttatattctctcattgagaagcacgtaatgcctgattgtctctctttttgtggcgtgagcagtgattactgttccatgtgtagattcatcaattcactagatgttgcaaaacagtaatcttctatcatttcttttttattaatttgtgggaatacttttcaaagaggtacctctcttcagcaagtatctgattcctcactattgtggtcgatatgggaaagcaagaacaaatgcttgattcatttcctttatttgactgttttcaatagaataaattagtttctgaacaactgaaaagaccattgaaggtaactgatcaattgttgtttttaaaatctaatctcacattttaaaattgagataaatgagagccagagatgttaagcacttaagatcacacagcactttggtggcagagctagggttagggtagtactcttctgcctcccaacttcattctaatcttctccttttggagcagaaccccagacctggaactctagtgtcaaaaatcattcatgagaaaatctgaaatgggtgataaaaattcaaagcattactcaacttcgtctgctgtttcatggccttcactgcgcagccttgcaggcaagtcgatactcatcgttaagagacaaacgcagcctgcagcttttgcagtgctcatgagaggggctcagctgccaaccttagaaattccgcctgttgtcagggggtcgtgggaatgtgcccaggttgctgtagggaggttttcagccctggctaccacaaagcactctcttgccaaatcctgtcttgctgattttcagcaggaaaatgggaagtcagagaagaaagcttcaacctgtcagtcagaagggaaatagccaagaaactgtcttctcaccatattaactatgttagcaagagacagagagagagagagagggagagaatttggtagaagttgggggaagagatggtggagaaaattatcaaacagttaaaaagaagggagagtatgttgtaatcatgtgtgcatgtgtgtgtgtgtgtgtgtgtgtgtgtgaaagagagagagagagagactgcctacagccttaagactgtctagcagtccatctgttcacacctacttatgtagctggtgacctcagacccaaccacttgtcctgctctgacccttctctgctcttcatctggctgccaccatcctcccccctcgaaggctcccagggtaaggggagagtgacggcagtggagaggggccagcgggagataaagacttgctattttatgtagagatgcaaatccctgctaacttgtgggttagagaaccagtcaaggacgggcacaaggctgctgcggataacttgggtctgtgtttgagatgcactgttgtggttaccctggctggaaatgagagttgcttggactggactcttgcaagttagatgaaacttgacagtgggagatacggcctgtaccaagtcagagaattaggaactttgggccaacaggtccccaaaagctgatcactctcgttctctttatgggcagaagattctggaggactttagccctgtacaaggggagagggcatagtaggcaagatgctatagtgaagtgttttgaaatttaaggatgtaaaatgaatttagggagttatgagcacaatattatgaaaaattaaatagaatatactgtacatcagaccaggttgctttacatggagaagcccttgagccagagggtgttgtccataggaaagactgaagaagtttggcaagactacctatgtgcttaggcactcatgggtagtgagcattcagacataagtggaattcactaggatgtactgggactctggtaggacaatttgaattatctctaaattgcgctaagcatgaattcatgcaggataactctgcctcctaacgctgatgctgacccagcctgtcaatatttacatttttgtgtttttctaagctagacctctgaagctgaaagcagaatgctgcttctaccctccagataaagtacaatatctattgtttcagaagactagatgccataggacaagaattgagctgttgtattacacttgccctcttttttatgttattattatttacccagagacaacgctgattaatctttaccaagaacaataggaaaagaaatatgattacatagtttgtttttttaggtagtaaaaagactttgacctggaattaaggagacttagattctcaacgcagttctttgttttatcacataactgctgtgccagtgcttttgataattatggtaatttggaaggagcacacctggctggaaatcctgcctttgcctcttactatgcgactcatgcaaattgtataatttctctggtcctcttttctcatctacaaagtagcatcccacctatcccacttcccttattgagtgttatatgtgtagcagtgttttaatctcaaagggctgtgtacatacagacgttggcgtttatgttggtaactgtgccgcagtcatctcatctgatctctaaaatgccccactcttgctcccctgacactgctgagaacttgcatatcttagctgggacacttctggtgtctgtctttcctgcccttcgctgtcttgaagcccaaacagaagtttctgagaacgagactgcaattgtcaattattcgtctttggtttttaaaatgtgcccaccatccagtcccctgggtgctcgttaccacagcacagcctaattacctgtagacagatgagacatgcttgaaactctgcgacttctgcctgcagccagcatgggttcctgcaaacaagggcctgtgaaaaataaagaagggctttatttctgctttcaaagtctgtgacttaggtgcctgaaaatatagttcaaacaaactaacaacaaaacccacaacaagcagctcaaagcaagaggctttagaacatttaaagaaagtgttctttctccaaaggtgtagtgagtgctcgcctcacgctttcctttagtggcgaacaatagttccgtaacttagcctcactgaggtccaattagtccaaattgtggtggagttggacttatggagtcacaagatcagattttggaaatgtgttctccatctctgccttgtgcctttccctttctgaccccctgtgccagacaggctgatcctaatcagcacagggaggcctgcaggcggctgagactatgaggtttatgattatgaggtcagggaccagcaactcaggactcatagaagagaagattttgggacaagaaaaaaggagcttataaaagcaaaaacaaaaacaaaaacaaaaaaacagaaacaaaaacaaacaaaaaacaaacaaacaaaaaaaccagatgccaaaaaaaaaagtgtgtgtgttggggaatcttactgagaagagagagaaagaaacagaggaggaaggggaagtgaaaatgttatgatggggtggaagggaggaagataggatctggagagaagcagaagatttcttgccccaaactcctgagagagagcaaaaacaaatacttttgagcaaaatcagttgtccccagatgtccttagatgctccatcggtgactccgatactgccagggagtcccacctgcagaatcacggttctctgcctacacaagaccctggaaccagtccccttctgtttgtccctgctccacccgccagtagcacctgcagaccacatcccctaagagcagtgcagccatgtcttcttcttgagagctggaagagcacatgcttcctgagggtttgaggaaagacaaagaagatctagaaagaagatgctggcaaagagaacttccagatcactttacgtagggagaggctgtgctagagtgaagagagcagacagtgtgtcattagaagacatgagatcaggcccacactctgccacttaattaccaagtgacttctaggcaagctttattttatttatttatatttacctgtaagacacctctccatcttcatgcctacctaatggtttgagaaaatggatgaaacccccaaagtgccttgtatacctctgatagcacatctcactgcctcatggttaaatatttgaataacttatcttctttttttttttttaagacggagtcttgctctgtcacccaggctggagtgcagtggcatgatctcggctcactgcaagctccacctcccgggttcatgccattctcctgcctcagcctcccgagtagctgggactataggcgcccgccaccacacccggctaattttttgtatatttagtagagacggtatttcaccgtgttagccaggatggtctcgatctcctgatctcgtgatccgcccccctcagcctcccaaagtgctgggattacaggtgtgagccaccgcacccggcaacttatcttctttagtaggttatgtgttcattgagggcaggatgcttacagatttatcacctaccatggtgcctggcatatagcaggtataataaatatctgcaacagatagctaataattaaataaatgaggaagatgatggctttgggaatcctggtaggtagagctctcgaaatcataatgtcagctctggaacaaatctggtattatttaggtttgatgtagcagttgtgggcttggtattattggcttaagttacattcccccagagatttagaaatacccaatgaccacttgcacattcctgattttttcattttcaattaaggaattaatttaattttgccattttatcattattattttttgaggcagggtcttgctctgtcacacaggctggagtgcagaacatggctcactgcagccttgacttccagggcttcagtgatcctcccacctcagcctctctactagctgggactacaggtgtgcaccaccatgcttgggtaatttttgtatttttttggtagagatggggttttgccatattgtcaggctggtcttgaactcctgggctcaagcaatccgcctgcctcaccctccaattttgatgttttttaggttaaaaatattttattattttgaaaacaattattatgaacaagtgaaatctataatgatactacttaatacaacatagaaaattatgttatatataaatacatgtgttgtatatatatgtaatacatatacatacacagagatacataatgtggtaagtgtatgtgtatttttattccacttccagcaaatgtatgcaaaagttatcataaactagttaatatacagtggatatatgtttatatttgtaattagttgcatttcttttttagtggaaatataacaatttccttagtcattttgttatttggtgttttgattgttgtcaacttttcacttaaataaacattttctcttgcagaataaataataattattgctgttaaagaaaaactaaagccatttgttgtgtgcctatcatgtgcaaggcactgtacttgacactttacctgtggtgtatcagttaatgttcacaatgcatgatgtgcatattatttttcctctttcatgcagaaagagactaagcccagagaagtcagtagttcagctaaatcacacaagccagtgaatacagagtacagagccaggattcatgctcaggtctgcctaactccaatgcccccactcctccaaactacaacactcttaggagcaggattgtaaggtcaaaagatatcactagttttatggttctaactacattttcccacattgctttccaaaaatgttgtgctgatatagaaaacccagccctgaaaacataacattttctccataattttgtctgatttcatattttaagctaagaaaccctaaagacccatatgccctctcttcattttttaataaaaaaaaactaaagtttttatttttgagatggagttttgctcttgtggcccaggctggagtgcagtggcgcgatctcggcttactgcaacgtctacctcctgggttcaagtgattctcctgtctcagcctcccgagtagctgggaatacaggcacatgtcatcacgcccggctaatttttgtatttttagtagcgatggggtttcatcatattggtcaggctggtctcgaactcctgacttcaggaaatccatccacctcggcctcccaaagtgctgggattacaggcgtgagccaccgcacccagcctgcactctcttttttactttacaagtgctgcacttagagccaaattcatcttgagcttgagtattacctccctggaatggacctcgattatatcacagtctgccctgagctcacctggtcctggactctccctcttattcaaaggtggatttcctgctctccaaaccaacaatgaaatttccacccctgccttccctcttatcattccctttatctctctgagaaatggagcaaagcatattctgtccatgggagagattaggggctctctgctttctttgacctctttgtatttccttcattgcattaatggcagtgctggggtaacgtgtatcggagagagaactgatcaataaacatcaggaagtgtaattatggggtaaggaggcattgggaaacgtctgtaaaaattcagggtccatttgcccatattttttttttaatggaggcatgaatttaatgttccacatgggaaggaaccagaggaactacatggggtttacttctatttgttccctctctgaagagctgcaggatacatgaggtaccttcaaatccttcaacccataggtcttcgcctgaggagtaggcagatcctgcacagataaatgttcagaggtcatccaggaccgcagtcccacccccaccccagcttccaagaagaggggctgcacagagcaagctcccgatgggaggcagttctctgaccttcactgactcatgcttttcaattgcatcttctgtagcccttgcgcaagaatgaccttgggtggcttagtagtcagataggactgtatctgcagaaccaagtcagaaaaaagtggttgttctgagaagacgcagctcaagtcatcatttattcaaggttgtctaatgaaaacacgtggctattatctgtacagtggatgatctcagaaggacttagaagaaactgttagtggtcttagaaatccatcatcatcatcatttttttttttttttgagacagagtcttgctctgttgcccaggctgcaatgaagtggcaggatcttggctcactgcaacctccgcctcccaggttcaaacaattctcctgcctcagcttcctgagtagctgggactacaggtgcgtaccaccatgcctggctaatttttgtatttttagtagagacagggttttgccatgttagccaggctggtgttgaactcctgacctcaggtgatccacccgctttggcctcccaaagtgttgggattacaggcatgagccacctagtccagcccaatcatcatcatcattataataataattattattcttactagtatttattgagcacttattgtgtgccagggacagtgttacgtactctgcaccacatctcacttaattcttccaacaaccttctgtgatagtaccagtattattatgtttttatagatgaatgcttagctccctctcttattgatatgctttgttcaaatgtaattttccttatggggcttactctgactaccctatgtcatccctatcccccttgtctttgcatagctctcgccaccttccaacctgtttttttatttacttaatcattatgtccattgcttagctcccaccctctacccatgagaatgtttgctccccaaggagaaagattttgctgtgttttgttcagaacagtgtctgattcatataactactcagtaaacttattctaaggataaatgaacagatgagtaaaccacgattgagataatgagcaaatctcttaatgtccctcaataactggatagtggagcagggatggagatgagtctcgctctagagccttggggtttcgccaccccacaacattgactctctttcagaagatattctcacctacacacatgccctttgaaaggtagttcatatttgctaaaacacattcagaatggcctactggcgtcttggagaagcaggtttgtatgaaaggcccctaaggctgccaggctgccttttcttttttttcttttttcttttctttttctttcttttttttttttttttttttttttttgagacagagtctggctctgtcgccaggctggagtgcagtggcgcgatcttggatcactgcaacctccgccaaccaggttcaagcgattctcttgccttagcttcccgagtagctgggactacaggtgtgcaccaccacacccagctaatttttgtattttcagtagagacagggtttcaccgtgtttgccaggatggtctcgatttcttgatctcatgatccgcctgcctcggcctcccaaagtgctgggattacaggcgtgagccaccgtgaccagccaaggctgccttttctttgggccccatttatctgaaattccaaaggcttgtctaggtcttgtggtgacattgctatcttttcagtcaatgcacagcagagccagggggtgcttggtcttgggatgaagctctgtattctcggtggccttcaggacgccttaggtcttggtcaggtgaagatcatttttatcattaaggtctttgatctgggtagcatgcaattctctgccagggtaaataaatgtcgttaggttctcagacactcttttccaagccactcacttctttctgcaattctttgtgtgttaaaaagatttaatagcgactctcctgttagtctactgtttaatggactaactttgtcattatgcctcataggcaaaatggtgactttgaaacttgctattagtgttttctattaaaatatagtcactattactttttggaccaatatgcatcttgggagttctaggtatcatgcacatacacacagccttttttcaaaaaccacatatctgccattgcagtagctcagccaacagttaaattggtatcttattactgaggtttctttagtttttgtctattgcatcaggctcttgtaggttttagaaataaataaaaatggttttagcttgggttgaaagaggattttcccctagaactgatttcactataatgtatagcttaatacaaaacctagcatgctgaatacagttagtcttcaaagtggattagggttggtgtgctttgggcatttccaaggcattagttacagtacattgaattagctataccagttgcttctcctgtaatgaaaggtgtagaaagatcccctgcttgaatagaaggccaaaatgccatcttttaacttctattgggtgtgatggagatgataactgaatgggcaaaaccactcctgttgtaaaggagcaatgaagcattctctagttcctttagaaaaggcaagtacagaaatctgagatgctgaccagcccaagagttctattcatactagtgataataatgatatgataaagataatgatcataattataccaattgttaccattttctactccccgctactccacaggtcttaaaataaataaacctctattttaagctattaacttgacctcagtctttattcatgtttttctgtgtgtatgagtagggagctactgaaatgataattggatttcataaatgcagcctgtgtggcactgtttagaaaaggtagagttttatagtgccctatggtggctgtgtgatgagtccctgtagccaggcataacttgttgcctgaatggatgtcattacattagtgatgaaagtgtgatgactatacacatgattgcagacataaaaatgaagtaaccatggactttttttttagcatgtgctatgtgctagtgactgagctaagtgctttatgtgtattatctgtttatcttccacaataagcccttgagatgggcactattattattaatctgatttttcacattggttaactgaggcactgagagatgaatgaacttgctaataagtggtgaatccaggatttgaactcagattttctaaatccagaacccttgtaattcacttatgggagacgaagtaactatcaatgaagtgcaagggtacattaatctcaaacaggtcatgtgacggatattaagaatgtgtaggcagggtgcagtggcttaagcctgtaatcccagcactttcggaggccgagatgggcggaccacgaggtcgggagttcaagaccattctggccaacatggtgaaaccccgtctctactaaaaatacaaaaattagctggacgtggtggtgtgtgcctgtaatcccagctactcaggggactgaggcaggagaatcactttaacctgggaggcagaggttgcggtgagctgagatcgcgccattgcactctagcctggctgacagagtgagactccgtttcaaagaaaaaagaaaaaaagaatgtgtaatggtattttgtacaggcacatgcaatcattgtgtagtataggtgcattcaggacttatcaaatcaggtactaacttaggactgagatgttgacatgaaagtctgaaatcactccacactgggggagaccaagcaaatcacgtgagaacataagctctggcatcagcattgatgtttacaaattatacaaatgtagtaaatgatcacacatacccccaaaatatgcacacctatcatatttcaatgaaacaaacaggctgggcgcaatggcccatgcctgtaatcccagcactttgggaggccaagaggggcgggtcacttgaggtcaggagttcgagaccagcctggacaacatggagaaaccctgtctgcacgaaaaatataaaaatgagtctggtgtggtagtgtgtgcctataattccagctactcgggaggctgagtataagatcacttgaacataggaggtggaggttgcagtgagcaacctgtagctgtggctacaggcacatgcctctatgcctggctaatttttaaaattattttttgtagagatcaggtcttgctatgttgcccaggctggtctcaaactcctgtcctcaagcagccctcccaccttggcctcccgaagtgctgggattataggaatgaaccactatgccc

SEQ ID NO: 2793 - DNA, 929 bp, Homo sapiens
cttttataaaattgcagagatcaacttgcttcaaaatagaaatgatgggagggaattaaactacttttcttgccttctgtttattgcattccatgtggtttgcttattacatgccctggttataacttggctgattttgccctttcttttctgtttttccatgcggctgtcattttgtgtgtaatgcgactgtcttgcccttttcttggtctgtggattgcagtggcaccctgtgctgcgcacactaaagaaccgcattgaagagaacactggccacaccttcaactccttactctgcaatctttatcgcaatgagaaggacagcgtggactggcacagtgatgatgaaccctcactagggaggtgccccattattgcttcactaagttttggtgccacacgcacatttgagatgagaaagaagccaccaccagaagagaatggagactacacatatgtggaaagagtgaagatacccttggatcatgggaccttgttaatcatggaaggagcgacacaagctgactggcagcatcgagtgcccaaagaataccactctagagaaccgagagtgaacctgacctttcggacagtctatccagaccctcgaggggcaccctggtgacgtcagagctttgagagagaagcttcactgaaacggagcaaaccttccactgagaagccacttcaagaggctggtgctgctagatctcatgatgtggctgttgggaagatggtggggtttgtttgccagcttggagtcctattaaatgaaagccagcaactcatgttggtaataggtctactgtgggaacagttatccctaaccacagctcaaaatcgctatcatctttaggcaaattaaaatctatgtggcagtgctcatggatgattttgttctaagcagttttcctcctgccctcccccgc

SEQ ID NO: 2794 - DNA, 4064 bp, Homo sapiens
actgaggctcagaggaaggacgcctacctgctggattacctgggcagctaatttcccacccaaacacagcatttctcccacgactttatgttggcgtgaaatattcgctgacggcatcttgtcacatcgttcaagtgtcatgctgtgacagaagactctgagacgtaatcttcgctgacgatagcagggaaagaaaaacttgacgtgtggaatacagagggaggagattttaacattatggcagggaggcatcagaatcgtagttttcctcttccaggagttcagtcaagtggtcaagtacatgcatttggaaattgttcagacagtgatattttggaggaggatgctgaagtgtatgaacttcgatccagaggaaaagagaaagtccgaagaagtacatcaagagatagacttgacgacattatagtattaacaaaagatatacaagaaggagatacattaaatgcaatagcccttcagtactgttgtacggtctatcaaaattccagtaaaaaagttcagttccttgaccgaaacactttgtcctccaaaaggaagacagacttcacgtcattcatctgttcaatactcttccgaacaacaggaaattttgccagctaatgattctcttgcttacagtgactcagctggtagctttttaaaagaagtagaccgagacatagaacaaatagtaaagtgtacagacaataagagagagaacctcaatgaggtagtatcggccttaacagcacaacaaatgcgttttgaacctgataacaaaaacactcaacgtaaagacccctattatggagcagactggggaatagggtggtggacagctgtagtgataatgttgatagtaggtataataacaccagtgttttatttgttgtattatgaaattttagctaaggtggatgttagtcatcattcaacagtggactcttcacatttacattcaaaaatcacacccccatcacagcagagagaaatggaaaatggaattgtgccaactaaaggaatacatttcagccaacaagatgatcataaactgtatagtcaagattctcagtcacctgctgctcaacaggaaacatagcaattagctcataatcaaatgttagtggtcacatgtgcatctggaatgtggtgaatcagttatatccaataatagcttcaaaggcagaatttagagagattgaggatgcttttgtttttaacaaaagggtttcacactttgaaaattttttgagcaactagttgttgatgttgagagcagttgatccataaatctggtgtgtgaatgtttcaagcagaaattaatttaaatgtgtgtttaggaagtacttaacttggaagatgtatcatttttcttaaaatgcatgtttaaattttatttttttaagtaatttttaaaaagtttattaatgttaaatttatgatgcagaatgatagcatcagatgtctgcagctgaaaaaaatttactactatgaacccccaaaatattcagttgcaagaaaatttgattctaaaattattcatggtaggatacgtaacacaccccttcaaaacttttaaaaaatacatttagcacatgtgctatgaaagcatacgtacaaagagaaaggggaaagtgatttataattcctacaacagaggccaagaaatagattaaaatattttcaagaccccaaaataatgtattatggttgggaagtcagtagaacactggaataggtgaagacctgacagtaatttttgtcttaagaatgctttctttaggacagaccctttaacctcacctctgtgcatctgtttttaaaatgattatatttgcctctgatatttgaaagcacttttgtagttttgatgatgaaaaatatattaaacgtgcatattaccattatttaggaaataattccttatatactgtgataaatcattgctgttacatacagtaacatgccttaattacatttaatgccttactgctttatgtaagtaaatccaagtttcagaattaaaaataagcattatttcatatggtccaatcagattcgttacataggctatataaatttgtctccattttcaccatcaagcacaaataattgggtcaaaactgcctttgaggtctgttgaagaaaatggttcattaagcaaaaaagagtagaggtattttatattagcagtaacagacaaattatttagtaatcccttaacctctgtttttcaaagagaaaatatccaatttagacttttttcctgatctctatatatagcatcaaattgggaaacaaaggccaaaggtgtatagattgcttgaaagggggtggtagtgcctctttttaagatctgttgagtcggctacagtctggctaagtaagaagcatttgcatactgattccatcatttaatctttaaaagtatgtgttttaaaaatgtaaccagaatgattcttcaatagaaatgagatttggtggagtctggattgcctgttttgtatataatatatacttaagatatataataccacctcattttctgggcattatttcctaattgttgatgtttcaggcttttgataagtcattttatatatttcaaatttaactcagaataagtaaatatttatggcaaatgcagttttatgtactttcaggagaagaccatcaggaaaagacaggacaaagaagtcaaacattaaagcccttgcaaatattagaggaccttagacaattaccaaaaagtgtttaatagggaagttgcaaatgattctcttagtaaattaaacatttaaaaagtagttttaatgtgccttgggcatcttgaaaagaagagtgtgatataatttatgcttagtgttaactggtcattttacattgtatttattaagtctgctgaaaaatgaggttttaaggaagaaaatgcagattattttagggtaaacaggccaggtgtcctttgaagaactttgtttacatcaaattgatgaaattacagtcagtgattccttactttttttgctagttgtactttgaaattgttatgggttcgatttccaaaatatgtaacttattttttaaaggaataaggtgtgctgtgtatttgttgattaaaaatcatttgtcttgcagagtatccttttttgaaggaaatatacatccttataacacatcaggtagttttcttttttctgtatttaaattatatatttgaattaattgaatataatttgagttacatataattctatataaaggttacatattgaattatggttctaatctgtttaggaaagaaatgaattttctaagcatttaatacatttggaataattttagtttctaaaaagtactaatgtaagttaagtttatatcaaatgcaaattaccttgtataactaacaagcacagttattgtttaacattatggattttaattgtgttgacacccttctttgaatttgttgctttacatgtgtgtctgtgtgtgtgtctgcatgtgtgcacgcatgtacttgtatgcaatgtaaaagtaacagcagaatcattgcatttggtttacttaaaattttggagttagcaagtaaacaaaaagctgatagttttatgaagtctcggttaaaataaaatttctttgctatctcactcctaggaagttatggagttcatattttcaaaagatatgttaaaaatggttacacactctgctggccacattaaaaattagaagactcatgttaaattatctcctccaaaggactttttatttacagcttttcttttcctggactctacctgcttggttcagtgtcctgaagagttatttaaatgaaccactacttagtaattagttcttttttaaagtatctacttctaaaattacctagttgaaaatatgaaggatatgcttagttttagaaatatcatgaagcaaggatctagtcagtgttacagggtaaaggtggagttttttaaagtctgtatttaaatggtgcactgatggattcatttttaatttgcattacaaaaatgttgctcaggtaatcagtattttcttcc

SEQ ID NO: 2795 - DNA, 3613 bp, Homo sapiens
aataaagttgtcactgcaggtggctactgatgtgtgacagtgtgttctgcatcaaatcaaatgctgaataagattgaagaggggaaaggcatagagaaaaaggggagaagacactcttgcaaaagaagggagaaacagaagcaatagctccttacatttcctcagaaagggagagtgagaaagcttgattattttctaggaaatggtatgtagaaaggtttggcaggaggtgagtttatgagggaatttgaaagtattaaagggaaaattacttctctgaaaaagcaagaagagtacagagacacaagagccaaggagaagaaagttttgttatgaacatgcttgaagttttgccgacattctggacatatgtaaacagagtgctcaatggaacatctgtctgctgcaggataagaaaagaggccattgatgacagaggagaaaaagaatctggattgcacattatcgtaggagccaaatgaacagaaagtcttaagaagaaaggatggccaggcgtggtggctcatacctgtaatcccagcactttgagaggccgaggcaagtggatcacctgaggtcgggagttcgagaccagcctcaccaacatggagaaaccccatctctactaaaaatacaaaattagccaggcatggtggtgcatgcctgtagtctcagctactcaggaggctgaggcaagagaatcacttgaacccaggaggcagaggttgcagtgagctgagctcacaccatggcactccagcctgggcaacaagagtgaaattccgtctcaaaaaaaagaagaagaagaagaagaaggaagggtgttttcaaccatactaaaagctgggagtgtgtgcacattaaggagaatgtaaagggagaacagttcatgggtcttgggaatttgttggttcaaaaagcatgatgagttcaagaccacagggaaacacaggtgttgagaggtataaaccaattccttgttccatttctgtaaggacttggaagagatcaacatgttagtaatttaacagaggggaaaggctcttctgggtcaacactaaaatttttaaaaacatacttaacgttaagatgttttaggggaaaaagcgatgaatgctgctgaaagtcagcaagaggcactataattagaagtcatatctagaaacaaacatctgagaggcagtggatttgtccttttgcaagctctaattcttctttttttatttgtagagtggtttttctttaaaaaaaatttaaaataaaagaatgtagagtagaatgagaatgatgaggagatggaccattctgaatttgacatttttgccttttgtggtcatagctaagcctaagtaagtatgagcctgaggctttatttccttgacttctctgccctactaatcaagggctacgtattgaaagtgctgaacaatggaagaatcggaagagggaaaccctttaggactgtaccttttactctatttatgtctatccccaaacctatcgaggcctaaccccttccattattcccaccagtcaagcactattagcggcctcccttgttctttctcatgcaaggaaggagctacagatatgttggcttacagttgacaacttagaggatgatgtttgatgttgagcctgtactttcttttttttctttttttttcgagatggagtctcactctgttgcctaggcgggagtgcagtggcgggatcttggctcactgcaacctccacacctcccaggttcaagcgattctcctgcctcagcctcccgagtagctgggattataggcgcgcaccaccatgcctggctaatttttgtagttttagtagagacagggtttcaccatgttggccaggctggtcttgaactcctgaccttaggtgagccacccacctcagcatcccaaagtgcttatacttactttctgaatataaaataaacttgtcaattatgtggtttttaagagagagacaagggacctttaataaaagacacttctgaggaacgttttcattgtgttaatattttaaattacggtttagtttggaacacattcagaacctatctctacatcgtctttgtctattgaaagatttatatgtttgtatatgtacgtgtatttattcaccgtttcattttgcaggagtaagacttgtgtggttggcctcagtctttccacagacatcttgtaagaggatatggtttccccagtccctttgaagttacatttggccgtatgacatgttttggccaatagaatgtgggtagaagtagtgtaaagcactttcagactgaaggcttaaagcctagtatgtaattcaacccacttctcttccctctatcatggcatctggtaattccccagatggcagcttctgtatctgcctgatcctggagggaggaccacatggaacagagatcccaatcaacccatcattgacatatagcttgagagagaaacattttgttgtaataagccactgagatttgtacctgtggtacagctttcaagaacttgttcttatgggtttaaaaatattcttgattcctgtgactgagtcatattcttggtaaccttcccagcctccagtcctgctacctgctgataccaaacagctgcctgcctgctttttttagcattttattctgcataatgtgttgcaaggctcctaactgcttatgtcaccccagttttatattgtacttatctgacccttgcttatctattacttgttactgcactttccagagatcctcttccctctcatagcctggactacccagaccctatatgtgtgccatcccctaagcatctagctcaccccagtgttttgcttttgccagtttctatggaattagcaatgcccaacaatgtctcttgatgtgattaacctaaatgactctaaactaattgagggtagggttcatgtcagattcaacactgtaaatacctcctgtcttagaacaggtgttctataaacattaaatgaataaatgcacacttgtatcgaatttcattaaaatttattcgagtttattcaaattagagaaagatttccacctgttaagtagattggcttccattgtgtttcaaattaaaccacaaattaaatttaaggtagagtgtcttttggtaaattttatcaaaatcattcaaattttttacaaacaaagcaaaaccagtcattgctgtctgattggacatcaagaggtaaaaccattatttttgcaagcttttgcaagccatttaaaaaatctttagtaattcagtataagtaactgcagaacatacctctggtacatcatattccatctcattggcccatctctgatttcagctgtaattagaacagacagttcagtgcaaatgcttgccttctgctttttgcctcaggctattttccaggtaggagccttctagcaaggtcagaaaccaggaagtgttggtctttactacctcttggaggaaccctcagccaatggatgaagggagacactgaatgcatctcaggcattctgagtactttccaggtggtctggcaaatcaaacccgttttccacagctagaaacttgatattgaacctttatattgacctttctttttt

SEQ ID NO: 2796 - DNA, 2112 bp, Homo sapiens
cttgctctcccctgaccccagaggccctacgatctggcctcagcctcctttggatccttatttctctctgcacctgcatccgaggcaggagcctgttcccggaacacccctcactcagctgcctctgcagtgctgctgtagaccccgcctgctggaacacccttccccccaccctcactgcactccccccacctcatccctgtttcacaccctttccttagtgctagcccctcccagcctttccctggaattccgctcctggctctgcccgccttcagtgcttgatctgggctgagctggggatatgaaacaccgtaataatgatgtgtgtgcatttcttgcttcccaactagcttgtatgtttcctgaaggcaagaactttgtcaggttcatctctgttcctcacagcaccctcaacgtcgtaggggctaaagacaggtttgtgaaataatggtaacacaaggtcaggcaggtcaacagcttagtaatgtcagctcagcaatttgatcctgcagtgggcatcacctgcgtcagatgtggagcactgcggggaaggtgctttatgttccagaggcagcaagggacatctgagcacaggcctcagacttggccattttgatagcacctatggtgggttacatctcttgagcttggtaagagatttctaaatatcggagaaaagcatttagaaaccatcctgaggtgtgagccactgtgccctgtcctgcttctcatttttaaggtgaggaggcgattaagactttacaaattaatgcttctgtcttaagttggggcagaccctggggttcaggcttggtgtgagagttggaaacacactttctctactcatctttattcaggatgcaacagggctttctggcctttaatcacaaaactgtcttcgatttcatgagctggccatgctgagtagaaggatatgtttgcctcaccaagggagatttagagattcctgaaagattgtccacgtgtttaagtagttgaggttattcagccatttgcaggttttatgaaagtcctccaggaaatagctcattttaaagctgatatttttttgacgatgcctttagcaataggcagaaataaaggggctttaaaccagaactgctatttatctttattttcatcttaaaaaaagttgaaagattaaacttgatggattgccactgatgctttttcacagtgggtttctgagcaggtcactcttcacctcttggttttctttttaagtagaaaagaggtatctggtagctctagattgtggcttctgtgaagacagaagtccattctggtcttatccaccactgtatctgctatgcctggcactgtgcaaaccatataggaggtgcttcatccgtttgctggatggggagttcagttgagtgtcagcttagtttccaggtactcgaggcaggcagtggtgtttgccgtctccattgagtgtatgggattttcaccaatcaatttgaaacaggtcatttctccacccattggactttactagtctttgagtttgaaaatagatttggaccagccctgaagacactggtagaaccctgggaaaggctccaggtgacttacaaagcttctcttaaccagcagcgctgaaggaacaatatcgtccttccctcacttcagagggtggccagagctgaatacccagagagggacaagtaagggtccagttccaaaacatcatgaggatgtatcatcccacgtgtctcacctgacagttacagaggaaacccgcacccagaatgcacgtgctgtcttatgggaacactcagcgcagagtgctcaggtctggccacacttgggctgtgcttggtcgtgccatggaattcctcaggactttctcagcctccctaatggcagaagcccctttacagcaagacatttaccgtttgtctgaaaatagccgaactgagccttttcttcaggctatatgagaagtctctagacagtgggcaccgtcagaaagcccagagccttgtgatagctcccaccctgcctggctcagatcttcccatttttttcctctggcactaacctcaccttttgtttttttgtgtttgtgtttgtttttgtttttgc

SEQ ID NO: 2797 - DNA, 3037 bp, Homo sapiens
ttgaacccagaggccatgggcaccggagacctggacctcctatcagccttccgccgcactccctcactgcagcctcactgggggtccctctccatagtgatagccatgaggacactgggattctggacttcagctcactgctgaaaaagagagacagtttccggaccccgaggtgagtgcccaacatagcacagcaccctcatcacccctaattctgccaggagcccctccagatccccagcccctcttcagctcccttggcccccagtcctgcctggcctgggacccagagcagctccagctgccccaccagaagggaaggggcagagggacaggggtggctacagctccttggtcctgggcccaggaagccccgcccagggggctgcagtcttgcccccggccacagcctagactgcgggacacagggactcgaagctggaggcaccagcagaggaggacgtgtgggagatcctacggcaggcacccccatctgagtacgagcgcatcgccttccagtacggcgtcactgacctgcgcggcatgctaaagaggctcaagggcatgaggcgcgatgagaagaagagcacaggttagcccttcctcagaggggagaggagagggcacaggctagcccttccctacacaggagaggagagggcataggttagcccttccccacaggggagaggagagggcacaggttagccccccacctcgtccacatacatggaaagagcggagtccggcttagcacagagactcacaggaaagaagagcccaggttaacccctccttgtgtagaaaaagccaagaatgcccaggttagccccttaccacagagatagaagagaagagcaaaagttaggccaggacagccacaaggaaaaggacagagctcaggttaaccctcctcaccaaggaaaaatcaggctacactttctttctctaccctcttctgaaaagaaatgaagcccggttaaccctctccacacccaaaagaaaagggaagaggcccgctaagcctggagagccacacacaggcaaagaaaagagcctggctaatctttctctcaggcaaacaaagcaggagggcttgggttaactaccctcacccccaggcagatggaaagaggagagcccaggaatagcccttctccactgaggggttgacaagggcgggtgtgagccgggaaagcaggggtctcacatgccttctccccaccatgtctgggtctagcacagggcctggcacacacctcgagcgctctataaacaccgactgaatggaggggtcagcttccatgcaggatatgggagacaagcccctcccaaagcacacacacaaaacacacacgatcatggggacggggagaggagctggttagtccctccctgctgacctcccccaggccccttatccctctgccctgcctccctgttgtctcagcctcactgggtttcccatcaccccatcgctaggtggcctggcccttaccggcaccgtggccccatttaagccagggatcccctgaatgccaccaatgttcctctgggttaactcctgaactgctgagcccagagggcaccaagcaaaggactgtaggtgcccaaggaggaaaagatggaggctggcaaggcagatggggacctccgagggtaggggtgtcttccaggaatagcaacaacagtaaaaagagcaaattgctggccaggtgcagtggctcacgcctgtaatcccagcactttgggaggccgaggcaggtggatcacctgaggttaggcgttcaagaccagcctgaccaacatggtgaaaccccgtctctactaaaaatacaaaattacctgggcatggtggcaggcgcctgtaatcccagctactccggaggctgaggcaggagaatcacttgaacccgggaggcagaggttgcagtgagtcaggattgtgccattgcactccaacctgggtgacagaatgagactccatctcaaaaaaagtgagtgagttccttcctaagccagccactaggtgctttatgtaattatctcatttaattctcgaaacaacactatgatggaaggactattaccatttccatgttactgaggaaaccgaggcacagagggtttaaggaactagcgcaaggtcacagagcacccagcagtagatctctgcccctccgcagctgactccaggcccagccagagtatttgaggactcaggggtccttctctgctcggtggatggagcccccacttcctccctgggctcagcagcagcaacatgggcttttacaaacacggccgcaagaggaggcattgttgtggagcagggctgggctcaagacccagctctgccacacacctgctgggctggtggcattgggccagtcgcctctctgagccctatttcccccactgcagcagcatggggaccaccgcactggccctgggggctgagatgggagtgagagtgctgggcacagagggctgctaggtgggagcgcctgggaagagtacacaactcaggggttgctgagagaagagaaggcacagctgtcccagccccagttctcctgacaagcttctgtctttctggaagcccctaacccaatccctgagctgagcaggtggagaggaccccaaggaagacagaaggacaaggtcagacagacagagacaaggaggtgggttgacacatagacacagataaagaaatgaagacaccatgcctgtaatcccagcactttgggaggctgaggcgggcgcatcacctgaggtcaggatttcaagaccagcccggccaacatggtaaaaccccgtctctactaaaaatacaaaaattagctgggcgtggtggcacatgcctgtaatcccagctactcgggaggccgaggcaggagaatcacttgaacctgggaggcagaggttgcagtgagccaagatggcgccattgcactccagcctggccaacagagcaagactctgtccaaaaaacaaacaaacagacaaacaaacaaaacaaaaagaaatagag

SEQ ID NO: 2798 - DNA, 949 bp, Homo sapiens
gttcagtctcattctgtgaatagtttcctacaatcctttgagccctcagagattaagtttagcaggtttccaaaaaaaagcagcccgtggcccttcatctgtgtccgtctttttctctttctgtctccaggcagcagaagcatttctagttcatctctttgaggacgcctatctcctcaccttacatgcaggccgagttactctcttcccaaaggatgtgcaactggcccggaggatccggggccttgaggagggactcggctgagctcctgcacccagtgtttctgtcagtctttcctgctcagccaggggggatgataccggggactctccagagccatgactagatccaatggattctgcgatgctgtctggactttgctgtctctgaacagtatgtgtgtgttgctttaaatatttttcttttttttgagaaggagaagactgcatgactttcctctgtaacagaggtaatatatgagacaatcaacaccgttccaaaggcctgaaaataattttcagataaagagactccaaggttgactttagtttgtgagttactcatgtgactatttgaggattttgaaaacatcagatttgctgtggtatgggagaaaaggctatgtacttattattttagctctttctgtaatatttacattttttaccatatgtacatttgtacttttattttacacataagggaaaaaataagaccactttgagcagttgcctggaaggctgggcatttccatcatatagacctctgcccttcagagtagcctcaccattagtggcagcatcatgtaactgagtggactgtgcttgtcaacggatgtgtagcttttcagaaacttaattggggatgaatagaaaacctgtaagctttgatgttctggttacttctagtaaattcctgtcaaaatcaattcagaaattctaacttgga

SEQ ID NO: 2799 - DNA, 3312 bp, Homo sapiens
tgacagggcatgtggaatggaatttgcataaaacttatcaccaaattctggaggattctcttcaccccctctccacttcctccattatttcttaatgggacaaaaagtgatccaaaaacaaccaatgaattgtgtatttcttgcatgcctttgatatgcaggcacagagctacaagctacatgtccctggcccctctccctaggagcacagagttccagtgaagaacctaaagcacaaacactgacagctgtaagatgaggaaacagaagctgggatatgtgagtaaacatttccaaggtcctgcagctaatcaatggttgacaacttctttcctctgcctatgttgccatccatgtcatggtttgtgtcaagactctaggagaagtctaccatcagcaccacagctactgtgcacaaatccagaatgccagactgaagtcagaaggaaagatcctttatatattgaaagaagaaagtagaaccatttctgggtcccagctgtgggaagagctcctgtggctgtgaattctgacttctgggtcttggcacaaggtgtggccagcaagctaagctgtcctgagggtgtgcagggccaggggctgaagacagtgttggagcatccacagactggtttgtctcaagaagcatgttactaaatatgaaatagcaaaatctgcaagtgggtttacttttcccccatagattagaatggattcaatattatctctttattagcgtcacttttaatcacttgtataacaagtaggacagaaaggtggcttgaaagtcaatcatgtgagaattccagataaattgactttgctcacaacaatctgttattcatgtgactatcaactgtcatgtgtgctggggcaaaaaaagaagataaggattcactggtatcagatagttccaggaggggaaacccaggattgaactttttcagccttctatggtaaaatttcctgctctgtcggtgcgccaaagcttttttcagtttcctaaactcccatattcaagaagataagctattttctcttctttctcatccttccttgacaaagcaaagcatattttcattgtctactctgtgtcatccatgcttggttcctgtcctcaaagagcttatagttcaaataaaggagagggagcattttacaagggaattaaaggtaaaagattctgaaagccagtttaaaaagtcgtgagggaggggtctgggagaagctgagcaggggtgaaagggtacgaaacattatggaaggagaacaggggagcaccctgactactgggtggaaacaccaatcagtgggtagaaaccacacagtggtaacactgatcagtgggtagaaaacaatgacagcaggtatatgaggcatggaacacttggcttattgtaaagttttcaaaatatgcagtcctttctatccaccaggggttgggagttgtctttgtatatcaaccgtggaagggctgttttggttcatcattctgtggtctacctgggtagacctgatgcagccgtgtttctgaggaaaggaagaacagcttttgttttgtgatatgtaatggtagatgtagtgccatggaatgatgcagatttcattcagatattcttggatcttggccccaggactcactcattcttccctatatgagcattggtagttacaggttttatccttcctttaattgtaagtcttttgaagccaaaaactgtatccaatttgtcactgtctcctaacagtacttagcagtgtctgatgcatcatagggagtttgtaaatgtttggataaataaagggaaaacaaaaacaaccacaaaaaaacctttattttgctttaataaaaatattttaactagtttccactggcatatatatccacatggtagatatattctaagaaacagtctcttcaaatgatggcttcaataatggatgaaaaataaatttcctaatgaattattttacagaaagcaccacacacacacccccaacatcaataaaaaattcatttgtgattttaagaactataggataataataggtaatccatgtgaagttatgacagcttgtaaggccagggagggcacgaggagatgaaacacacagatcatcttcaaaccacagaagctcagacttctcttgctctgaaagttgacgatcagtgaaaagcccactgatagctgagttttacctcctcttcttctgtataatcccttttttggtgaaagcagagatgtcatggacaatgtaggatttcatcaaatctgagaggccattgattataggacggcattgttttaggtatcactaagaaagaaaaaagccttgccaagtaaactccccaaattcagagacattcaaatgttgaaaaataactgtttcagaatctatgaaatacagacaattctccctaatgcttggcccagggctttgcataccataggtggtcaataagcatttgttgactgagtgaataatgttgacaagcagaaatgcctggtttataatgcctagagcccatcactgagaacagtgggctagatcccttcttgatgttttaagtaatcgctgagagaatgggtgggcgattgctcttctgattgctaagaacaaaacaaaacacaaaactgataaaaagcagagttgcagaactgcatcctgttgatgtactgccagaggagtcaggcctggagtactgttcactaagaaatagtgacttttgcatcctcgacgtcccagtcatacacgggcttttctctgaataatcaaagaagggattattttgtgtaagaatggacaaatgagtgtgtgagtttgtgtacggtaaggaaggcaggtagatagaaatacataaaagagtaaaaaatttcttaaaaaagctcactgggtttaacacatgcatcattcacacatcagaaaccaatatacacttgcgactctgtacccacagaactcagaactgcagcttgcaactccatgtctccgcacagtgataaatatgggcaatattaatgtcatcttctaagcccccaaaaatatagctgactctgttcaacagagctggtcagactgcggcagataaatcatattcagatcagaactccatgtacacataatctttggggcatttgcaaagtctaggggcatgcagtgacagatctggattattgatatcactctgtagcctgtcctccttgagtttttttttcctaccagtaataaggatggattctctgacactgacctccttataaattggcttctagttcatctttccagaggtgccaccagagaaccaagaag

SEQ ID NO: 2800 - DNA, 6449 bp, Homo sapiens
caaagtgaaactctgtctctacataaacagaaagagagaaaggtgaggatcagagagggggtgtggcttatcctgggtcgcagaggaagagagacacaaagctgattggtctctaggcttggcagtgggccagtgaatgcctgtagagattaatgctagtgaggcaggcttcattctgtaggcagggcctcgcccctgctagagcaaggtgggggccaaccaatagctctatgggtagaagagcatgtgttgtgcttatccatgcgatgtgttcccaggaaaactgcttcacctctcagagccttggcttacttggtgatacaagtttttgtcgttaggaaaactacatgagataatccctgcacaatgcatttagcacagtgccaggcactgcagggctcagtaaatgtgactttccccagtgcatggattgttgagggacctacatccccgcacttacacacactccctagaggtcccaagaggcccaggcttttgggagggagtttggagaggggccccagctccagccccaaagcaagagtgcaagacaccccttccagccccagctcccttccagtgcccaggtgctcttagggtctgtgatgtccagggtctcacagggttctgggctggagctggagggggttgaggggtgggccccagcagaggcctcatgctccccttctcccaggccccttccagaggcactgggccagatcaaagggacccagcacggaggatcaggaggcagcttggaaagaatgtaaacatgaggatatttttaaactttttccagccccagcgattagggctcttgaagccggaggcccagaggtcagtctggccctcacccacaaagaaagcaacagtctcgggccctcagagaccccaccccacccacatctacctacacccacccaggactctagctggggcctcggggcagaagttcttcctagggtgtcacctccagacacactgctgcggcgggaggatgcgtttctaatgtgagggcctcagcggcatgggaccctgacttaaggggtggtgggggcctaccagacagggctgatgttggaagactgagcttgggaggcttcttagtggcccagtcactctaccaggcgtgtgtgcacacgtgtgtctgtgggtgtataagtatatgctgcagtctggtctgtgtgatgcacgcatcggaatgtgtgagtgtgcgaggagcttgcctcggcccacccttcctcgttcttccctagcatccctgacctcctccctgggacccctttggtaggtgggtgacatggggggggtacaaaagaggaagagtcgcctgagaacagggaggacgcgaggagagaaaggcgccagagccgggggcgaggaggctgggggtaccaggtccggggccatgcaatgagtcaggctgtgagagctgcaggagtcactgatgtggggactgggactcggctccctccatcacccccatgtgtcacagttggagatgaggctccctggatctcccgattccggtgtcacaactacgctcaccatgggttccatgacaacagcctcttaccttgtagtcacgcagctaccctcacaccctcacaggagtgtcacaggactcatgcagggcccccccaacaccacccagtggtcgtatcccagtgacccctatctgtgagacatgaggaccctcactgtcttcacatccccactgaccagaaagccagaattcacaggggcactcagaagccagactagactgtggtcaccaggacaacggggtacccagcccctggagaggcctcggctggctatctcattctccaggggctgctgtgccaccttgccctgcttgtgggccctgagagggacaatgtccagctccatgtcatacagctccccagtgaagggcagggctcaggccccagctcaggatcaatgtggcgatggcatcccctccagattccccctgctgaggcagcagccacaagggatgaggcttggagttttaccctaagatgtggtaggattttgggcccaggatgatgggggagctaggtggggctggaactgatggaaaggggaacctggagactcatcctcagtctgaggctgaggctggacacctaaagacatggtttgtgtccctgtgggtgcccactcactggggctgttgctattcttatccacctcccagtggcggtggcagtggtagtggcagtagggtcagagatagctgctacgtgggagagagtcatgagcaccagccctttatctgacacattccctggaaacttggcagggcctgccagcctctgggggcctgggcggggcagggcgtgaggtggtcacagggataggatgagggggctgggctgggctcagtgccgatgaggacccgctccagctgcctctcccacagccaggcaaggtcccctcagaattggcctggggggttctagtgagatttcttcccatgcggagactaagaccacaggtcaccctcagctcctactcaccctcagtccaacccagaacaccccaccgttggccccatctctgagctttgggcactccagagaacaatgtattggcttcctcagtgatgtggcttcttccacgggagagcactgaactgtgagccacagtggccccatctggtggctgtcctgcctacttcccagcctcgtgatcttgggcaagtcaattcccatctctgagcctcaatttcctcatccctctcctgggctgtggtggagatgacagggtccagtggtcaggaagcaggctgacggctgcaaaataattttggccagaaacaagaggagtcctgtccgaggagagcccggctggctgactggaatcccaagacatgccaaggtgttagaggcactgccagggagacccctcggcccttcacacagtggctatcctctgggatattcctgtatccacaaaatgtattttctgcacacacaggtccctgggaaatgacaggacacccagatctgctgggagcagagttctcatagggtcccagctgagccctggaactccccagaccccctctgccactccatctctgcgtcagcccagcacctgtgccctatccggctttggccaccatctccaccctggggagggggagcataaccccctccagcctgaggttggcgccaaggtttaggagccagcacagaagcctctgagagccataagggtagaaaaggttacccggtactaaaccagccagcctcggggtgatctcatccacttcccaagataagccccctcccccaccctctggccactggccaacagggtaagtcacgagggagctggtggaagagtgtgtgtgagggctgggggaaggatttcaacttggggtcacactgtacattctgttttgtgatcaattccccccaacatttacagtattgacaattagcagtttcctgtcagataaactataaagatcttcccccatcactttttcttttcctaattatttctaaagtctgccaggatggacacatcagaatctctttgtccagcccttgaggaggacatgtaaacagtgtccagtttctctttcttacaaacaccagtgccataaccatttttgttcaaatcctcttacgcaattgcctctctctctctctccctttctctctttctctctccctctctctatttctcactcagttgagataaattctgcctggtagcaggtgggagggcaggcctcactgtgtgcctgagtagttctgggcccttccccaagccagaggtgccaggcccagggcagaggccagtccagggccacagggtcaggacagtggacaggctatggtctgctggactctgcctgctcgaggcgggctccccaagcttccacctgctcttgcccacccccagccccaaggactaggctggcctggacacagggaaaggccatatacagggtatcacatgacccatgcgtgcacacagcccccaatcccaggcataggcagaggtcccagcctcagggtggggcccccacactccgtccaattcacatcttgcctagtgctccccagctcttgctagaatgcttccatagaccaacagctcactctccctcctaagttgctgcccggcctttggggagcaggtggagcacatgcttcttatcaaatcaatacctattcggtagaatcacatgattgctgaggaaggtttggattcagacaccagggtttcaaactcgactctgcatttactatttttgtgaccttgggcacaaccttttacatgcccaggctcagtttcttcatctgtaaaatgggttaataatacttgatcatagggttgcatgaagattaaatgagataatacatgtaaagtgctcagcaaggctcacagatgtgacctagtttatgatcacaaattatcacaaattgagtccctactatgtccagttaacagagagactccctcactggaagcaactcagagtggctgaagcacagaagtggtagaggtatgagatggggttgaagagtgggcagggccaggtcacactcagccttgcacatcatgaagggattgtgacatttttctgactccttggaagcaggggaggatggtgggaggcagaaatgggaggatgtcactgaaagcttttattattttttttaatgatttgtttgtttgtttgtttgtttgttttagagacaggtctctattgctcaggctggagtgcagtggcatgatcatagctcactgtaacctcaaactcctgggttcaagcgatccttctgcctcagcctcccaagtggctggaactacaggggtgtgcgaccactcctggctcattttgttcaacattattttgttacaacattgatgaagaaaaaaatctatttctggctggggctactgtctgtgtggagtctgtagaggactttctctgggtactctggtttcttcccccatcccaaagatgtgcatgttagattaactagcttgtctgcatgctcccagtctgcatgagtgtgagtgtactcaaggcaatggcatcctgtctaggcctggttcccgcctggcgccctgagctgctgggataggctccagccatccatgaccttgaactggaataactggataaataattctattacttgtttttattaatctttctttctttcttttttttttttttttttgagatggagtttcactcttgttgcccacgctggagtgcaatgacacaatcttggctcactgcaacctccgcctcctggattcaagaaattctcctgcctcagcctcctgagcagctgggattacaggtgcccaccaccaagcccggctaatttttgtatttttaggagagacagggtttcgccatgttggccaggctggtctcaaatccctgacctcaggtgatccaccttccccagcctcccaaagtgctgggattacaggtgtgagccaccacacctggccttgtttctattagtctttcttacacgtgtttcaatgtttaatatgagaagcatttgggtctttatttagaagtctgatgatatttctatcaccagaaatatgctgtaggaacttaactcttgtttatgtcaattagcctatgacaaaattggtttccttgtatgtcattttgcttaaagctgcaatttccaagaactacattaagtgaggacattatataaagacttactatattctattagttgttgtcaggcctctgagctcaagctaagccatcatatcccttgtgacctgcacctatacatccagatggcctggagcaactgaagatccacaaaagaagtgaaaatagccttaactgatgacattccaccattgtgatttgtttcttccccaccctaactgatcaatgtactttgtaatctcccccacccttaagaaggttctttgtaattctccccacccttgagaaggtactttgtgagatccactccctgcctgccaaacattgctcctaactccaccgtctatccccaaacctataagagctaatgataatcccaccacccttgctgactcctttttcggactcagcccgccttgagtccaaaataaataaacagccttgttgctcacacaaaacctgtttggtggactctcttcacatggacgtgcgtgagacagttataagcaagactctaaggccagcccagattcaagaggagaggaattagaccccactccttgatggaaagagtgtcaaggaatttgtggttatccttaaaaccataacagggccagctggagcaacatggcgaaacctcatctccacaaaaaatacaaaaattagccaggtgatggtgcacgcctgtagccccagctactcggaaggctgaggtgggaggatcacctgagccaggggaagtttgtctcacgtgtccgtgtgaaga

SEQ ID NO: 2801 - DNA, 2609 bp, Homo sapiens
gggcatctgatggcaggaccaaccctccctcacaggacccagcccttgtcagggcccagcccacactggggttggtgcccgtctatccctgacaaggacactcacagtgacctccttcggacatgtttttcttcttgcctgtggatcaattcctcctggctcagacccctccaggactctggcactgatctctcttggtctcggatttgaggaaataaaaatagaagaggaaaaacacagaactctccaaagctttggagtggctgcagccatctggatggaggcagcatgcgcctgggctggaagagccacggtcccttgactgagtctcggtgcttctccccgtccctctcagacacggttctcatggtggacgagatggggccggatcttaggcccgggattctgcagaatgcaaggctcagagcttgcctagctctgagtggcttggagactggtgtgaggactgagggtgtccacagatcaccaacccacaccggcagcctgagttggaagacaggtcagacgtctcggaagagctggcttattcgggaagctccgaggaaccttgccttgtccagccttttgggcacccccactctttagctcacagtcgctccctccatcttcacagccagcactgaagcattccccactcgctctcattcagacctctgctcccaacagtcttgtcatctctctctctgaccgtctcacggaaaccctgtgatgacatggggctcacccacatatttcaggatagtctgctcatctcaagatcctgaactccatcgcacctgcaaagtcttttgtgcaaggtgtgatagaatcaaaaataaatatttggtcctgccacagagtttccaaaacccttggaatcccctcagcgggctgatgggagcatcgattgtcattcagaccaatcctctcctgaccatacctgagtttatgctaattaggtaacccttgaatggccaatggaatcaaccctccagagcgaaactctgtctcgaaaaaaaaaaaaaagaaagaaagaaagaaaaaagaaatgctgattagagggttagaactttcagccccacctcctgaccctggggaggggagagaggctgaaggttgatctaatcaccaatggcgaaagatttaatcagtcatgcatacccctccctgaaagaaggggttcagagagcttccaggttggtgaatgcgggttgattctgggaccaggaatgctgtttctgcagacagctgcagggctattccctaggcttcttgaggtctttgtccaaagtcacctttctcagagtcttctgacccctgttgacccctgagtctcctcctgaccatctcttttcccctgtcacttgctttctctccttaatactgattgtcacccaacgatggaatgccttacagaagactagagagcagcaactttgtctattttggtcactgtgtgtccccagttcccagcacagtgtttggcacacagcagagcttatttgacatgttttgatgaataaatgtcattgttgttaccaacaggctggaaatcaggacacgtgggctctgcccctcacagttgagtgaccctggggagggccttaaccctggtcttctgggcctcccactttcaggtcaaggttacagtcgggggcctgtgggtgggcttcatctgattggcccctttggtagtgctgggccgcatcttcgggtcatcagtgaaaagcgttctcaggtgtgcccaggagcacgtgcccccacagagcagtgaccttacctgctgaccctcatcccaaaccctgtagctgtttcctctgctctttttttcgttctggaaaaggaagtggctttaggaaggacattacgtgtgatgaatctgaccttggatgcatgtttgctcaaactcacatcattgtttaatgccacaggcaagtcactgagtaacagactaaataattcccaagaaaagtttatatatgtgtgtgtgtgtgtgcgtgcatgtgtgtgtgttggcagggggtatctgtgggggcgaaggtggagactgatggtgggtggtgactttggccacaatttgctccaaggtccacatccttgtacttgaccctcggtggtgcatatctaacacaattaaattatagaaatgctgggccaggtgtggtggctcatgcctataatcccagcactttgggaggccgaggtgggctgatcacctgaggttgggagctggagaccagcctgaccaacatggagaacccccatctctactaaaactacaaaattagccgggcatggtggcacatgcctgtaatgccagctactcaggaggcaggggcagcagaatcacttgaacccgggaggcagaagggttgcggtgagccaagattgcaccgttgcactccagcctgggcaacaagagcgaaactctgtctcgaaagaaaaaaaaagaaagaaagaaaaaagaaatgctgagtaaaaacggtttcgaatgctaaagccagcagagaaattacatatttgagctctgaccctttgtaacagaatccagatctgtggtatctctattttgggaggttttagcataagccatcttacacattccctct

SEQ ID NO: 2802 - DNA, 1836 bp, Homo sapiens
atttttaaagtggctgtagattgatcgaggagattggatagaaggttatagagagaaccaaggaaaaggtccttcaacctcctgttcgtgatgtgggctttctctactgctgtcatcctctcttatcaaactgtgttgccagaacgggcaagggccacagccatggaagaggggctaccaaatggaactccaacctaagggctgggaccaggatctacccatccccatcaagcgaggattgatactaactacagccactcctgcgggggcccaggcaagtcatggctgcccaactgatatttctaaaagtccactttgtgtttgactccaatcaggcctcattatcctaggggaagaggagatggaggtgagaggaagaggatggatgaatgtggaaggccttctgcagcttagcatgcaatggtcatttcctgtatgcaaggtcttctgctatgttctgtgcaggaaatcaagaatgagaaacaattttggccctagaggccttacaaatatatcttcctaattacaaggttatagtcctttgggaattgcaagttcccttgaaaattcacacaatcctaacatgtgttgtgcctagtttgatgtgttcttaaactattactagctaacacttcttactgcagaatttctgtggaaatgagacataggtatttctacaggataaatgagacgagtgaaaagaggtgttgaaaaggaaaacgaaaggatgaaacagatacaattcctacttcgctgtttttcaaagtgcttatagtgagtgctctccgtttctcacccgaaggggagaaacttccttggcctttttcttcaagtaaatagattaaatctctcttattgctattgctatttgacctttttcatgaagcatagcaaagagtttttcataatcctaatatatacttatggtttgtgactaatgaaaagaattatttccatcctctaaattaataggcttgcctccctgcccagtaagttgttccttcctatacagcattcagtaaaatatttgctgagtaactaaaatgtccaagacacctatttcagcaatatatgaactagaaacaaaacaataactacaaacatgacttatctcttcaaggaaaggagtcaatattcttgtacggaaaaaggatcgtagaaaaatacctaatagcatagtgtgacagaaattgcgtggaaattactacaaggcagcaagtgagatagaccctaagctgagcagacaataagggtatggcaatcctaaatctacatggtgtggtgattaagtcctgcgtccatggagtcagaaagagctgggtcctgactctacttattaactgtgcaaccttgaataagtcacttataccatgagctccaagtatctcatccttaaaatagatacatttcagcaccttattgaatttcttcaggctaggctctagggatacaacggtgatcatgacagttatggtctcaggccttattcaataaacagcaaagaatccaaattgggataagtattctgaaagggagatatgggaatgaaaacgaaaagtaaaccaaaaagtaaaacctttctgagaccagtgattttgacagacactggattatagaggacctgataaacgacaataaggattttaaactttaacctaagcaggagaagaattgattgaaggggtttaaatacacttcctttacagaagtcttgcgactgttacatgagaaattggtatgtaacatttttagtgccttcctgataaagcctttgcacttctaactactgcgtgagttactctacagggaatatagctaaacccgggttatttggac

SEQ ID NO: 2803 - DNA, 4234 bp, Homo sapiens
gggagggcatgcttctcaaaaaatgtgagctattgtctaagactaacaatatttatctagctataaaaataagttaaatgaataagttaagattgccaatgttacttcacaataaattcagtcctatttgtgttggagtaaatctcatagaagcacatgaagaacagcagtgaaaccaaggattctagcaaggccagctattagcaaagcagtaagcaggaactggactagataccaaatgatggggaaacagactcatagacctaagaacataggaagaagagatgtaacatcaacagaaaggcaaaaggggcaatgcagcatctctgccttcttctgggtattcctcttaaatggcttgacaataaccaccaaccagcactgccatacatgtgtcctgtacctatcagaggcactagggcagttttggaacagagagcccatagaaaggctactgcttagagatagccattttcttcttggagctggaccagtgaattagacgcatggaggagagctggaaaatccctttttggaagagctacacaaaaccaaaatttggaattcgtagctaataaccataaaaattaagaaatgactgttggaagagcactggaaatcacctgattaagttaagaaaaactaactagctcatgagaaaattattttcaggccagctgtagcctgtacccttttgaaaatcccctgactagtgagttcatttttgttggaatatagaatttttcttttctaagcagatgtaaacttgtctttctgtggttggctttggagcccacaagataattaaatggcagtgctaactgaaagcctgggctgtgcttataggttcaagaggcaggtagaagacactgggttggggaagtagggctatggaactgtggctctggctaagattactaatgtctgtgagcgctggaagaagggaaatagaaatgaaaaaacatgaatatggttgatgggccagactgagtgttgaggtcctatgatgtatcaaagaatggcttacatgaaagttataaggtgtggatggaaaaggtcagtgtggaagagaacagaattactagctttaaagctcagagacatctgcttttcaggaaaaaaaaatacaaaagtctatgagtgaaggaaggagactaagagaaagaaaggtgaggaaaagaggaagagaataaaaaggaacagaaatgagaaaaatatgacacaagaaaaaaagaaaaattaggaggaaggaaagaagaaaggaaggcagagagggaggaaaggaaggaaggagacagggaggagaaacagaaaaagagagaatgaaagaagtggaaatcaagaaagaaacaacataagattctacagagaggactcattataggcaaaataagtaaaagaaatttcttttggcattgtcctatctcccttgcattctcatctactaagccttttcttccctgtgggcaatattattggcatgagtaaactctcaccttaatattcctaataaccataagtttgtcctctactccctaaaactactgccgtgtgtgccatgctccaaagtaatctcttattctcacttcgtaacctttcatctcagctgtgtgtcagttaagaagaatttcatcaaactaagcctcttggattttaaaagaatgctcttgcccagttatatctttagttggcatcatttcaggtatgaaaaggctctgctctatgtgcccttatcaatcctgaaagagctatctccccaagcaaaatgagaaggacaatcataactggctcaaggctagtccaatctggctctgtccttagatccaaaaagttgaagttgtaagtgaccctagaaatgatctatttcacacttattgtccagacaatgaaactccagtggagagtggataggacccttctagggtcgcatgattgctagtggcaaagccaggtctgaatcatatcactgcttatggagaacttgttgccctcaccattgtcctcaaatttctcctgttgacagcaggatccctcagagaaaagatagctccagccaaagaactcagtgtagccccatgaactctccaaataatcataaacacagctatagtagacaagaaaggctatcttctcatgaccctttctgtggttaaaatcctgaaaaactgggcactacggctatattccaaacattcttgcaaatagtatttccagacacagacaatgattctcagagattctcaccatagacggtgaggcaggccgttcctgagatcttcccaaaaccaaaggtattgaagagacacatgtaacacccttcatcctccagggtgatattccagaaggtgatggttgagttttggagtcccagctgggtaatgtttatcttgtccttataggcaggctggatcaccaccccatggttctcgctgaaggtgaccatgttttctgggcttacagctttctttttctgccatgtcacaatgagggcttcctgggcattttgcagagagcattttaaggaagcaggtgtgtacagctgctctctttcatcctgggtcaccacttgcactatggaatcataaaagaacatttatatttaaagattgtaacacacatacactttttcctgattataaataaaatgtatattcaatgtcaaatatagaaaagaaagagaaaatgcaaaaaagaaaacatttatttacattcctacgtgatgccagagaaatatataggttcaaatatgtttgttcaatctttaaagaatagtagcagagtagaaaaacaagagagcaactctcagttacaagaaattgtgaatgatctgtgtaagctgcgaagtaggtacaatgagattgaagatgtaaactgccaggtaggatagcagcttcaccaatcttgtccatgcttggagaagtagaagcaaagagcaggaaaaggccaaaggataacaggcagagtgaccactgtaagtaaagaagatggagcagccctatgcattccacacaaacacacacacatacacaatctacaaaggaagcaggtggaacagaggtgtctgcctccaggaagcaagagtgtatataggaacataggtaaagagatttatgggacaatgttctggaggatcttgaagctttggcacacaaataataatttacacaccctctgctttcactaaatgctatggtggtaatttcttcccttcctcaatattagcaactcataccatcatacattatttgatggaaaatctcaacataaaaacaaatagccaaacttttgagaaagccaatacaatgaaagagaaataataaactttacaaacccaataactcatacaaaatgaataaagatatcataagacaataaatactttgacatgaatacatgtgatgatataagtgtaataaaagcataataaaagcattatgaatagtagaaattagagatatagaaaatgaggaatataaaattgcaacagataggctgacttagcaaaatagatgctactgaagagtaaattagtaaaaagtaagaacaggccatgaaattattctagaatgtagcacaaagagataatgatatggaagggattaaggaaaaattcaataagtagacttaaatgttccaaaatcagttcagtaagacttctaaaaggagagaaaaaaaagaatggaagacaaaaccactgtaagaagggaaaaagtatttttcaaaatgataaaaggaacaatctaaaatcagatctattatagtaatcataaacctttatgcacctaacaacataactccgaaatatataaagcaaaactaatagaattacaaagaaaaaatttaaattcacaatcataccgagaaccttcaatttaatatatttaaacaattgttaaaggaaaaaaagttaaataggaaatttgaaaaactaccaggtacagtggctgatgcctgtaatcctggtgctttggcaagtcaaagtagaagactcacttgaggccaggagttcaagatcagcgtgggcaagagatgagacccttatctctacaagaaatgtaaaaattagccagccgtagcgtcatgtacttgtagtcctggctactcaggagcataggacaggaagattgcttaaggccaggagttcaaggatgcagtgagcaatgattgcagcactgtactccagcctgggtgacaaggtaagtccatgtcacaaagaaaagaaaatttgaaaaac

SEQ ID NO: 2804 - DNA, 2213 bp, Homo sapiens
gatatattaatagcaacatttaggacatttaaactttgatacgccaagtgtgcatgccaagtctgcaattggatatatgagtccagagatctgaggagcagtggaggacgaaggctataaatatgggatttaccagcatataaagccatgactagtattacctggagactgaatatggatggagaagagaaggtgacacctcaccaaataacaaggagtgtgtggagatgaaaacagtggtctttgctgttaattgtaactaagtgggaatgaacagcactccttgggaaaagagcgagtcaaacctgggggcatagatagatggtgactgaggaagagaatcatttcttctagaatggcacttggcccaagatgtctgaagactcctgaccttggcctcacttgccctatgagctcttcagtccaagttctgaataatatgagatgtgacttgcctcaggaagtaggagcaatccaagcctttattatcttactgttttttcaaaaaacctcatctggaagcctaacagcaaagtagtttgcctttctgattgaaaagttaattaatgataatggttccagggatactgtcagacacccaggaatcttaacacctacaatgtgttaaattcctcatttctcccacaggatttttcagtgctaaaaacagcatcaataccagtattcttggcaaaaccattgctaattgacaatcagaggaattcaactaatgtgtttactgagtgtgaacaagaaagattgtcacatccagaatttccaaaatagctttctttctttagaatgtgtgtatcttcccaagacaagcagcagttttctcacgtgtttttagcttgtgtcattggccacagctgagtcagaacagaggtgacttttgtgctattgccagtgccattttctgtatttggtaagtgtagcagtctggatgtcctcaccacataaaaaggttgacagaatggccatttttaaatgtgcccagcaagcctatagaagccatgagaggtggcacccaaaggataaatggtcggatcagggtacaggaagtggttatcgtcaacacaaaccattcttcctgtcagcaagatatcaataacatgtcttttgctgggaggtgatatgttttgtaggtacaagtaagagaatataatttccatccacttcagaaagagataagcatgaacacctaaaaaatcacagactaatatgaagcagactctagaataactaatgagacttggttttataacctcctcctcccaaatttccaacactgttgaacgaaaccgatgccattaaacaggaagatgtataaacttataagcatattggaagccatcaaccatggttatattaatattttatactgtaaaaattgtctggagctagagtgacaaaaacaaaaaaggaaagaagctactaaaagctggaaaagttgcaagtgttttttcataatgctgaaaataatattgctcttggcaggatcttgaagatcatataatccaattgtcttcttttgccaaataagaaaaatgaaccaagaagatctaagcaacatgtatttcaaaagagtattttattagcattcaataaaacttttaagtttctttaaaactttttaaattattttgcttctgtcaagattacagaatgtctgcactactaaatattgattgaaaattgaagactcctagctctatttaatatatgaaagccagtgaagtatactctatgtactttcctggcaaatgaaagacgtacatctaccatttatgtcccaccttcttcagatatctcaattaggaaagatgtcaacaaaaagatagatattaagacagtttgttatagaaaaaataagtgattctgagattagaagagttggattccccaaagttacaagctgttatatgtaaggtaaaattctttctaagccccactttgctcaattgtaaaagatactcaatacttcctggtctgccacaaagttcgtcaatgccatatttaagccttgagctgaattattcccaacacacaattgtgtgcatatttaaatcatacctatgtaagtatattgagcaaaaatattatttttgttcaaaattatatttcaaatagcaaaattgaattatacaaatattgtataaaagtaatataaaagtaattcacaggattggttatgactttaaataagatgctgg

SEQ ID NO: 2805 - DNA, 746 bp, Homo sapiens
ccccaatctcacaggagcttttgatctacacggggacaagagagatgtgaacaaacataacacagacagtggaagaagtggagctttaaggaagctggagccaaggttgaatgcaggtgctttgatctggactgttttgctgaaaggtttccagttgcctatggtggtagtaagaagatgctaaaataactaactaaataaaagccatagatcatttaagtcatcaaatctcaaccaggccaatcaaaacaaccataaagacacatcgagatgaaacttcaaatactgtggcacagctgtggactacgaagaaacaaagaactaaactcagatcagaacagttgttaaaatagaataatatgtctgtgtctcggagactaaaatacgcctggcaccaacagaagtactgagtattgaaagttgagacaagtcactcatgacttttatggactggtggtgaagacaggcagtgattgatacattacgaagtggtcagattcagaacagaattactcacagaattctacggaaagacagaagatagagccctaaatccagcctgaaagaatcatgacaaacttcctagaagacacctgggctgaatcttaaaggaatgacctaattgtcaagagggtaacatgttttgagagttgccattggaatagaagtccctaagcttccttggcttgtcagcctcattcccttctgtccggctttctcctcagccacataacatcactctccca

SEQ ID NO: 2806 - DNA, 6402 bp, Homo sapiens
caggtatctttttaaaaaaattctatgctttgcacaactggtttctgaaaatggattttatggaaactaaagaaaagtgcttttatggaaaaaaacaaaaggccagcatacagagaattaagaagccagtccatgagctgaaccaagcaatgataccatacaacatactttcatcccaaacactggcaccctaaaagcagtgattttccaaaagaacaagtacctcttcactcaccctcagctcccatggaggaggactcagccatagaagtaattatatacagatggccaactctgcatcaataggctttgcatagaattagaagacaaagtgcttttgggtcccaaaagacagtgaagctttatttggtgactttcatactgacttcactctacttactggtgatgatggtaggtgaaacgttatttcttcaaaaatatcaccttgtggtggaagagagaaagaatatccatgcttcttttatctacagtgaaggtgaagagcaacataaacttcagaggttgcagtaagtctggatgccacatcaaactgtttgtggtacttctaaacttcgtggaagagccctgtttcataaatctgagacagccttggtctgagggagcaaagacagagaattcacgtgctgcccaggcatagccacatagcaggtggacatccctggacacttttctgacaaagcacgcaatgtggggacaacacagaaatccaagaaaggcaagaccaatttcaaggcactaaataagtggactgagacaagaagtacacagatacttcccagaacaaaaccctcattggattttcctggaagtacggagagttacatccagagaactctgaacattttggaaggaccccaatcctgcaaacaatgaatggcaataaatcctgggactggaaaggggcttctcaaccccaaggcaaccataaagtcctatacaaagaaagatacagcagtgtgaaagaggcctggatgaaaaaacaaagacagagccagtgagccagagccagagccagaggacaagagagaaaggcagagaatggaaaacacagacagagaaggcagatgcgtagagagacagagattcaatgagaaaataaggaaggaagaaagaaagaaaacaaaaacgttctcagcactacaacttctgccttgttctgttccagaacagtatgagctcagtactttttcagactctcaattttctacaactaataatttgctctttcagttagtggcaaaggcttaacgacaaaggttcatctttaatattagagaggcacttttaaaatttatgatgctaagccttttgttctggatatggtatgttgcacaggtctagggactgggatttcagatgtctattccgtacccttattcttttatttattaaatcttttagtgtgtatttttttctattttctcttcttttattagtatgtatttcttgagtcattaacatacaacatatataggacttcctctgaggatacaataatgtatatgatggacaagatacgtaaaagtgccttgaagagacttggtcttgtgaggggacagacaggaaacaggcaattatcacctaacttaggtctgttgtttcaaggtaaaataagaataataacatctgtgttggctgggatgttgtgagtgtttgtggagataatagtacaaatgaaattactgagggacaatggtgaagatagggccatatcatggagcttacactagtgatggaaggagatgggagatacaaaagcaagtcaatatttcagatttcgtaaatgaatggcaagcatagagcagtgaggcagagaatgactggagaaagagactatgttaaactggatagtaaaggaagagcaggaccccactaaactatatggagttttgtgcaaatcacatgaacacacgtagaacattttaggctgctcatgtgactttggatttgtcctaagggcaatagtaagcctttgaactgctttagcatgataggattttaaaagatcactggctgctgtgtgaacaaaaataatgttgtaaagaaaaggatattagctgtatcagatcagctggagactactgaaataacccaagctggcttggactacataggagtagtgtaaactcattcattcatgcaagaaatacttactgagtgcctactcagtaccagacccttttctaggacatggagttatagcagtgaacaatatagaaaaaaatccccgaattcatggagactccagtgagcagagacaaaaaaatagcaactaaataagttaaaaggaattgagtaccctataaaagtttatcagggaaatgttataaggaatgactttcggagtaatgggtagtgatcttaaatgtatggtcaatgaaaatcagaagttgtagagaagtggataaattcacagtacgttttaaagtagacctaataagacttaatgaatttgatgtggcaagtgagaaaaatacatcaaggatgatgacttttataatttgacttgagtatctgggaacaaacaagtacagtgccataataagggcagaaaattttccattcactcagcaacttatgaactcatttgcttagtctttattgcctcttgcattatgtagttttcactttgctggagtacttgtatagaagatcaccagtgaagaagccagagatggtttatttggtcatcccaataatacatcttattgttaattaactctcaagggttttttttcacaattttagaaaaggtttaagcaaatgaattatttaacatgaattggctatgtgaccctactataaggtgtttaaaacaccaacagcttaaacttcttagatcaaaggacatcctccaggccaaaatgtttccactggaacggtttctttgcttcctgattaaaagcttccctaatatatttccacgtgttattacatattttcgtattcactttgatggaaagcaagaatagcagccaaatacatatttcatgcattcttttgattaaaaatgataaaggtaatattagtgtttttttctttctcacctccaatttatgaagtggaaataattttccatggaatggccaactaaagaaaagaaatatgataaattcagatcatatcattgttccatttatccttgtaccctgtctgtgacagaatacctgatgtttgggatataacaaaaatagatgcatagaatcatagagtttaagaatgtaaaagacttttgaaatcagccattctaataccctaatttttaagatagacaaaaaatggtctccggaaggataaatagtctaacaaaggtcatgcattgagaacaaacctaatatgagccaagatggccgaataggaacagctccagtctacagctcccagcgtgagcgacgcagaagacgggtgatttctgcatttccatctgaggtaccgggttcatctcactagggaatgccagacagtgggcgcaggtcagtgggtgcgcgcaccgtgcgcaagccaaagcagggggaggcattgcctcagtcgggaagtgcaaggggtcagggagttccccttccgagtcaaagaaaggggtgacggacagcacctggaaaatcgggtcactcccacccgaatactgcgcttttccgacaggcttaaaaaacggcgcaccacaagattatatcccacacctggctcggagggtcctacgcccacggaatctcgctgattgctagcacagcagtctgagatcaaactgtaaggcggcagcaaggctgggggaggggcgcccgccattgcccaggctttcttaggaaaacaaagcagccgggaagctcgaactgggtggagcccaccacagctcaaggaggcctgactgcctctgtaggctccacctctgggggcagggcacagacaaacaaaaagacagcagtaacctctgcagacttaaatgtccctgtctgacagctttgaagagagcagtggctctcccagcacgcagctggagatctgagaacgggcagagaacgggcagactgccttctcaagtgggtccctgacccctgacccccgagcagcctaactgggaggcaaccccccagcaggggcacactgacacctcacacggcagggtattccaacagacctgcagctgagggtcctgtctgttagaaggaaaactaacaaacagaaaggacatccacaccaaaaacccatctgtacatcaccatcatcaaagaccaacagtagataaaaccacaaagatggggaaaaaacagaacagaaaaactggaaactctaaaaaccagagcgcctctcctcctccaaaggaacgcagttcctcaccagcaatggaacaaagctggatggagaatgactttgacaagctgagagaagaaggcttcagacgatcaaattactctgagctacaggaggacattcaaaccaaacgcaaagaagttgaaaactttgaaaaaaatttagaagaatgtataactagaataaccaatacagagaagtgcttaaaggagctgatggagctgaaaaccaaggcttgagaactacatgaagaatgcagaagcctcaggagccgatgcgatcaactggaagaaagggtatcagcaatggaagatgaaatgaatgaaatgaagcgagaagggaagtttagagaaaaaagaataaaaagaagtgagcaaagcctccaagaaatatgggactatgtgaaaagaccaaatctacgtctgattggtgtacctgaaagtgatggggagaatggaaccaagttggaaaacacactgcaggatattatccaggagaacttccccaatctagcaaggcaggccaacgttcagattcaggaaatacagagaaggccacaaagatactcctcgagaagagcaactccaagacacataattgtcagattcaccaaagttgaaatgaaggaaaaaatgttaagggcagccagagagaaaggtcgggttaccctcaaagggaagcccatcagactaacagcggatctctcggcagaaaccctacaagccagaagagagtaggggccaatattcaacattcttaaagaaaagaattttcaacccagaatttcatatccagccaaactaagcttcataagcgaacgagaaataaaatactttacagacaagcagatgctgagagattttgtcaccaccaggcctgccctaaaagagctcctgaaggaagagctaaatatggaaaggaacaaccagtaccagccactgcaaaatcatgccaaaacgtaaagaccatcgagactaggaagaaactgcatcaactaacgagcaaaataaccagctaacatcataatgataggatcaaattcacacataacaatattaactttaaatgtcaatggactaaatgctccaattaaaagacacagactggcaaattggatagagtcaagacccatcagtgtgctgtattcaggaaacccatctcatatgcagagacacacataggctcaaaataaaaggatggaggaagatctaccaagcaaatggaaaacaaaaaaaggcagggattgcaatcctagtctctgataaaacagactttaaaccaacaaagatcaaaagagacaaagaaggccattacataatggtaaagggagctaactatcctaaatatatatgcacccaatacaggagtaccaagattcataaagcaagtcctgagtgacctacaaagagacttagactcccacacattaataatgggagactttaacaccccactgtcaacattagacagatcaacagacagaaagtcaacaaggatacccaggaattgaactcagctctgcaccaagccgacctaatagacatctaaagaactctccaccccaaatcaacagaatatacatttttttcagcaccacaccacacctattccaaaattgaccacatacttggaagtaaagctctcctcagcaaatgtaaaagaacagaaattataacaaactatctctcagaccacagtacaatcaaactagaactcaggattaagaatctcactcaaaaccgctcaactacatggaaactgaacaacctgctcctgaatgactactgggtacataacgaaatgaaggcagtaataaagatgttctttgaaaccaacgagaacaaagacacaacataccagaatctctgggacgcattcaaagcagtgtgtagagggaaatttaagagaaagcaggaaagatccaaaattgacaccctaacatcacaattaaaagaactagaaaagcaagagcaaacatattcaaaagctagcagaaggcaagaaataactaaaatcagagcagaactgaaggaaatagagatacaaaaaacccttcaaaaaattaatgaatccagg

SEQ ID NO: 2807 - DNA, 1132 bp, Homo sapiens
tatttcggtaccaacgaatctatttttcactcaatggagattttccatttttggcccacagcaatatccggagagagagagagagattcctgtagaatacaagacaagactatcacaatgagctgaaatgttgggtctgtgaaagtaatgagaagcacagtggaaataagtttctgaaggatggaagaggctggaggctggctagtgggagaaggttcccagacacgtgagagacccagcaacagattaaaatcatccttacctgacaagaggactcagtgaatcaatgtaagtaaaaggcttagtccggttgctggtgcagtggaagcacagtgtgtttactatcttcttgcttcattttcagaagatagacagggtgttagaactaccactggcctgtcacaagtcatctcactggtcaacagttattttgggggcctgatgcccttccactcacaaagaggatggtgtgtaaagaatctctcttggtgtgactccaggactggcccactggcttttaacacacaaaatcctcctttttagttaggcaggaatcagcccaagactgaggattggcaaattgtgagttttgatactgatatgtaactcattcttaattactcatccacatacattgtagtgccatctctgaaaactgagaacccctgagattgtagtaggaaagatttctagtgccaggaagagtaatagcactaaatcaacatgacccaaggacacgagcaatttcataatgtaaatgatgataacctgtaaaattatagtttttattttcttctacttttactgtaataaataacaatctggtaaagaagagtaaagacacatacaaggctgtcaatattttaaacatttttaggaggagaaatctaaaagaagaaaggaaatgagataagacacatatactgcatggaaatgatagcaaaatttatttagaaaataatcttctttttacattttagcatttaaaaataatttttatacatatgcccacaggcatagtttttacaaaaatataaatcctgaacttagcatacgtaccatttttagtacagtcttttattctctttttcacatatcttctttctgcacctcagccaataagattccctgc

SEQ ID NO: 2808 - DNA, 15166 bp, Homo sapiens
tgactatccacaggcagggctagaaaagggagtggaacattttacttaggcaggaagcactgaagagaagaatctttttttcagtagacatttgtgggaaataaaaatttgtttagaagaatttaggccaagagataaaatggtcttcttttgactgaggagagataagatagattttaagcagacatctgaagttaaaggtgagagaaggaagataaactgggtgattttgctcacctaagaaggtacacagatccaaagaaaaagagattcgagaggtgtctccagcttctgattttgatgacatctcccagagaggaccgtgttgccatcaccatcccagagtctgaaagtgtccaggtcagagacgctttcactaaggtgtctacatcctgcaactatagatgaatctctaacaagctgcctgctttgagacctattacttccataatgggactcattgctttcctaagcagcccttgtaattttcagcaaggtcctttaactcagttaatgtgaaacatttgttcatgcctaatttgtcggagcccggccatagttgtgttctccttgagttgcagaaggttgattgtgggggtaaaacggtcagcctcaagtgactacatatctccgctgaattatagtaattactgtggattgcatttggttggtggattgcatttggttgtcgtggagagaggccctccacgacaaggttaacaagcagaaggtaaccagacatcagaatataagtgcctcatcacatacagacaattgttgacagtgcatttttttcgtctcataattatgataaggttcggtaatggatgcagctgtacaatgccctggaaattaaattctagaatccataatgtaaggaaaattagaatacagtagcagtatttttcttcaaattctgatattaagacagtcctttgcaaatgctttaaaatgttagataaccccatttttatggaactttggtaattctcacctctaattctcaccatttcagactcacatcacactcttctttgtttggtagttttttttttttcaaagtgagaagagaacattatttggctataattcaaaatgacagctgcattctttttgattttttttctcataacttggtatatcaaaactgattttgttgcttgtataccatccccaaaaccatttattttattttaacgtgtgtttatataagatttaaattagctttttcctttctctttcctttgcatctgtcaagagtggaagacttttttttcaactctaccattacgatgaccttaaagtcctagctgtggaattatattagaaaactaaccttcaaataaaatttggataggagacaactgcgtaataagcatgcagacatttgagttttagcataatcttcctttgaagtgtaatttataaaatgtacatatactttatcattacccataatttaatgaagcatgatgtagaatatataaaatattcttctaggggagaaaattaacattttctaatatgcacacatgtggagcatacatatggaacatttatcacacactttatttatattactaactgtatacagtaaaattacatgatgttacttttattttagaaactaaatctcaagctgtgtagtttgagtaaaggctaacagtaaaaagtttccataactattcctcaactttaaaaatcaacctattaaatattttaaaagaaactgtgactttgaaatataattggattatgggcggtcattcatcccagaggaatgacattttatagaaaagataacttgagcactgatagtatggaaccatgctaatagagaaattatgtttcactttctagtttactaatcagtaactcgtctcgattttgctcttgcgagattgtgtgtgcatgtgcgtgtgtgtgtgtgtgtgtgtgtgtgtgtgcatatttgtgtgagggagatcttccttaagggaagaccataataaaatcatatacaatggtataaaatgagatattttctttctcatgagcttctgacaaatttcagataaaacttatttcaaaaaaaattgtcatgtgaaagacatagaacagctaaaatttctacaaatataagggtcatcaactaataaatgaattaaaatagatgcaatgattagaaaaaagaaacaatataaataaaatttaacaaaggaagcatccaacaaaaacaaaatcatgagagaaatcatgagaactaatacctggacatggggggttggggggagtagggagagagagagagaaagagacttatttacaatttccaaaaagcagttgctgaattttttttttaactctcattttgctttatttggtgacaagctccatttgataagaacagataattaagttgtttgttcttcactatcacagtctatatttaaagtctttacttctggaatatggtgaataacattgaggctgagacttgagcacattcatattcaagagcaaagatcaggtctgcacttaataaaagtaaaaccctgctctcctttgtgtaataagcctataaagtagactttttctttagcttggctaaaagcggctctattgtgtgtgtaattttgaataattatctctatgtaaatcagaaactgccttgtgacccaacatagctttactttgttaaaatttctgtccttagaaaacaatgtttcccaaggaagaactttatcactatttacataaatcttatgaatcagaatgaacaaaattattacaattcacacaaagtggactgcaaaccaaacatagatatgtgattttttaaaggggaattttcattaatctaacattttactaaaatttaagaagtaaaaatgtaagtgtatcttcatagataagaaatcaaaataataataaaattgacaaatgaaaaaagtgatatttattgtttacttacttatataggaaataacaaaatcgataaatgaaaatagtgatatctattgtttacttatttacatagaaataggtattgacacaaatatttttcaggaaatatcaatgaaatcatggaattttgaagaagatacaacaattttatttctgctacaacagacgttctgctaatggaacagaagtcagcgaaggacctattaggttttaggtcacttattactcaaagtttatacattctacactaagttatttattgctcaaatttatctcatatttattcctagattgtgtgtattaatacaaggcccagaaaagttgaataatgtacagtatatttcaagtattataattaaaaacttagagatttagcccaggtttatctgaaccaatatcttctgtttttttcactcaaatattttgaggatgagcattatttagcagtgaataggtgtgttcttaggcagaaaatcctccaatgcattcttcttagtgaaagaagccagacacaaacaggatgcaaattgtaagattctatatgaaatataaatccatggagacataactcagattggggggttgttagagtatagagaggaaggatggggagaaacttctaaatgaataagttttactaagctttgtggaaatattttgcaactcgagagagatggtcattgcacaatattgtgaaaatgctgaatgacacttaatcgttcattttaaaatgggtaattttatgttgtgtgaatttcaccctagcaaattatttttaaaatagaaaatacaactgtgatgacaaagaacattagactccagttctaacattatgacagttaatgcatggaaatagatatgactcttttcttcccccacacattacattacaaaagttgatacccaacattaaatcctttcgtaatagagaaaatattgctagacaatgacagtggttccaaggcagctttaagaacagaagtgccacatgtaactcactgtgattcatatctgtgttttgcttagtacctaacaccatacctggcaaaataccctataaaagtgaagaggattaaattttgaaatccaggatcaatataaataaataggtacaagttttctgaaagctactgcctgtatgtttcatagttttgcctttataatcagtcatggttcaacatcttatttctaagtttaactaaagatatattcttcatactttaagggtaggagaagaaagtataaattggattaaaattaaaatatagctttttgatgaaagttgaattctttggcaccagccatcacgttataagcaactttattgacacacaagtaattgcttatacacagtgtaaacatacactatagtttatctcagtcagtggtggctttttattttaaagagctctataaacatgaaaccattttgttatatgtaatcaactacactttgctgcctgattaaaaaaagagattttatctctttcattggatgacactttaataaagaaaaaggtaatgctgttgaatattagaaaacacgggtaataaacagcatcttgcagttgccaaggctttggtaaaaagttagcagtcaggaaaatttccaaatggaaacaagtgttatttgacgattttataaaattcagcagaacacaaagcaattagtcctgtttgtggcttttattgtccactgaagtaaagtaattatagtatttctgatctcatgtcaaacagctttgactctttgagctataatgtgagttctgacattaggactcaaagtctgaatcaaacatcaaacataaaacagtgagggactgcatctttaaaacttgaagatccctcagattttaacctgtaacaaagttgaactgttttatgaaattaactaaatgaaaatagaattattcattcaaggtggaatggataatatttaatggacatgggaaaataaaatgtcccttcaccaaatatatccagacgtgttcagaaatcactttccatcaaagagaatttatttacacccagtatgttgcctggtcctcactgtcagtaatgatttacaaattaaatagtcatggtgaatattcaaacagccttctgcctcctgacatctctcccttcctttcttcattctcaccactcccttccagtttttctttgctttcagcatttggctggccaatctgttttgaacttttggggtagcctgatgtttcagcagggtagttttttaaacagaactttcaaatcttagctatatcccaactttaaaggtcaatgtaaaaataatttaaagtatggagtttttaaaagggatttaaaaaaagtccccaattctgctcagtcatctctgcaatagcgcaaaactacctaataaatagcaaaacttgggaaaggtcaaaatggaaattattaataaatgctaaataacccagagccagtaccggtaatatataaaatgatgaaatgccaatttaaaaccaccatgtgaagcaaaaatatctttatatttaattgaaaatgtccataacaggaagaaataaaacaaatttccaagctaaagccttccaaggcttgattactagattgctgtcacgaggaatatcatttctgcttaggatgtcatggtgcataatggggttttatctttcgcagattattgtactgacctcattaaaataaattaactaattcatcagttgacttgtagtttttgcaaaagatagctaataaataagaaaaggaagaataatttattttttaaaacttgaaagtatttgtctttaatgacaaacttgtggacgttggttgctctcccactcaaggtcattaaccctataatactacatatgctggatagattctgaactttttttttttttttttttttttttggagacggagtctcgttctgtcacccaggttggagtgcagtggtgcgatgtcggctcactgcaagctccgcctcccaggttcacgccattctcctgactcagcctcccgagtagctgggactgcaggcgctcgccaccaggcccggctaattttttgtatttttagtagaaacggggtttcaccgtggtctcgatctcctgacatcgtgattcacccgcctccacctcccaaagtgctgggattacaagcgtgagccactgcgcccggccacgatttttccatagtcaagaaaaatcttaaaatttaatatttaatgcagttatagcctatgaaagcctaaggatggctttcagaaactttaataatcttagaaaatgaccacttttttaaggcacacatctgcccgttgtgagcatatttgtcattagcatttagtaaaataggtacaatccattactgcttatttctaatactatttccgcttgtgtttgcatttcaaagtagccttatgagaaaaaaatagagctttaccatgagttattattgttatttaaaaagatagatggctcatgataatattgttagagttgctttgcccaaactatacttttattttctgaattttcagacttcctttatttctctatttcattcttcattccccctgaattgtttttaatttctggggcaaatcataggaaaaatctccaagatatttaaggctcatatagttagagaataaatgaactttcctatattataaactataaattaggtaactgtaaaatcataaaaaatgcccttggcttgcagaaacaatggtaagtgacagactatgaaagtgtcttcataacttttatctaaatttttggggggctcagtttattattgttctcttcatgcatgacttttctaaaatgagatttggaaggaacagtatttcaggaaaaccctaagttttaatgatgaatgttttaagtaataaggataagaagatttattgtgattatatttaaaacattttccacagtgggtgcccttgggaaaatctgcattctgtgtggtaattaaaattctgcacaagctatattgaatagaacaatgtagaaataattcttggctgtatagatttagcatctatttagtggaatgaaaatctcctgtgaaaaagtagggtgacatcaattaactgccaatttttaatttataatagtgacataaagatgagaagtaaagcaaaagtaaaattaatcaatgcaataatgacatcggacactacttttctaatgcctaggaactatgagaatactgtaagaatattttacattataaaagtaatatatcaacattgctacagtctggaaaatacttttaaataaatataaaatcagtacctagaataatgcctgctaggcagtcaatacatatttttgttgttattgacctatataaatgatctgaacacaagagtattttagacttaaaaagtttacaatattgaaatcagaaaatcatataaaatttatcagaaaataatacaactatttatgcgatggaaaagacaatgttattgaaacaaaagcaatttttagaaaccagatgcactgatgctacatataaatgcagttgatagaactgctagtagaccaaaatacttttatgagtaaacatataaagaatgattgaaagttcatttatcttaggagttatttaagtatgtataactgtccatgaattttattgtggaacatttaaaggaagatgttaataaaccaattttgaatgttgctattcctagacacctcattaaaaatcagaaattagcctatcttatttcataatataaggcagcagagttgtgcctccccgaagtaagaatgtgaagataaaggtatataggtactttaaaatatcttctaaattatatgtaatgttaaaagtaaataaaaatggatgaaataggaatgcatttatgccaattcatgattgatgagaatatatttggaggctttggcaagagatagaaattgtcaagaccagtgactgaggaacagaacttgtttatggaaaagctttcctttctcttgacctcatgtgtacacatgaagtgatgaagggaggagacagccacctttacacttgatcagccagccaaatcaatcacgaaaatcagtggactgtttgccatattgctttcagtccaaagttaggaaggtgttgaagaaatgctgcattttgatggagggcaggtagtctttcaattagtatgtgacaccatgcaagtttagtgaggaaggtgagaattcagcttccttacagtcaggtttactttctggaaaaggcactatacatagaatgacactatatacatgggaaaaactaagaatatactaaatatgataaagctacctgaagtagaagggaatactgtgagaagtctaatggggatattaatgaagaagaataagtccatcttgaaatactgagaaaattaaaagctccctgtatttttcctggtgtattccatgaagagaattaagctaatacagacagagaaaattgcagaagacagaggcagtatatgaaaaaatctacatatattaaaggtaaaggaatatttgagaaaaattattaatacaccatatttcaaagaagagctaatttattaacttttgaactgagtcaacgaggtaactacatattttttttcttttgctctaactcctgtaatttgagacacaattatttgatggaatctttattctattatatatgtattatattccaatttctgatattgactataatatgctgtgattttctctgtgtataggtctgtactggaataatactcatcagtttgcttataaaggctatcattaaaaataataatgtaaaaattaactgcaatacagcaagcttttggaagaatataaacattccctcaatgacccagaaaactacaccaggatcccttcagcatccctctgagtgctgagttgcaggagggatggctgtggctctctgatttgaattgaaactacagacatccatcctctcattctccatcctatggacataagaggcagttgtccccatgtttctgctgcttcttatcgtctacttcagtggcagcctcgggccgtggtttctctggtgtgccaggtcaatgtgtccacggaagagcttgctcctgcaaacccttcctgatgatttctttagacaactccctgtgttcatttctgccctgcgtaagatacctggaataatttttattctctaatgaatgattgaaataaaagtctttcatgaaatatctggattatggaatgaataaagtaggagtaaattctataaaaatgtttgacatcctgtaggttgtaagaaaacatttcaagtttaatttttataaatttctttatattaaataatgtatacttgtaaaaaatttgaaactataaaatataaatgtagtgaaaatgtcgttgtttcctcagatcaaagtaacaagtaagcaagttaacattttgaaatatttcccatcatatgttttttctatttatattttttagtactttggatcattctggatttataattttatagaattacttataatcactgctataattatagattaatactctttaaaatttataacaaacttaatcactgggtgtttctcatctacaaaggtgtcataacaaactttttatcttactggatattagttaagattattttcccttaatatatcttttatccttggacaagtaaagaaagaatctatttgtttaaaagtaaatatttatatgaattccattgaatttaatatttttacatgtacttaaattaagtttgtagggttttttctgtttttgtttgagtcatgcaaataaaattgtggcatgggacattcgtattttaatcaatatgcaacagtgtacagtacaaattggagctgtgctaataataacaaaagctaacaattttttcataatttatgagtaccaggcaccattcaatgtggtttacacatatttcccatctcatataatgttcatagaaactctatccctatttcaattttagaataagaaattttgaggcagagaatgtaattaattgccccaagatcacttagattggaagcacttaaaccaaggctaggagcaagttaatctgactctagattttatacttaaaaacacgaagttaaataaatgctcacatattgctcctattattttccctgcccagcatttctctgtagtcttagaaacagaatatttggcccaggatcctgcccatatgttaaacatatggttctagagggtactgtcaacccgtcatctttctggaagccacacttaactagttgtgatgagcaactgtgactcacacggggccattgtagtggtaatctttgttaagtaccaagggaagggataatttctctggtgttgaaattgtgaacagtgccactacaaagatatcagtagtcatgctgcccattatgtggaagaaaacgagcctaagaccgtgaagccaacacagggaggtagaacccagggccccattttgtaaaccctggcagctgttaatctgttctccagaaatataatcttgtcatttcagaaatggtacataaattaaatcataagaatatccttatgaaattggcttttttcattcagcataattcctttgaaatacactgtccctgcagtgctgggtgacatgccattctgaatgttttaatgttcagaatgctcctgtggttgcctcttgtgtgagttcaaaagcaagcgatgtaaaaaagttaacacagatatttctaaaatctcagaggagttaaactctaattcttactgttaataatgaaaaattacacaaaaattcatcatgaatattctattatagcattttttcaatattgagagtatgtcagggctaagactcacagaaaattattagttttgttttatcaattttatatgcaatctactcaattttacagataacttatggctactctatatgcttgcaccttttttaaaaatgggagaagtcatcatcagagtacagatgtcacctcttctattactaatcaacatatttcatgtgtatttttccttatgtttcagcaattgactattcagacaggaatgtgatacatagaatctcttcttgaatgtaatagagtcatttccaacatactatgtcttatagttagctcaaaatttcgtacccaaacctagtttttataatttcacccactccaactgcttgaaattggatgcctccatgttctcagacaaaaaattttggtgtcctcactgactgcatttttttcacactccttatctctacgatttttttaaaccctgttgcagccctctcaaataaatacccagaatctgacaatatctcatgacctccacagttatgctaagtgactccagcttcccaactaacgtagttgaacctttgatccttcaatccactcccccatctattctcagcccaacagtagaagaagcgtttatatgtcagattaagtcacgcctctgatggaaagactctgatggctccctgcatccttgagcatcctggaaggaaacaggtggcatcctcagcttaggtcatttgaagagtgactgataaagggacttcttccaatgttgcaggcagggtgcagtccgggcaaaccacagtgcaggacctggtggctagtaactgtaggtctgttaccccctctaaactaacagtacaaggggagcaggtagaaggttcaaatcaaacaataaacatgaaactataaagaggccatgatcaataaaacgcaaactatggaacaatgacattgttagcttataaataagtaccctttcaaaataaaggtaatcccaagtaacaaagcatatgttccttttttctctaaatataaagatagataaacagagagatgtgtggataaatagataatatgtgaatctgttggtatcttctctagtcccatgcttcgagttttattgtttacaagatgtaaccaatcttatttcaccaacctcaacctttttatctacctctacactaaggacccatttatattctctttggaagagacaataacacacttataaaataggtgactagcatatctccattgagcaaatgtacgaaattacatagatatttctttttgattatggtgacatttttattaactcaatatttatatcatgtaaaacatttacttaatacttattaaatttttaataaagtaaatcaaaatttagagagtgcagaaaaaaaaagatacacgttttccagattttcctcccagtgttccactggcattattttataaatgaatgacagctgtaatattcaatgcttcatgcttcagttaaaacatctggtgaacagagaagatacgcatttctacttgccagataacctaatatatcatgaaacatgcctaatacacaactgaaaaatatcagcatactagtaataaatagattttgggaagcttgagcaattagcagaaactgtaataattttatatatttatgtagctttttaaggaggaaggcacacagagcacttgtgagagttgtcgtcataacacagcgtgatactgctcgagttgaactggtgctatcacctacttaaggaattggcctagaaacaatctgttactttcatgaaagtaggttaatattcaagctgatatattttgatatatttttccttcattcctcaggcttcaattctagccctgtaaattttaaaaataattggcatacataactcattgacataattacatagaaatatcaagctggctcttcactgtgcccatagtgtgctggtgttgactatgggtttgcaaatccataacactgtctgtcctactaaaatgtgcaaactattttgaaatataattaaatgtaatttaattttttacctcttatgaagtcccaggctctgatttgtgttgtgactatttaatatatggtaccatgcatggataaaatgactattacatttgccaactgaaacaacattaatcttgcctcttttttcatttaaatgatataactttttgttctaaaacaaaatattataaaatttctggttgtttttgtgtaaatgaaaacccagtttctacttttgttgtttttttgttttttgcaacggagtctctgtctcccaggctggagtgcagtgacaggatctcagctcactgcaacctccgtctcccagattcaagcaattctcctacctcagcctcctgagtagctgggattacaggcatgtgcaaccacactcagccaatttttatatttttagtagagatggggtttcaccatgttggccaagctggtcttgaactcctgacttcaaatgatctacccgcctcggccttccaaagtgctgggattacaggcatgagccaccttgcccagccatctttttttgtcctatctataataattccctcaatgctggagtgccctatttgagttatctgatttagtatttgtctgaaactctgctgcccagaatctcacaaggaaaaatttacataccagaattgtttttggcgtctcgacttctattcttcttcctctttgtcactaggtcttcatcaaatatacagtttaattttaaaaacaacttaatttttcattatgttaaatctgtataattttcccaggaatttctggcttgacttatagtctataaattttaggctataggttctagactgaaaatgttgatatggtatcactttatctgtcctcagatttctaagccatatgtcagtttatttggaatattctacatagcaaataagatatgggatattttctctttaaaattatctaaatctgataataaacacatatttttttcttaacttttatgtttgagggtgcatgttcaggtttgttacataggtaaacttgtgtcatgggggtttgttgtacagattatttcatcacccaggtattaagcctagcatccattagttatttttcctttccctccttctacctcctctcttacccctcagcctcctaaaggccccagtgtgtggtgttcccctccctgtgtccatgtgttctcatcatttagctccaatttataagtgagaacatgtggtatttggttttctgctcctgcattagtttgctgaggatgatgacctctggctccatccctatccctgcaaagatgcgatcttgtttctttctatggccacatagtgtcccatgatgtatatgtaccacattttctttatccagtctatcattgatgggcatttaggttgattccatgtctttgctgttgtgaatagcactgcatgtgtctttataatagaatgatttacagtcttttgggtatcttcccagaaatgggatactgggtcaaatcatattgcttcttttaggtctttgaggaattgccacactgtcttccacaatggctgaactaatttacactccaaccacagtgtgtaagtgttccttgctctccacaaccttgctagcatctgttattttttgacttattaagagtcttatgttcatctcatagtttatctgctattaaatgattccgcatattaagtaaagatatttgatgtacacttgtgtgtactgatgtagaaaatgattaataaatatttatcaaaaagttttcaaaatgccttaaaaactgtaagtgttttaatcctattttgatttattacaaccaacagttcttgacaacatatgaagctgaagcactgggttagaaatgtgttaaataagaaatcacccattaagggctgaaggacagttagaaaatattctaaacatgataaatatcattaagggaaacacccaatacaatggtatgactttaaaagatggagaaatcacttctggatgtggctgtaatttcagtggatcgggaaagaattccccatagagatggattttgatctgttgcttaacatgttggtgagcttttgaaaagaaagttgcaggactaagagggattgtctgtctcctggaggaaaaacagaggggtgcatgagttgcaaaacactgagaagagcaagcaaccttaaaagcaactaattcatgcagggcgaatttaaagtaactctaagaatgcacggtaaagaatgcactcatatttgattccaatgcatagtaaagaatgcacccatatatggttccaaaatactaatatcaagggaaaaatcaaaactccttgtggattatcaaaatttcccacataaaattaaatgctt

SEQ ID NO: 2809 - DNA, 2289 bp, Homo sapiens
gtacttatgtacaacatgatgttttcaagtgtatatacattgtggactaaatctagctgatttacatatgcattacctcacatagctatcatttttttttgtggtgaaaacactttatgtccactcttagcaacttttaagaatacattatactattaactatagtcaccatgttgtataatagatctcttgaacttgtcctctcatttaactggaattttgaatcttttgaccaacatctccccagcctgccccaactgctccaactcctggtaaccaacattctagtctctacttttaagatcaacatttttggttgctatatgtgagtaagatcatgcagtatttgtcattctgtgcctggcttatttaatttgacataatgtcctccagaatatttaacaaaattgttactgtaatttcatctacgatgggtaactttggaggctatgatttgtagagtaaattgacgtcttcaaagctgactggttggaaatgaaagaaagagaaaagaaacttaaaaaattacaatcaacaccaggcttaaaggggctgggatgatttatttagcaggaagataagaccctcaaagatcactaataccaaatggtatgttaaagcccactcaagcctgggagaactttccctgggatctgtgtgggcttctgttatgcaaccaatgagaagagtcatcccattatctgtctgccaactggaaaagctacagaaaattgatataaaagggaggtttgcagaagaccattgggattagcttgaagaatgttgcagcaaattttaatttttttgaattcctcctgcaaacacatattattgttgtaccaaactaaatacttttcatactacaatctataacaaaagtgaatagtactttaattgactactttgaactaagatggtttgagctgctgtggctttctctggacagtttctctcatcatgaatacaactgatggcaggtgaggtgttgacaattcctcatggatgttggcttaatattgcatgtccccttctttcttttctcgagaaaaggcagaaaaacaagattgagtctcatgaaaacttgaaaaaaaggcaattctaatggcactcattctaacagccagtcatcacaggcccgctgccctcttcctggtgcaggtccacacacatcccatgcctgctccttgtggagctgtcctggctgggaacatctccaaagcagcaagtcacctcacacgcaattctcttctcctgcaagccagtcagaggcagtgcagagatgatggctgctcaccacagcaccaccagataacctgacttggtaagacagagtgtttttgctaatgttaaaacacaaaacaaaataagtcttccctctggcctgatttgataatccccaaataatatctaacgtaaacttgttatgacacttgcacttcttcttccaagaggtggaaatcataacaatatagtgcaggaaagttatgacatttcagctgaaaactattttatcgttatcatcttcagcctatttttatttttctgacaattttatagcaaaagttaaaaacacctgtagagtagtttcctagaagtttcttttaaaaccaaataaaataataattttcttatgaaagcaatgcatgttcaatggagaaaaataaaagtgacaagaatgaaaggggagatacagtcccatcagccagagattgtaaccagggatctcagttttaaaaatcacacactttctttctcgtccttgcctcctctctcaccattttatttcttctctctcacctctttatttcttctctctctagacactctcctctggcagtgcgtgcttatctaattatgatcttacctagaaatcccagaggctaatcttgaaacaaaccagtctcagagcccccattgtggaatcctcctgcttagggggagttactgggaataagtagtccaccaccatctgctcaagtcaaaataatgccaatcagacctcgggagttgtgactacctaagataaccatcaaacaagacacacagaccctgcaccctgcacccttcccactctcccataccaagtttccctttaaaaaaccttacgcagcagtaggacaaagaacatggctgccgcttcaaatcttgtgtgaattcacctcatcactggaaccaaatttatatctaataaaaaggtaaaatgcattaaagttatattgttaaagagggaaaagaaataactaaaaatattttagaggaaaatataagagactatttcatgaatgtagg

SEQ ID NO: 2810 - DNA, 852 bp, Homo sapiens
gccagattgccatgcctaaaccactttctttgaagtttatggaagcaccactgcatttatgccagaaggtgaaagtccagaacaggtgctttttggtttgagaatgagtgttctacatactggcctgtaaggcagtgctactccaagtgtggtccacaggctggcagcaacatcataggggagtatgttaacaatgctgattctccagccccagctccggactctgttttaacggtctatccaggcatgaattctactcaagtggcctgcccctcagcagaagttggacaggtgcttatgttgcaattaacaaaaaggatacatgctgggtcctgcagtaaatgtctcccttggatcatgaagtctttttaccatgttactggaacacagaagggtactattgagaaccaactaacttggagccgtgtatgagccactgggaatagactaaatgagataatcaacgtcttgatctcatattctttcattctacagaaggaagcaggcaacaggttgcaatacgaagtggagttaaagcaactagaaggaagtgtcagtaaccaagctgagagaggctggaaggaaaacaattcatgcagcagaaaagaaagccttttgagcactgtgatgtcagaaggtgacttggaagatgatctaaatgttaaactggcagtgaagatgcgcagaggttgtagttctgctcccctccccgtcagaattaaggtggagacagcaggagtcacccgaagaatggaaggatggtgccaatgacttgaaaaggagtttagaagacaccagtttgtgacacatgtttctatataggaaaagcagaaatttggaaggagagctaac

SEQ ID NO: 2811 - DNA, 1062 bp, Homo sapiens
ggagaggagcctccccagggtctgcactcctcctcccatttgcagccttcgtaagtggacacttccaacccctacacctgcctgtcctcccagtccagccttggcccgagatgtgatctaattctcactatgctgctgtgggcagagcacatggcatcagaatgctaggagctgctgtcgggcgccatgggagggaattccccaactcaggaaagctcttccagcggaaaggagcaggtggcgagcctccctgaagagacagacactgccaacgctacaggcagagccaatcgtggggtggctaacaaatttttccagcaacacagagctgagaggattgggatctcagagaagaaggagccctgcattcttggcttcatctgcctggagtggagtttccatcatgctgagctggaggtgcacggggccagggaatgagcaagtcgtagctcaaatgtcccagactcttactattcttattgaaatttagtaggttttcttgaataaatgtttcttcatctgctgtatgcccttaggacaattcccaggaacatacatctatattgatatcaatataaatataaatagataattatgtatgtataactttagcagttttacttgttctgctggaaagaaggtctggaaggtttgcagagctgctcatgccaccattccagaagttatccaccagttcattgctttttgcacagtagtattccattgcatgtctatgccacaatttgtttatccattcacctgttgatggacatttgagctgtttcctgtttgaggctattacaaataaagctgctttacaaataaagctgctttgaacatttgtgtataagtctttggacatatgctttgatttatcttgagtaaatatctagaagtggagtggctgggttatatggtaggtttgtgttttaatttttaagaagctgctaagatgtcttccaaagtgattcccccattatgcactcctgccagcagtgtgtgagagttccagtttctccagattctcaccaacacctggtatggtcagtctttttaatgtta

SEQ ID NO: 2812 - DNA, 6067 bp, Homo sapiens
cagcacttgagcagctttcttctgcgttaggaagcctggggagaggggaactggctaaagggcaaaatgtcactgaggaacttcggagaagatggggacaaggcgtcgggcgggggagccagcgctcaggagcccaggcaccatactgtcttttcgaggtaggagtcgactcctgtgaggtatggtgctgggtgcagatgcagtgtggctctggatagcaccttatggacagttgtgtccccaaggaaggatgagaatagctactgaagtcctaaagagcaagcctaactcaagccattggcacacaggcattagacagaaagctggaagttgaaatggtaagtgaaactgtatccaagtaagcaggtaactgggcaaacttcctacggcacaaatggctttttagttacctcctagtgctgaatgcattaaataaatggcggattcttgtcttgttatgattaataagaaagtttgtaaatgcagcctggatgatgataagcaaatgctgactgaacatgaaggtcttaattagctctaactgactaaaggcatttgttagttttggcagggggtgaacactcatctgtggctattctaagaccactcttatttcttaggtggagtccaacttgcctggaccagcttaatggttctgctcctggtaacgtttttatccatggatgacttgcttgggtaaggacatgaagacagttcctgtcataccttttaaaggtacatgttttattgatgttaacgttaattgattgagctactgttagtgatgattttaaaattaaagcagatgggaatctctctgagaaagaaaatggagattaatcttaaactgaaacagtagttgggaaatcttttagaaatccacctattactacctattggtaaaggagattaaatttctacaggtatggagagtcggcttgactacactgtgtggagcaagttttaaagaagcaaaggactcagaattcatgattgaagaaatgcaggttagtttaaactttgaaggaaatttttaaggtggcaaaaggttttggtggcatatacaccttaatctgtagatgggagtgattagctgtttaaaagttaaaatgtgactgagaaggaaattgagtagggcaaattttaaatgggtattatttttcatcttcaaacaggcagacctgttatcctaaactaggtgagtcagcttttggtacatgtgatgattttcagtgtaaccaatgatgtaatgattctgccaaatgaaatataatgatatcactgtaaaaccgttccattttgattctgaggttactctactaacaagcatcacacatttgtattttgccctgattaatatgttggcttcgctttcagggtttttaatgaccacaacaagcaagcatgcagcttactgcttgaaaggtgaggattggaaatgttgggactattataattgcagaatacatgatgatctcaatccaacttgaactctctcactgattacttgatgacaataaaatatctgatattctgcattcccatgtagcattttaattgaagtctgtaaatgtggctaaaagtcttgtcttattttttgagacagggtcttgcctcacccaagctagagtgcagtggcctttgaagcttactacagcctcaaacttctgggctcaagtgatcctcagcctcccagtggtctttgtagactgcctgatggagtctcatggcacaagaagattaaaacagtgtctccaattttaataaatttttgcaatccatctggagtgtgtagtgtttacttaaaaaaggacagtgcttttcatctgttcattagctgtaagcataaatcacattcaaaagctattataactccatggtatttgcttcattaacactgcagccagttaaaattttatgggtattttacaaggtgtcttatgcattaaagtgcaatatttcctaattctccatatgagcaaattgtcaggtttcataggcccctgtgctaattggttttgagcttaaagtattgatggagctacttggagaaagtcatgttgagtctgaggctgggaaaataagttatagaaaatactatagaaatgcccaactagtgataggcattaatggaattgggaaaatctacaatccatagccatggtgataggtttttggcaagcactaagtgtttagggatgccaaaagtgggtataaagggcacaactggtttaaggcaatctgtcccagggaaacaggaccaaggggccaaaattccaagatgggtcaaattttaatttcagtgtcagtacagctgtgcttataatgatgtctttgttagcagtaatggttttacaaatctgtttctgggctaaagcactttagtcccattaatgataaaacttcagttactctctgaattttcctttttttgagactgaatcctgttgcccaggctggagtgcaatggcatgatctcaaccgctgctcactgcaacctctacctcccgggttcaagcgattctcttcagcctcttgtagctaggactataggcacctaccatcacaaccaactcattttggtatttttagtagagacgaaaccccatcctcccaaagtgctgggatttcacaggcctgagccgcagtgcccggcctcccaggccttttatgcttgatgtttttttcagggcccttcccattgtcatttcacaatctcattgaaatgtcagcttatgcactaaatgcgtgtaagttgggaatgcccaattttgtctaagaaaaaaggcctccccctcccccaaataagcacattctttcatttcctggggctcacccgaatgtctcacacaggctgtaaaacaactaccaccacctggctgggtgctgaggtgggcagattacctgaggtcaggatttcaagaccaacctggccaatatggtgaaaccccatctctactaaaaatacaaaaatctagccgggtgtagtggtgggctattgtagtcccagctattcgggaggctgaggcaggggaactgaacctgggaggctgaggttgcagtgacccgtgatcctgccactgcactccagcctgggtgccagggtgagactttctcaaaggaaaaaagaaggctgggcgtggtggttcatgcctgtaatcccaccactttgggaggccgaggcgggtggatcacacggtcaggagtttgagaccagcctgaccaacatagtgaaacccccatctctactaaaaatacaaaagttagccaggtgtggcgtgcacctgtaatcccagctactcaggaggctgaggcaggagaattgcttgaacctaggaagtggaggttgcagtgaactgagatcatgccaccgcactccagcctgggcaacggcgagacttggtctcaaaaaaaaacacacacacaaaactaccaccacctaccccaatcggttaccctttacttttcatgtgaccaccatgacctattatgtgttttgttcttacttcccccacaagaatgtaagcgcttcaagtttattccttaatgttggaaaaatgaatgaaactgcaaatgtagtagatcagtttttggggaggtaccaaagacaagttggtaaaataccttgattttgaagtgaaaaacgatgttacatttcaaagtatcttttcgccaggttatggctcaggcttcgagaccagcctggccaacatggcaaaacccggtctctactgaaaaaaagcgaaaattagccgggtgtggtagtgtgggcctgtagtcccagctactctgaaccctggaggtggaggttgcagtgaaccaagatcgtgccacctcactccagcctgggcctcctaggctcaagtgattgttgtgcctcaactacctgagtagctgggatgacaggtgtgtgccaccactcccagctaatttttttttctgtatttttagtagagatggagtttcaccatgtcagccaggctagtcttgaactcctggcctcaagtgatccaactgccctgccctcccaaagtgctgggattacaggtgtgagccactgcatccagccaagttctattctttttttttttttttttgagacggagtttcgctcgtgttgcccaggctggaatgtagcggcgcaatcttggctcactgcaacctccacctcccaggttcaagcgattctcctgcctcagccttccaagtagctgggattacaggcgtgggccaccatgcctggctatttttgtatttttagtagagagggggtttcaccacgttggccaggctggtctcgaactcctgacctcgtgatctgcccacctagcctcccaaagtgctgggattacaggcgtgagccaccgcatccagcttcttgttctctcttttatatataagtgccatttgctgaatcagaaaactttttgacaagcatattaaaagatttcagttgtatgtagtagctcatgcctgtaatcccaacactttgggaaaccaaggtggggggattgcttgagtccaggagttcaagaccggcctgggcaacatagtgagaccctgtgtctacaattaaaaaaaaaaagaaaaaaaaagtgagccgggcatgatggtgcatgcctgtagtcccaaccactcatgagactgaggtgggacgatcgcttgagcccaggaggttgaggatgcagtgagctgtgtcacaccactggattccagcctgggtgacagggtgagatgttgtctcaaataaaatattaaaaattggatcaccttattcagcattctgttgtttagcagttttggaattttagttgttagtaaatcttgaccttgagtacacgttattttgatattctgtgtgacaaaatgggaagtatgcatgaagcacatctgccataaagtatggatgtctagatttttttttccctagaaaaagtagttacaattgtttgagatacaagctgaactagctgcttgttttcacagaacatttttagtttgaaaaaacctgacaaattgattattcatattttaggggtaattttggcagagatttgctcaaaaaagaacaagtcagcttggaaaaaactgatggcatttgttgccaatgataaaactcaagcttccaaatgaaacctaaaattttggaaggcttgtatacacttctgtgcccttatagcttcctcagacttagacttttgtaatgggattggtggtaatattaattaatggtattttgttttagatattgtatatcaaaatgtgtcaacatttggaagatttgcataactcagtgaaccaatattttccaaatgatcaatcactggactggtgttacaaatatcacacataggtaaaagttctatttaaatacaaggtacaccaatggactttagaaaagctcatcaatacgatttcagaatccacattgcaactagcctttaaggaactctactacttgtcatattttggtgtggtatcaaagagagtatccataattatcagacaaagctattaaaatactcctcccttttccaactttatatatgagtggggtcagattttcttcacagacttcaaccaaaacagcatataacaacagataggatacagaagcagatatcagaatctagtgtcttctattaagccagaaataaaaaatatttgcagaaatataaaacaatgttactcttctattttttttttgaaaataattatttttaaaataaaaacatggctgagtgtggtggctcacgcctttgtaatcccagaactttgggaggctgaggcaggcggatcacctgaggccaggagcttgagaccagcctggtcaacatggcaaaacctcgtctctactaaaaatacaaaaattaaccaggtgtggtggagggcacctgtggtcccaactactcaggaggctgaggcaggaaaactgcctgaacccgggaggtggaggatgaagtgagccaagatcgcaccattgcactccagcctgggcaacagagtgagactctgtctcaaaataaaataaaataaaaacatgctatttgtgttaacatgtaatggg

SEQ ID NO: 2813 - DNA, 662 bp, Homo sapiens
aatcccagggtctatttcaatagattttttttcctcttgactatgcatcccagttttctgggttttaaatatgtgtcttataattttaatgaacacagtagatgatactttacagagataatatgttctgttatgctcctctgtagaattatttttgttatagaaggttgattatcttgaacttgtggtattcttatcttacttttataagaatgtcttgttttgttcgcagaaaaatctctcagttctggatcatagcatttacttctgaggtatggctgtttttgagtttcagtggaagactctgacgtttcaaataccaaggctctttacgttgttgggacccaatttgttctcctctacgttccagatgagcacaccttccagtccgtctgctgccaacaccacctacaggggtcccacagtagccattttcattgggctataaacagcataaagaggctattgtcggagagcagatgcaggaaaagtttttgccaaatggcatattctaaggtgaacaggttttcacaaatggagcattaatcacaatcctctgatactaccaattatggaagcagaccaagaataaacctgcaaatgagaagagccctttcctcccttctcaaattaagaaggcaaacatattggaaatgcaaaag

SEQ ID NO: 2814 - DNA, 2276 bp, Homo sapiens
caggattcgaggaccacacgcctcagccagccccggcaagggcctatcaggggtgggtcggggcatccgagcgggtttgacggaaggagcggcggcgacggaggaggaggatggaggcggtggtgttcgtcttctctctcctcgattgttgcgcgctcatcttcctctcggtctacttcataattacattgtctgatttagaatgtgattacattaatgctagatcatgttgctcaaaattaaacaagtgggtaattccagaattgattggccataccattgtcactgtattactgctcatgtcattgcactggttcatcttccttctcaacttacctgttgccacttggaatatatatcgatacattatggtgccgagtggtaacatgggagtgtttgatccaacagaaatacacaatcgagggcagctgaagtcacacatgaaagaagccatgatcaagcttggtttccacttgctctgcttcttcatgtatctttatagtatgatcttagctttgataaatgactgaagctggagaagccgtggttgaagtcagcctacactacagtgcacagttgaggagccagagacttcttaaatcatccttagaaccgtgaccatagcagtatatattttcctcttggaacaaaaaactatttttgctgtatttttaccatataaagtatttaaaaaacatgaattgagtttctgtagatttctagttctcaactttagcctgaacgccaacacttgaaggtgtttttcatcctctgtatgttgaaggtggttatttgtatgtaggaacaggactgccatcccagctttgcatgccaaagaaataaagaacacactttaaagggcaaactgaagagatgagcgagcaaaggtgcccttcaggtctactgaaaagttagagtacaaaacaacactgttgatctggacaaaagaagaaaaattaccctttttgcttgtgttgtgacaacttcatttaatatggtttaaagatttatgagactgtcagctaaaagtcttttcacaagaatgtcaacagagaatggcatctcaaaatatatatatttctttgcacaatttgtgaaaccttataagccattttccccaggtacaatgtagttcctgctgatagaaaggaaatattttgtcaagagctttcatttaaaagctactacctccacaatcacccccaaacccagaaaatccccactggctcttgccagtctggttttcgtattgcagttattccaattgtatttgatctccctgataacgtattttcatgggtttgggtagaagatgctaatcagattagaagcaggaatagttatttgctgtctgtgaaattgagccttttggtgcgccacgtggtgccagatcaacacttctatccctctgcactgaccacgttgtgaactgggagaccaaatgcaagccatttcatggacatagcaatatacaaccaaactctgttccttggagttatattgtaaactcttgcaggtgggagagcagttcacctccttagctctgtttgccagctcttacagggtaaaataaacctggcaatttatcctcagtcctagtttgtggtttaatgttgctatcttaagcactggcatttgggcaaaacatgactgtgttctgtgggagaatccaaaggcattattcactctagttgagatagaattgggtggctaaacagggtgtgtggtacccaaaagattaaatgttacatgtccttttagtccttgaccaggtctagccttggcagaagcaagggagccactaagccaaactccctgtgcagacagaccatgtttcaaggctggaagtagtgccctggcaacacacaaaaggaacggtgaaatgtggtagcaactgcccttgctaatcaccgtaacctcggctgagaaagaagaggaagcgaaatccaagatgcagctcagttcatcaaagcctagcaggtcccctcagctgccttttcatgcctgccacagactacagtaggacaaaacctgacctggtctttgaagttaagagctaagaaagcttcctatagtagtatctcccatggcacttaccacattctatctggtattacagttatttgtatgcaattaatcactcttagattgtatgttcctggagggcagaatatgcccattcatatttgtatcttcttccttctgctcttggcacctaacacagtgccttgcacacaaacaataaatgattgttgagtgaataagtaaacctgatt

SEQ ID NO: 2815 - DNA, 3164 bp, Homo sapiens
gttgctctcctcccttccccggtcccgcccccgtctgtctgtgtcgactgcggacgctatcgataaagttgctgttttgacaacatggcggcgcccatggtccgtggcccggcagtgctcgcctaaaggtggagaacgaggagtagaggagccgcaggccagagcctgtgagcagatccagacctacagataaaaaacattatttaatctatctgggatttactccggcttatgatttgagggccttctcaccttctgaagaatggcttctgtttggcagagattgggtttttatgcctctcttctgaaaagacagctaaatggtgggccagatgtcatcaagtgggaaaggagagtaattcccggatgtaccagaagcatctacagtgccacgggaaagtggacaaaagagtatacattgcagacaagaaaggatgttgagaaatggtggcatcaacgaataaaagaacaggcctccaaaatttcagaagctgatgtgagtattctgagagattctaagagggtagagaagaggggttgaaggtttggaccctggggttagactacctggttcaaataagatattaaatatgtgaccttgaaccaaattgttgaatttctctgtgcttcaattctcttatctgagatggagagtgatcataatagtgcccacctgcactattgggaggggtaaatggattgggaggcataaatgaggtgatacaaaggtagtgtttacaagagtttccaatgtggtggatgcacacatagtaatattgcgcacgaggtgtatgacagacagcagcaaaccaggtgttctagagcaacatttactggggaagctcatcaaaataggagctctaccagatgatgggtcctttgtggtccattgcatggtggggcagcacacagggatctggcagggtcatatctgagactccaggagaggcacctgggctcctcgctggctacatgttctgagaagtaactgccccttccctggcaatcgtagcctccaactctgttctgctgccttagcatcatggtttggggcacaccagccctttcactgttgtgaactggggtagggtctaaccttgaggtagcagctacatgagttagtggacccttggcttctgcaccaggtacaccagctcggcactctacctgaattaatggtggaagcataatacttggctgcagccagtttccacagagtgctctctgttccttttctgggaggccagcttgctgggaatcagtctggaacgtgttaacccttacctcttgatactggtcaaaatgacagctgggagatgtgattgttacatgaaatgtttgaatctgattggagttttaaattctgatcatctctttgtagtagttatagtcaaataatacaaaccctctatgtttaataaagagattaggcccaaggcaagcagctgaataagtacagctgcacaagaccacacctctctagacttgccttttccccatctcctgattcggtcaacacattcattctttctgtgagattggtggttatgaaaaatgagtaaggggaggagagctatttgtgttaaactgaaagatgattttgggcaatggttagaaagaaaaattgctattgaaaaagatgtagtgtgtaacaagtaaaatgaaatgaaaaaaagggaaggtttgaatgtaatacataattttacaatgaaagcttgacttctaccttgttaggaagtgaaaagcccttgtgtcaacatcatcagactaatgtaacttaatagattttgaaaacaaactcttaaggagcagtttaattctgagtgaggacagtaaaattagcttttttttcccttttggtttagataatcatttattgacttccaaatgttttgatgttgtagcttactgattttgtgacatctcattcttcttaagcatacagttttttaaaatatcaaatggatcaaaataaattgttttagcaattggggagatagcataaggggcattgtgtgtgatcccctggcagccccctatcagggtttgaatcaaggaatggcaaagcagagtgagcactcagtgagtgagccagagcctgggctgcaatgctggctctgccccaggaaacctgtgtgatccaggccacatcatttaatgttttggattctgggctccttgcattgtttatctcacagaattgttttgaaaatcaaatgagaaaatgtgtgacaaaatgcattttacaaactgaagtggtacataaataaaagatacacaaagatcagaacgtggtgtgtctatcaggacctgagactatgacggaatgctcatggattttgaagcatttataatcgatctcactctggtatcagattcacttgaaatccactcacataagttttttgaaatggaatgtcttgaaatcaccatatttatcatttaaaaaataatttgcatttaatgagcatttaaccatgtgccaggcactgtctttcaattgattatctcatttaatcctgaaacaacccagcgggtaggtattattatcctcatttttggagtaagaaaactgaggctcagaaaaaggtttaggtaatttgccaagacatggcagagccaggattcaaaatcaaatgtgtgtttgattcctgagctcatgcttttccacacagaaaccttcttttgtctcacctttgatttacagttagcaaactgatcccagaaggcaaaagaatttgcccaaggcctcacagctagtgacaaagctaggaccagaactggggctccggattcctattgaggtgctccttttactctgtcaccctctaggctcagccacagcttcagagcgtgatctataaagaggcagaagtcatctttcttctaaagtcagaagctgacaaaaataataggacccacttataaaagccatcctttccctatcatttaaatcttaatctcttttaaaggcttaaattcttatacttttatataattatgaaaatttccctttcaatcagattcttgctcaattataacagaaactcccatcattccttctctcttttccacccccagatgatagaactcatttcattgtcacagaggaaaatgacttaattcatgcagaaaagcaaaaggcagggacaggcaataagctg

SEQ ID NO: 2816 - DNA, 5153 bp, Homo sapiens
gcccagggtagactgtatttccaggtccctcagatgcagtgcaagaggggcatatgcctcggagactatgttccccaagcagctttgtgagccttgggagaccagctcaggatgaagccttgtcttctgttatccattgctgcctatctaaatgtgaagaataaaaagttcagaagccatttgtattcaaatagaatgcaattaaaaagtcccaggcaagcattataagctcataaacaagagagctagcaagaagaaaaaaatcaagaagcaaatcttgaagcaagttataacctgccagatgtgacaaaggtgatagaaaatcagaaaagaacaaaaaaagttatgaccgttaattagcatatggaaaaagataatcagaggcccccaaggaagctggattattaaaaatgcgacctccatttcaacaaagaaattccaggcagtgacacggttttgaatttataatgaggattgatgaatagaagagaattggatatttcaagaaacaaagaaatacatgagttgaagctacagttaacaaaaaaaaggtactggaggaaaagttttctaccaaagacagaatatatcactctactcttatactcttctttgtgtttctacaaccacttcgattcttcttttctgtattgtcagatccctgctaaatgtttctccagaaggtgctggttttttctggtcatcggggcactgccatcttctgtaatcgcacctcttcgaaaaatatactatttttaccaagagtaaaaatagtattcacttatccatggggaatacattccaagatccccattgaatgcctgaaactgtagatagtgcagaaccctatatataccatgtttttttcctatacatatatacctatgatgatgtttaatttataatgggcatagtaagagattaacaacaataactaaaaataaaataggataattataataatatactataatatgtgactatagtctctctctcaaaatgtcttactgtatgtaatattttcagaatgtggttgaccacaggtaactgaaaccaaagaaggtgaaacgaaggatgaagggtgctactgtacaagcaaagaaatcccctatggatattcattactgagatacttctgactgatctcatccatagtttgcaattatcttgatcgaggtctaatgattactgttaccataacactgaaacaaggctataaagcaaagtatcctttgaccaaaattgatcaaataaacatcagcaatacaaactgttcctaatgataaaaatagttactatttattgagtacctcgtataggcagacttagcacccctaatgtctgatttaattcttacaacaaacctgtgagttttgtatgatgatctttattttaaagatggggaaactgcagttcagaggggtttgataacttactcaagatcttctagctgataagggcagaactggacctgacccaagttcttctcacaccaaatcaaacacaggtaacatgacacaatgttcctataatttgtgagtccctttacagctttaagtgctttcatatgagcaagggcaacttccaaaatctgaagacactttgatcaaagttgctatggcaagagattcagaaaacaaagagagtaaaaatcttaagatttagattctaaagttggtgaataaaatgaaagtagacaaaattaattcttagcgcttgtgagagattaagcacagtctgccaatctctttgattacaactaaaaactagacagaatatataaagcaactatctgagaactttgaagagtaatagtaggcatattgaggagggaaataaaagcttgaagatcatgactgatacaggagcaagtttcccattattttaattttaatttttattttaaaaaagtagagatgagggtctcactttgttaccgaagctgttttcgaacttcaagcaatcctcccacctcaacatcccaaagtgctgggatttcaggcatgagccaccatgcccaccgcccacccctcctgctcccccacctttaaaaaaactctgccatatcttccggtttatactcaagagcagcctgaatgctggaagtctgcagcagttgtgaatagaaaaagctccaagaaaaacgcttactttttggacagaggaaataaagcaggaagtgggtttcttacaggacaaattgttcagtagaaatacctcctctcttcattttctctctttttattctctgagtcctgctttgaggcaagccccagtcatgaagctgacttctgcagtagcggccgaggccgtaaaggcacctaactctctgaaagactttttctccgatcagtggaccctgtggtcttgttgccctgcccttaaggtgaactcagtccttgatgtgtgtaacagtgcagggaggataaaaacccagtttttaagttatagtactgggaaaagggactctgggttctggaaagtgtgggggaaatatcacagaaagaaaggaattgacaaagaaatcccttgaatctgtgtatcaaatcttaaactcaccactgagttgcacatgcataaaacagatctgaagcagcacagcaaaggcttggagaactgaactacgtgtagaatgcctcctatatcctatacctgggtggtgctcccatggtgcagacccaaatatcaaagcaaatgttttgaaaaataaaaactgacattgaaacagaaacatgcaaaaggtggatgagaacttgcactccaacctaatcagattgattacaaaaataaaaatagacattttccagagcatttaaactagagtcagagactcaaaacaaaatttaaaatgtctaggatataatctgaaattactcaacatacaaagaaccagaaaaatctcagtaattctcacaagaaagtaagaatcaacagattgcaaccccagatgatccagatgttggaattatcagacaaagactttaaagcaattataatagctatgttccatgaagtaagggcacatactcttgaaatgaagggaaagatacaagttttcagcaaataagcaaaaactaaaagaaataaccaaatgaggattttagacctcaaattacaacaactgaaaaaaaagttccctggaattattgaatagcggaatggagataccagaggagatgagaaacgtgaaaatagataaataaaaattatccaaggaaaattttaaaacattttgaacataccaaaatttgtgggatgcaaccaaggcaatgcttataggaaaatatggaacattaaatgctcatattagacaagaaggtctgaaatcaaaatatagtattataccttaagaagctagaaagagttaaacccaaagtatgtagaaagaaggaagcaataaagagcagaaatcaatgaaatttaaaacagaaaaataatggaaaaaataatcaaaaccgaaagcttgttcattgaaaagaccagtaatatccggaatgaggtgagagagagagagaggaaaaaaaaaaaaacacaagaattacaggtatcagaaacaaaaaaggagatatctcaatagatgccacagacattaaaaatacaacaagggaatacaataaacaactatgctgataaatttaagactttagattaaatagaccaattatttgaaatacacaagttgctaaagtttatacaaaaagaaatggaaaacttgagtacttttatccgtatccaagaaacagaatttatagttaaaaaccttccagcagggagaatttcaaacctaagtgtctttacttgtgagttctaccaaatacataaggaggaaataatgccagttttacatgatctctactcatcttacaagaccaacataacttgcatgcaaaattagggaaatagaatagaagaataaaaagaaggaggaagaaaaggaagaggagtgtttatatgaaacataaagtaattagaatagctaaaataattttttaaagagaagaaaaatgttggaggatgcaaaatacctgattttaagacttcctgtaaagccacagtagtcaagagagtatgatattggtgaaagaatagaaaaatacatcaatggaacatttcaataaccctcataaacatagcaacacaggcacaaaaacctccagtaaaatattaatggtgcaaatccagctatatattaaaagtatattactaccaaagggaagagggttatcccagaaatgtaaggctggttcaacattctaaaatcaatcaatgtaacttaccttattatgttttattttcagaaatcattcattagtttgtttgataaatatttttgagcacctactgtatgtctggtatagttgtaggtccttgggaatcatcagtaaaatgcattaatacatgactttaattctgcagcatttagaaaaaaaactctctgatgtttgatgggtttttaaaatatatatacatatatttttattatactttaagttctagggtacatgtgcataatgtgtaggtttgttacgtatgtatatatgtgccatgtcggtgtgctacacccattgactcatcatttacattaggtatatctccgaatgccatctctcccctctaccccccctacaacaggccctgatgtgcgatgttccccttcctgtgtccaagtgttctcattgttcaattcccacctatgagtgagaacatgtggtgtctggttttttgtccttgtgatagtttgctgagaatgatggttttcagcttcatccatgtccctacaaaggacatgaactcatccttttttacgcctgcatagtattccatggtgtatatgtgccacattttcttaatccagtctatcattgtttgacatttgggttggttccaagtctttgctattgttagtagtgccacaataaacatacgtgtgcatgtgtcttcatagcagcatgatttattttcctttgggtatatacccagtaatgggaaggctgggtcaaatggtatttctagttctagatccctgagggattgccacactgacttccacagtggttgaactagtttacagtcccaccaacagtgtaaaagtgttcctatttctccatatcctctctagcacctgttgtttcctgactttttaatgattgcca

SEQ ID NO: 2817 - DNA, 13575 bp, Homo sapiens
ttcttcttgtccaaatgaagttattacaatgaataattttaatacaactctctttctccaaaaatgttcagcgttctcatcctgcttaaccatcagctggaaataaagcttggagatatttcacggttgtaaccacagtggtgaaaaggtgggagacttttaggaagacatcaaatgcctttttatatttcacacaacctcctgggaggtggaggctaggagtctctggcaaaactaattcattatctgtaaacctgttttttatgccaacctagacctcacagaggaccaggacagaatgctatctgaattatgctgtctctctggggcactgctgtctcttcatctttgatgttctgtgccacatgctcatttttctgggccatttgcccatgtactttgttctggataggtttgcttttttaaatttcacatgtaaacttgagaagaaaggaacttgggagtttttcatgattggcaaagcaatgagctctgcagctatccatggaagattatggcgatggatgaaaccagcattctggaggtcatctccagcaacaaaaaatgactagaactttcttatctctgttaagaattttattgatgataacttttagtaacttgaggaaaccttagcgtattcgtctttactatggcatttttcacaaacgtagaaagctgctaatgttaattttaatgtaatttttaagttagcatacaaattacatccctcttgacttactgcccatatagctggagtcattcaaaaagtcagaaatatcagcctctttgcagtggtttcctttagcttttcaggaatatagatgtcgaacaattagtaaaattctcaaatgacagacactttttttcctcactctgagttatatgtgtttgctgatgtgaacagatggactcggtgattgggtgagacttctttagctctgccttctgggtgtcactcattgtcatcactcgtggttagggaaggacttcccttcacattctgttatactctgattccctgtaaaacctaaagattatttctaaaagtcattggttcaactcaccagatttctcattggttctcagagggtgtattcacttagcctataaacccaccactgccatctaatcatgcaatttcttcatctctaaatgtatttgctcacaattctctgtataacacaaagtaaagaaataatggaaaataatattctgcttctaatgctgctgcctgcttagatgtatttcatttcttctaagaccctatcatattggctagtaattatttcctgactcttattttctgctttattttctattcaacctctcaacctctccttcatgagctgctggtaactgagtttgattcattgctcaacaagaattttcattgttcccaatcatctttgtagatgtggttacttcaaaagcgtgtgcttaaaaatatgaagtatatgattatcgagatgtggaaaaattcataataccttatttgtaccattcttagtgagaactgcagctaatattccttgactccttaccatgtcccaatgcccgggccatgtgtgtgctctgtttgtgtatgcacatgaatgggtacatgtgcatgtgtgtcttcaagtgcatgtgcatgaatgagatctcatgtaattcttaaaacagctctatgaattttgggtatactcactatcttccttttacagatgaggatacaaaaattcagagtgattaagtaatttccccaacatcacatacctggtaagcagcagaactcaaaatcacattgggtagctacccaagtcttgcttttgatgccagcattgctcccttactgtacttttctttttgacttatggcatagttatttgaggatgggttttgctcactgcagcagattaaagatgctgtaagttctttgacatcttcccatcaagagttgagttctatttccccttttctatactctggacttgcctgagactactttgataatagagtgtaatataaataatggcggggcattctgagccttgccctaaaaaggactggcagcttccactttgatctctaggaactctgagccagtgtgtaagaagtccacataccctggggctattctacagagaggaagcttaaaccagccacttggaaaggcgaaagagagatagagaagacggtccagccagtcccacctgttccagccctcagtcgttctaactctccaactgtacaagccattttagctcaggccacaaacttcattgagcagaagctagcttattcttactatggattgtcctaattcttgactagtggaatcatgaaatacaatgataataaattgttgtgtcaagccattaagctttttagttgcttgttactgaggaggagataaccaaaacatccacgtttgtgaatgatatattctttgaaaacagagatgatgtctcattcatctttatatttctagcatttgtgtcactggaggtcaattaattttagatgattgaatgaataaatggatgagtggaattaagctattgggaagacaagcacacaaatctcatggagcttctgttccagagggagggagggggagacaggtaataaagacataaataaacattctcaggaggtggtgagtactatgattggaaaataaggcagtgtaagaggacatttttgcagagactggatgagggaattgagtgagccttttagtacctacaggccacatggactttgactttcatgcttaaaaacaaagaatctggcttctatgttctctatgtccatatacccctgagttttgtgatggctgcatcacatctcagggtctgaaaagaggttggtgccagggcagaaagcgtgggcagaaaaagcattggttatgatatcactcaacaaaaaccacccctggaatatgctgcattctctcttccaaatccttgcaagtatagtcccctctgtgtgaaatgttctttacaactgcaagccctttcatcgttttcttgtcaagttaaaatgttccattctcagacagataaatttcttcctctactgtgttacagatctttgtattaatagtacttttttcaaatgcttgctcatcctctctaatataaaagctattgttatatagctttcccccagctatttgtgaaataaatgagagtaaagtatctgtgtcttcccatcatctccactatagctcttagtacagtgtattgcagtagaagatgcttgttacattcaaaacaagaaacagagggaagagataaggaaggaaagggccatgcctccttaactttactcatgtaagaaacacctggcacataaaatatattcggtaaataatgaatgaatgaatacatgaatgaattaattcgtgggtaacttggtactattttcagtatttttggtcataggttcattttctctcctattaaattcctaaaggcaaatatatttttttccagtagttgagtagtcctcattgatgatctgggcatcacactttttgtaatgtacataaggaaccaaattacctggtattgtaaaaattggtcaccagagcatgtcctcaagttctgcacatttaattaaactaatgtcgtaatggtaaccagattctcacagtgtgaaagctccttctgggaagtaacttaggaatttttagacgctaatgttcgttctctctctttctctctatcagaacataacctataactatttaagttcaccaactgaaatattaatgagctaaaaatgctaatttttaatactgaaattgcccaatttatatctagaaaacaatttatgcagtaagatgccttaatgtgatacaggcacacacacccaccacccccctccacacacacacacatgtgcgcgcgcacacacacacacacacattttaactattttgctataatccaaatgaataatttgcaaaaatacatttcccccatacatacctgtggactctttaatggtagctgaacttaaaactttctttctcgtgtaagtttttggaaggatattgattaattaggatgtaatgacattaactatgccactcttgtttcagtagcaatttcaattaatagtgtgagatgtagaatatgtaaaaaaggagtcagatatattgtctttgcattaaaatgacaatggattctgtttatatcattccattatgtcagacagtactgaatggtttagatgtattaatagacaccccaaatgttacctctcccttttaaatatcataactggcagaagtacaaatgttagtgaaggtacaaaactatttcctgattgaatgggagaaaatgaccttgaatgagtcgacacagttaaggaaattaattattctaattcactacatttgaagaattaagtcagagactttaaactgggacattagaatgaatgaccatatcatttgctatataaatatcaggaatagaaagcttgtttgttatttgctgtttgtttaattggttggttcctggctgtaaagggaacattgggctcatcctaattgattaagtaccttgtttctccatattctttaattttggattcaaggcttgtatgtaatctgtttgatggttttatttgcttttttctgtaatgcaactttgctgactaggaattggtttactctttcatgtctgacggctctaataaattgaggagcttaggcagacagctcttttatccaagggcccttactgggctggtgatactgctgaaacctgcctagcctcaaaaaatgctcagagagggataagagtcctgtagggaggaagaaacaggggaatttttttgcagtgacctcaaaatagagacagagagacagagacagagagagagagagagaggacaaatcactcacatggaagtctgtcaaaatgagaatgagagtaggctggttctgctttggctgatgaaaggatggtgaattgaaaaaatgatcaaaagtgacattgtgggccaactaagaaatatcaaaggagaccgtactgccgatcagtcatggaattcaccatctgctagggagcagctgcacaaacatttgctgagtgattatatagaaactgtagtggttggtgggatagatgcagccataatgaacgctcactgggttctgtctgtctcttgctttgctccttgtctttccttttgccttttcccttgcccttgaccttctctttcttttcacaaagacagagctatgtcagggacattctgggagatacaaagatgcatgagacataattcctgccttcagggaagtctcaatctgatggaagcgacagaagtagaatgggcaatgtttacctgtattttttgttttgcttgaaaacagattctgataaaattgcaggaaatcaatggggttgggggaagtctagttacattaattaatgagatgtgcattttattactgtcaaagggcatccattttatctgatttcctctattttgggagtgccagttgattaaaagctttactaattatgttccaagtggatggtatctttctctttctgagaaatttaatctacattcctgtctttgcctgtcttagtcacacatatcaacttaggattctgacttacaaatctgacatgaatatggcgacatgcagtgtgttcttcgggattcatctttaatattttcaagatccacatcagttgaaggatctgagctgatgaaaagatgactttcagctttctggaggaactcaagagggactggggagtttattttgtccttggatgaaagagaaagggttttgttgtggggataaagcgaaggcactttccatggtgagctgacatcttggtgttttttttgtttttgctttattttctggctgcctcgagcaactcatcgtcagaggagccatcagtgcctttggtcttttatgtacaaaaacacaccaaccagtggaggaatatggtgtttgtgatcagtgcttatgggtagtggtgacttttgatagttttgggtttttagtgctagcaagctacctgagtgtcagtgaagagtggccccagtgatactgtggcacagacacagttcataataaatgctctctctatgcctggaaggcccttctccactttttccaaatacatacatcatcctggcctcatggactttcacctgcctagaatccattcctcctcttcctgtaccaccatcttgatattttggagagcctcttttccctcaagctgaatctgtgggaaacggtgtagtatagtgttgaactggatggtgtctagagccagagttcctgggtttgaacccagtacacacactcatcatcagtattggatatactctgttctttgtattgatctttctgtatctgtcctcaattgactgagctccttgggagctcctctagttgtcatttccatatggacaacttcagctgctagcgcagagcctggaacatgataggagctcataggattaaatgaaggaacccctgtcgtggataatgacaggacttgctgtggaacactggcatggcattttgcctattccacctgtatgtccatcaacattgatataaaaaaagttttcttctgaagttagagaacaatgtctccttccacctaaaaaataaccctatcactttccaaggtgcctttttcttgtaatttttttcaaatgtgctatgcatggtgtccagatcattgaatgagtggagtgtttaaagtagttcaatcctttggaaattgtcaatagacttgaaactttggtgatattgccttattatcactaatttaatggttttttggtgtgtgcagataaggtctttttgacaaattgaaaacatgtgaacccatatacttcatgtattttggcagatgcatttgtgatgaggacttcttgaagataatagcctaacttttataattatttctctatggtaaataatattattttaaagaagaattgttttcttcccctattaagtgctacatgtcaaagaagtaggaggatggaacaaatttgaatatgaatttctcctgcagtagaaaagttaacatgtagctcactgaaaactgtcttggtcaaataaatgaatattgactttggggaaaaaagaaaagtgaaggagaaagaaatgtagaaaaaagtataattcattcttttaacgtggcgggttatatgctttagcgtgcatctttttgttgttgtttgtaggccttgatgtattgatgtcttacatcatagatgctaaatcacctctcagtgcatttttaagtgcttaaggcagagttgttcaagtaatagagaaaaagtgctagctcatgtggtctgaatcttgatttccgggtgacaattttcttcttactcctcccatttacatttttgtacgaattgggacatgctcctaataattccttcttctctgacttcagtcactatttccttttgcatttccataggctaaatatccaagctctaagactggaagagttttagttataatataatggatagaaacatccattattataatataatggataaaaacatccattattataatataatggagagaaacatccattatattataactgagataaaatattattactgttatttaacagttgattgttagcatgcattgatcgatatttaataaattaaaaattcagagcccacccttctcatttagcttcttacagaggaaaatcatttcaggctctttagtcttggtacaactgtgctataagaaagcaatttcagtagaaaaaatggatttggatcacagtttcttgatgggttttgtagaatttgtcagttagaaaaaaaaaatggccttactgaaaatgtgtttgcttctctgcttacaccttctaactcagttctgatgctatttgaacaattgttgacatgcctctttacctttcaatagttaggagtaaaaacatttattctcaattttgttttgctcttgcgcctttaaaagttgattaaaagtcgccaggttgctcagagttctaagtgaatagacattgtcattagctctttgataatgttctctgtgttctataaaccaagtaatcaggtttcgcgtgtacttgtgtcaacgttcccagagggattgctaatgaaaacaaaaaggcaatatatgtcattatagtaaaccatcattttgcttaaaataatttcaaaatgagtattttagcccatgtactacatttctgaccttagtttccccaggttcttctctgtcattatttcagctattacaagtcagggtgaattaaccaaggttatgactacaccaacattttaattatctggctttgttgatggcttgttgaaattgctttcatgtggcagattgaaacacagcaaatttatagtagggatggttacccagcattcaaagccttcttcatgtacacttcttttcataggaagagtatttttttaacatttagaaaatatactctatttaaccttattttttaaaaaatcttgcacaacagaaacattattgtttagagaccctagaggtttatggcattataacatagactgtaaattaggattcgttaatcaaggcacaacttcagttgtcaggggctgttctgtgctttttagggtgggtagcagcatctctggtttttactcactagatgccagaagcacctttttttccaccagttgtgacaactagaaatgtctccagactttgccaaatgtcccccaggggaaattattactgggggttgagaaccacagctcttaattgttatttcatataggttttattattttgccccatttatgttaccctttggcatgtttctatgacataggtagtcaaattttagctaattttcccctaagaagctttttttcgtggatgtaaaaataaattttaatttctatggaaaatttgcctcgtatcacagcttcctatatctgatttaaattctcttgattacaggtagattatgctgattcaacttgttggaccaaatgtttctgctattaagaacaaaacaataaattatttctagaaggcttattaactataactcgtggtagtgatgttttagtggttgctttagaatgtatagcgcgtgtatatacagtgtaagtatatatgtatatgtaagctatttcaattacttcagtctattgtctgtgtttcattttgaatagtttgtgttgctaccttttcaagttcattaatagtttattctacaacatttaatcttacattaatctcatgcattatattttttattttcaacattttgatatccatctctacaagcttgtttgggtatggtggatagattcatgatgttaatggtggtgatggtttcatgtatacatacatatatcaagacctatcaaattgtactgattaagcatctgaagttatgtcaattatcactcagaaaacttgttttaaataacataattttgaaggaatctgtgcagaagccctctaaatttatatcatcttttgtagttgtcatattcacatcaaattcaaggatattggctttataaactcatctttattgagtctttacaaaatatccaacttagttttcagcaaatcaactttttttcactgtcaaaatacattgtttaatgtaatataattaagttatctaattaagaaagcaaatgaaagtggtgtatggtgtttttggaacaaacacaatcaatgtgtgataaaaatcccagcttctcattggaggagaagttctgggtcgattagaacctgattcaaggtgtcatctgcaggccagcagcatcagtatcacctgggagcttcttagaatctctgaccctgctacggattaactgaatcaggttccctaggtgagtcctatgcacattaaagtttgagaaatgttttctttgggaatagcctactagctttgagaattgaatgtgttatggttcttaggcaatgcaggtttttttttttctctctcatggaaatagagttattcagtttcaagcatcagttaaatagggcattgtttacatattttctactgttataatttttattttttcatatcaggttttcttttcttttcttttcctttttgaaactgggtcttgttttgctgcccaggctggagtgcagtggcatgatcatggctcactgcagccgtaacccccagactcaggcaatccttccaccttagcctcctgaggactacaggcatgtgccaccatgcctggctaatttttattattattattattgttatttgtagagatgaggtctcactatggtgtctaggctggtctcaaactcctgggctcaagtgattctcccaccttggcctcccaaagtgctgggattacaggcatgagccactgtgcttggctcatatcaggctttcttgaggtatgatttacacacattaaaattgaccaattttatgtgtacaagacaatgagttttgataaatatatagaatcctgtaactatgacttttacagccaggatacaaaatatttctgtttcttcaaaatattccctttggcccctttgcagtcaatcttttcctctaatccttggcccttgctagaatttcatataaatggaattacctagtatttcatcacttttttgttgttgtttttgttttttcacttagcacttgcttttgagattcatccatgctgtcatcaacagtttatgtcttttatggatgcatagcattccattgtatagatgtaccttatagttggtggtggaaggcaggcctgagactagtgttcagggagcctagaaatactcaaatgaccttatgtggtacagaggctgccatggctgtggccttaaaaattggtgaagaagttggaaacatggattctagtggttgaatccttaccctccaaatccaggtgatagtcacacttcagaaaagggtgctgaccagcccatccaccctatcacagacatttcctgacaatccagacatttccccgaaaatttgcaaatcttcttgtcctttctatcaggacatctctagaggcacagcccctctcctgctgtaaatacagtgctctttggagaggaaaatgtggaggcagagagagaacaatttacttgaattgctgaatatttgcccagtggtcttcaaatgttattgcctatgggcaaaaccgttgtttttcttctcccttctacctgtaggtagagatacctgaggaagatcaggccaatgactcagaacatcacacaagataaattttggcatgatttgtttctaatagaatttattttggaaggttacctgaaaactccaaatggtcatttcctgcttttaactgacaatcctgacatttaaacttttttaacctattggtatattttatcattttagaaaggttgcatcttgtttttatcattaattttagttgggaaactgagtcaaacctcaagtcagatttgactaaagttttacttatagttacttttcctaaatattctccagtagtgattagaattagccactggacaaccatatcagaactaggagcttgatactaaaacaagaaggatgaaaataatcaaagaggatttgcaaatgattaaggtactgaatttcaggtgtgcctctggaaaattaattccctctttttgcaagctgttgcatctcattttaccaggtaccttgcaaagtattcttgatgagatgcgtgcttcgtgggaatcactctttcccctgtgtttgggtatgcttacttgcaggctctcaagagattcacttaagattttcaacatttctgcattagatatttttaaagagaaaaataaaatccagggaatatagcttttgaagtggaaaatctgaaacaaaaacaatttgataactgtcacagacaaagctgctagagctctaaagtataatgcaaggtttttataaactccaagttgtaggttactctttggcatataataaatgagttctgagcctagaagtggtttaatctgaaaacttcatttgaggaaaaagcagagaattggaaggtattgaatagcgtgcgtgcacacacacacatatttttcattgtatatccacacatgcatatatagctcatttatcacttgttcaacaaatattcaccgaattcctacaacgtgccaagcctagtgtctgccctttattgcctgccccacggtttagtgggggaaaacttaagtaattaaaacaagtattatgattaggctagtggctggtagcacagaagcatgtatcaggaggaaatagtttcattttggggccaaagacccctctgaagaaatgatgtttcactatattattattgcacaatgtcttcatcttatttaacttccagcaccttgcagagctatgcagagagcagttcagggtgctgttttttgttcttgtggcatagaagttgcccatcctgactggacacggtggctcactcctgtaatcccagtactttgggaggccgaggcgggcggatcacaaggtcacggtactaaaaaaagaaagagatcgagaccatcttggctaacatggtgaaaccccgtctcaactaaaaatacaaaaattagctgggtatggtggcatgcgcctgtagtcccagctactcaggaggttgaggcaggagaatctcttgaacccagaaggtggaggttgcagtgagccaagattgtgccactgcactccagcctgggcgacagagcaaaactctgttaaaaaaataaataaataaaaaagaaagaaaaagaagttgcccatcctctctatctgtgtcttggcctttctggcttatttgaaattccgtggggaaaagatctgagaactagaagattttaccgggagtgaggagggatcataatattgaagccatatacggaacattcactttctgccagccatcttgttttgtgctttacagaagagtcccatcctattacattttatgtactagctgctctcccccatcctctcttaggagaaggagatagagagaaagaagaatgtaagcagcgtgggtgatgctgctagctgttcttctcagtgaaccttggtcccagagagatatatctcaggagacttgacacatgtctcgtggcactttcacagtttgagcatcttgctgagaacaactgtgtatgatttctaggatgcaaatggtgttttcaccctatgtaagccttcactttattttttatttttgagacaatatttatagttactttttctaaatattttcctaaatatttaatatttatagatacttttcctaaatattatcctgtagtaattataattagccactggatagccatatcagaattaggatttcggtactaaaaaaggaagatgaaaataatcaaagggttacctaggctagagtgcagtggcatgatcatagctcactgcagccttgaactaaggctcaagaaatcctcctgcctcagcctcctaagtagctcagactacagacatgcaccgctacacctggctagttttttattttattttatttttttgtagagac

SEQ ID NO: 2818 - DNA, 5757 bp, Homo sapiens
agacattggagaggagccaggagcggctgtgtggtcggaggagagaggagagctggtgaggagtgagccaggctgggggtcacagggccaggacgtagccgtgggaggggctgccgggccactgttgagtgttgactgaagtagggcctgggacgaagaggaaccagagggggctgttgagggccacttgggtgggtgacagagggagctgggagaagggcgcaagttgatggtgagagaagagtgtgcacagagttgggtatccgcaagtgtggaggggctggcaagaggctgagcttgggggtcaccttccccagctcccagggcccgggagtatgaaggtagagctggttctctgaggtgttgtcctcacacagagttggggtgggtgacagggtgactggccatccagtggggacaccacagccctcatgaggggctgtggagtcctggggtgggtgagaatctgccccatctcaggtcagttgagtggggctctgggagaagccctggggagtggctggtgggacccaaaggccttctggcaccccgctggctctgggctcccagggccaacgctccctccctactcatagtagcctggcctttccagagccccctccagcagggctccccacagcaggtcccctcaggctgcttgggctggtgggtctgccctgagctggcccctgactctcttacatgttccacaggacgatggaccgccggactcttttctgcagcacacgcctgtgtgctgtgagccccccactctgccgtgctcacacagacacacccagctgcacacatgaggcatcccacatgacacgggctgacacagtctcatatccccaccccttcccacggcgtgtcccacggccagacacatgcacacacatcacaccctcaaacacccagctcagccacacacaactaccctccaaaccaccacagtctctgtcacacccccactaccgctgccacgccctctgaatcatgcagggaagggtctgcccctgccctggcacacacaggcacccattccctccccctgctgacatgtgtatgcgtatgcatacacaccacacacacacacatgcacaagtcatgtgcgaacagccctccaaagcctatgccacagacagctcttgccccagccagactaggagacacctttgttcttcaggcctgtgggggaagttccgggtgcctttattttttattcttttctaaggaaaaaaatgataaaaatctcaaagctgatttttcttgttatagaaaaactaatataaaagcattatccctatccctgcagcctgtggctatgtctgtgcttgcttcctgccaggtgctggcctggtgccgggtggagggggcaggatacaagcccctcagcgccctggccagaacagcagacatcagtggaaagtccagttctcggggcccgcagagtagctgcacaggcaggcatcctgggagaacagggcatagcctcaggcgagggggcctgaggtgtgtgcagatggcccactcgggaatagtaggtgaggcctgaaccagcacacgcggcctgtgagcttgctgtgcattcccagaggtggagcatccaagcaaaggacctcatgggctttgggcctgttaagggctcacctggagggtcatgggtcacctttgcactgacagggtgttactagtgggttctagaggagagcaggggactggaggcaggcctgggagctggagcagagccgacttgggggcccaggtctccgcagacctttccaggaaagagctaacagatgcacccagtgtgcttcccaccccagtgggagagctgccaccgggaggtggtacccagctctgagctaagaagagcctctgatgggcagagctgccccactgtgggttgagatgctcgggaagtggtgacctccctgctgctggaggtgtgtaaggatgctcctgccaagtccactaaagagcagactcctgccttgtgctgggacagactcgattgctcaaggggtcttagagatgtgacacctagaaggggctgctaagcttgtctgcatgaaggtgggatgaccgattgcatgacatctgacctctcccaggtgaggaggcctcagggaaggaaggatgctctcgtggaggcctgcagcccccagccctgcagtgggaggaggtgtcctggggtcgtgctcttcccagactcctcacactccacccctgggaggagggtggaaggagttcaggaatggggcagtgggagcaggtgccctcttgacgctgagtgacctgggggaggcctgtcccctccctgggccttagtgtcttcaagggcatcatggtgcaagcccctccagaccccagagctgtatcttctccccaaggcatatctggaacaggctgtgttgccagggcccttctgtgtgccctgcaggcctcctggaggcagcctggggtgtgagaatgagggagaccatctggaaatgtccctgggcacgcccctgtctaaagcaaagcattcaccacggggagccagactgggaaggaaatctgtttcttctttggggactgatctcaaggccctgcctgcagagcagagcctagaccatggcagagaggtctgtccacactggacgatgcccagctgccctgtggttattgagacaggctcctgggtaggctagcttatactctgtcttctgcatgtgacagctcagataggactgtccttactgcagccaccaggacaggcttctctgcactctggctgcccatacaggcctgtccacacactggcagcctagacagacctgtctacactccagccaaatggacaagcctgttagattctggccacctgcataggcccgcccatatcctggctgcccagacaggcccgtctgcactctggccgcctgtattaattagcccagtagctaatatcatatttgctggctagcataaggtgttgaagcccacaagaagtgaaaaacaaaatacctttatttagttaacactgaatttgcaaacacagaaaggaatagaaaacctgactccacttggacgcacaggcctttggggagttctgacaccagggccccatcggcagctccaccagagcatcctggctgcacctccttcccggagtcctggcttgcctacctattccatgggaggttggcctggatgtgtcaagggggcctttcagctctagtaaagacatctgtctccacatccaaggagctttgcaaaagacacgtggcaggacaggagactggacgcactgtggcctggggaaggcagcggggcttggccctgggctgctccccttggggagaactgtgtggctgaggccacctgttatggggtggggcctgggcctggacacagctgcaggctgccctgtcctccaagaggagaggcggggcttgaaagatttgagttagtgtcttgaccttaacgtgagaccttggacaagtgttttcagctctcagagcctcaagtctgtcatccagaaagtggggccggataacccctgcctgccgccctcaccgggctcacaccggggaaactgtcacagcggggcctcaggcaatgccgggcccatcactccctagatggggctcccccatgcagcctttcccttctctgagatacattttccgtcaagcggggttaattccagcctctcaagggtgagaagaatgtgtgatcctggcccctgccggctgctcaggagggttggagagtcgagttcctgcctcaggaccctgcccctggaggcctcgcctgcccctgcagctccgcaggctcagacattggtctccagctcactgatctggatggtgcagtggttcagactcgcagcgggcagctcctcatcctgctccacttgaacggggacgtggtgggggcaggtggggcccagggtgagctcggaggcctcggctacactcttcacacagccattctgctgggctgccacgatctcctggaggctcactggcttggtctcgcagggcagcagtttctggtgaagggaaacaggtctttgtagcagcaggagggaccaaggttagatacgagggaggactgagggccagtggggcagaatgagctcagggctaggaaccacaagatggattttcctgcagacacgctgtgtgacctcggcaggtcacggcctccctgggctcctgttcccaagcgtcctgcctcccactggagctggcttagtagaggaggggacttaatccacagggtccatctggggaattggtggatcccctgcctgacctcagcttcttccccatgatgtggggacagccttctccatttgcctgtagaaggagcctgaagcccacacagcctgcacagacctacaaatgctcacatgttggctaaactggacagaccatcccgacacgagggcggggaattttatcatatcttgttctactgttcctcctgtgtctatatcagcgccagccacagcgggtgctcaataaatagatgttagaggaatcagtcattctgtaacggatgaggagaccgaggcccagaggcatggagggagggattggctggaggctgccgagctggttggtggaagatctggtgccctgcccaccctgcgtggctccaccctcctggcagcctctggatctcactgctctcacctcggtgcctgtgtcccgggcaaaatccttccgacatatatgggccatgatccccgctgccagcgcatcacccagcacgttaatcatggtgcggaaacggtccctggtgagccaaggttgggggtgagtggtgggcacttgaaggggagctggaagagggcagtgctcaacccagcacagtacagcacggccggtgaccagctgtcatgcaaagcctgcagccagatggcttcctggctcctcccaagcccaccctttggcatcattgaagcagcttcttggcatgcagctgtgggttccacaggtccccatgcttagaagggttaggtttggtttaatcctctgctgtttctgtcttgaaattctttataggtttgttttttgtttgtttgtttgtttgttttttgagacagagtcttgctctgtcactcaggctggagtgcagtggcgccatctcggcttactgaaacctccatctcccaggttcaggtaattctcgtgcctcagccacctgaatagctgggattacaggcacatgtcaccagtcccagctaattttttcttttctaatttttagtagagatggggattttactgtgttgcccaggctgggctctggaattcctgggctcaaggaatgctcctgccatggcctctcaaagttctgggacatataggcgtgagtcatcatgcctggcctttacagtttttggactgggttccacattttcatttttgaacactggaccccacaaattatgcagccaggcctgtgctaatgagtagggcactcccacagtgccaagcggggcagtccccagccttctaccctggggaagggactcagccgctcaccctgatccctgctgaccctgaagtcagcccctcccagagggctagagctagaggcaaagtccactcacagagcccagtcaacggcaatgatgagggtgatgtcatcggtgggcagtcccacggaggtgagcacgatgaccatggtgacgaggccggcctgggggatgccagctgccccaatgctggctgcagtggctgtgatactgcagggggt

SEQ ID NO: 2819 - DNA, 859 bp, Homo sapiens
cccaggatgaagggtgactggaggctaggagatggaatgaatggaagatttactaaatagtaaaattagctaacattaagatgctatagctgtataaaaaatgaatttgtcagcatttaaaatagtttataataaaaaacaggaggacatgtttcaaacatattggtttatattgttcatcctttccacgtcattattcctaatggcaaaaggttgtgagctcttatccttgggtctttgctcaaatttgaaatgccatatccttttaagattaggataacaaggtgaacctcagaaattaataggcacaaccccaaggcacaagatatgcagcctcctcattgcttgtctcttgcccactcacacacatagagtagcatgttatggcacttacactaataaagccactgctatcaaagttctggacttgatttccagcagtattagctctgttttaccctcaagcttctgggttagtgggttattgctcaccaaagaagttctggttggaagaagaggtaagatatctccagagccgctgagaagaatgagtaaggtaaaactggtggcattcctgactgaatacccttcactcacaggaggcagtgtggaacagtgggaatgaggagtgctatgggactttgtatatctggtctggaagcctgtttctggtacgtacagctaggtgagttgggcaaattacttaaacggtccagatctcaattttattaactatgaaatcacgtaataagatctaacttgaaaggttgttagtatcaaggctaatataaccctttggttgttataatgaataatagataagtattattcttactactatttattttttggaaaaatc

SEQ ID NO: 2820 - DNA, 12535 bp, Homo sapiens
aagccaagccaccttgttatctactttaccagctaagcccagagagggtggagcaggctcaaggtcggctgcggagatcctggcctcagcttcccagcagagggctcttctgcagaaagtgatcccaggatagggggctgccatgggagtcagggatttgcaccccaaatttcaggtggtatctgagctctgtgtgtccttcctacccacctctcaggtgctacttacatctgataaactcaagtggtggacagaacagagagggcctcctccaaggtgacttgctaagtcctcccctaacgacgaaatagagaagcttcctgcccctgttacacatggcctcctcccgggcccagcagctcacctggaccacggaaagcacagaaagaactggctgaatgaatcaagagatcaagtgttctccctgaggccctgtaacagctctgcagctgactgcccagaaggaagcagaagtgagtgacaagttgggggaaccagagcttgcacaccataggcctgaacactagcctctggggaaaggcaagtccagctgaccttggtgaagttaggacccgggccgaggccacctcttctggttcaccctctgctggcctcccagcttctttggctcagcaacacccaggattccaggcatgtttgcctctggccttctaaaaatacccaggccacccagcacctcccagatgtctgagcgctgagtctgtgatttccctgccggtaatgggacagccccggggtgggcaggcgggggtggctcgagcagctcaagccacttcctctgcctcccatcccctagcctaccagaagctggacccagccctgcctcccaatccttgcaaggcaaaggagggtagaggctagcagacctcagagattgttgactccagtctcttcttgggacagatgggagatctgaagtctaaggattgctcatggcacttgtgccattaaggtcctcctcaccccactccccagcactgtgttcatgcctgctgctgtctcacttcccacatgctacttggagtctaggtcttggagcccaacctgacttcctccatgcagctgaaagctcctgacagcagtgaaggggaggatccctgtggtctccatggtgcctggaagagtgtccaatccagagcacaccatcagtaaacgtagattggattgaacaatgtagtggcagctggggcaatgggtggagcactgggctggaggacaaagcctctgaattctatctagcccagggtcagccactgtgatactatgcatcctcatcaattgccctggacaaacctgtttctcctgggctggataggatggtgtctaaggactgagccagctctgctgatatgaagctgcaagctgatgccctgctggatattcctgtcccttctctgctctactgtatgtctgggagagatggcacaacctgtaggttccatcagctccaggttctcagcttctgctcctccctccgtgcttctgaacattccacctctggtcctagcccctgaggcccagctcttccaatagtgccacttccacctctgctgctgggtacacaggggtgaatgcatacctacctcgctcactaatcatgtgaccttgggtaaggcattgcccttttctgggcttcagttttatcatatctaaaagggaataataaggcctaccttaaaggagtgctatgaggatgtaggagattccatagctcagatgtcaggttatatatcacctcctgcagaaagtctcccctgtcctcccaaggatggctcagatagcatttgttgctggctcttcagttctgaccttcccatgttcacactatgtggtcattggctctctatgcatccatcccccaccaagctgtgggctcctcaaggccaggagtctccaggacccagtacaggacctttacagatgaagtgcctgggaacgttttttgacagacacagtgggtgagtaaagcctgagagaaaggcaaggggttgtgcagaagtctgggagtctgagtaagaagtggcctgactgacagggcaagttctggtggtatgaatattgacagctgcttggagcccttcccccatttccctgcttggtaaattcatccttcaagatcccaggagagcatctccttccctgagaaacctgatcactctcccctctaccacattacacactccactgtaggtgttctttacacacctgtctcccttctcagatgtgagttccctgaaggcaagaccctgttggatctcacagcaccaagcactagatctggcatgagttagtcaaggttttggagcagaagaatggatggaggaaataatttctgaatcgaacttggaattgaactgcctgaactttaatgccctttccagccttagggatgataatgaattaccaaagtgagaaaaatggaggcgcaagctgttgtcatccttccagaggcaccctccaagtgtgtgtgggtgaaatgtgagctggagagaggattgacaaagagcagtgaaaacatattcctggaccccattctttttttttttttttttttttttgagatggaatttccctcttgtcatccaggctgaagtgcaatagctcaatctcggctcactgcaacctccacctcccaggttcaagcgattctcctgcctcagcctcccgagtagctgggattacagacacacaccaccacgcccagctattttttgtatttttagtagagatggggtttcaccatgttggccaggctggtctcgaactcctgacctcaggtgatccacctgcctcggcctcccaaagtgctgggattacaggcatgagccactgtgcctggcctgaaccccatttttatctctggatttttctctctgttgaagaattgctgcagaaaccatattctaagtataaaaggcctttagatacctaagatgatccccagaaccttgatgtgaatccatttactcatactttacattctcactttacactttgagcatgaagcccatggtgatctggttgtaaaaggtttaaaggttaattggcagccaatgttgggggtgagaagttgctgctgcaggcaggcaggtattcaccaaggcagcagagagaggaggcatctgccaggctggtagaaaggaaatagaaaaagaaaacaggccgagagcggaggctcaggcctgtaatcccagcactatgggaggccaaggcgggcggattgcttggttgcagtgagccaagatcgtgcactacactacagcctgggtgacagggcgagactccatcttaaaaaatcataataaataaaataaaaatacaaaaattatccaggtgtggttgtgcatgctgtcgtcccagctactcggggcgctgaggcaggggaattgcttgaacctaggaggtggaagttgcagtaagctgaggtcacacccctacactccaggctgggtgacagagcgagactccgtcaaagaaaagaaaagaaaatagaagagaaaagagaagaaagaaaatgggcaaaagcaactaaaggtaccacagatcaaaacctttaagatcagcattgggtacaccattgcatatctgctctgggcaaatccctttctgggcctcagtctccccatccgtaaaatgaacaggttttaccaagggctctgagggcttatgattctccaggagtttccttatgtgaggcctttctgtccccaaccatacagatcagatgaggtgtcatcaaagtcaagactccaatttctagggtttgtgggttatcaggctttcctgccacaaactttcctgccacgaacctcctgctaggctcctcagggggagttcactactgtggctgtctgggccgagcccccaagaagaaacaaaactctccagggtctggtgcagaggctgtggcccaaggtctgcttgctgcctaaggaagatatgaaaaggaagcctggctctgggtgaaacggaagtgtctgaggtctgacagttgctctcagcatggtctctgcagccaggagggaagtaaaactgtctgggcatctggtagtttctaccctgagagtccacaggacagtgacaagtggggcctggtgcaggcctgttctctggtccagagccctagcttaggccagagacagtctttggagagatgctggcccaaagatttggagggagggcaaaggagaatactctgaagctggttcatgaccttaggcaaatctctgtgcctctttgggtccagtttctccatttgcaaaaatggagtttgggctaaatttgcctgtgcaataagggtttctggaatggtgggcactggggatacagagacaatttggttacaaggaacctggattgttaccctgctggcaagggactcacagcctggtaggacatagttacagaatcattggttaattgtgattatcaatgcatgtataggtgccgaaaagctgtggacatagagcattaattcagcattcatccagagatccagggaaggttaagcaacttgcccaaggtcatatagatattaagtggtccacctggggccagagtcttgaaaggaaggggaattcagaagaggacatggctaaatagaagtctggaagaccagtctgcttgtgcttgctgctgtcatcaagatctgaacaaagttatggagacccagaggaggggagattaattctgacttaggagaaggaggaagacttcacagaagcagaggttttgagctggggtttaaagggcaaatatgagtttatcaagtacagaaagggagaagggtgttaaaagctgagggaacagcatattcagatgtgtgatgttgctaaaaagagcctgatgagttgctggaaaagttgtctgtgtgtgtttgtgcgtgtgtatgtatgtgcggtatgttaggaacaaagagtacctaaaatgggaggactgagagatgaggtttcatagtctggctggaatcacacagtgaagggccttgaatgtgtttggagggcagtgggcagccataaaagggtcttaagccacggatgcatggtcaaaatagcctattagcagtcttgctcgggctgctaggagggcagaggaccaaagtacagggctggggccaggcagaaacaactgtaaagaggcagtggcagaggattgagggtgtcaggtgtcaggcctagcccctgtcaagaaatagaaacttttcaagagactacataggtgtggaggaaacaagaattgaaacctgagcccagctgtggctgtggtctgggcaggtgccgtaagcaagggaagtgaaagggttggggtgacttccagttgaaggagggggatggcttgtgggggatgctaggggcctgtcctcaggctggagacctgttccaggacggggcagggtaaggggctatgcctgaccaagcccctgcctcttgttcctgccctcagagatcccacttccttctgctaggccttaactctttctcctgagatattccttccctactccccacccctcccagtgttccatcccaccctttctagcatcccatggttcctatccaggtcctgtaggccctccagcgaggctgccccgagcagctcaagttccttggcttctcctacaccaacctgcactgctcatgctgcctgagcagtggtctgaccatgttttgccttgaggcctgttttattctgtagtgttggttcaccaaactagtcactgttacttcactgtcacctcactgcagctgcaggtgcccctgtctcattgggctctgcccacaagagctcttgataagtcagaatcagaccctcatgtgcccagagaagctagcattgagtatgcctggcccaaagcatgaacttggggaggggctgttcatgggctgcgctgatgagttctttgttctggggcaaatcttgacatgattgtgtctgtttttttcatttgttcgtttgtttgtttttttgagacagagtcttgcctcattgcccaagctggagtgcaggggcaccatcacagctcactgcagcctggagctcctgggctaaaatgatcctctcaccttagccttgtgagtagctggggccacaggcatgtgctgccacgcttggctaattttttattttttgtaggggttatgaaccacgaggggtgaattccttcctgctggtccccaaatacctgaccctccacctggatctgcccattcagatcaatcatctccaggtgcagggtcaggtatttggggaccagcaggaagcaattcacccctaatggttcagatgaagagactttaatgaggggactactgtactgaggtgttggcagggtaagagaacaaaaaaaaggacgttgaggcacccacccagaggctggcaacagtggaaaagtcttacggcccagcactcaaaggggtcaggaatcatgtccagaccgaagtggaagccagttggcaagaaggcctcatgagggagcccacagaggtctgcctcccagggcacagtgcagggtgtgggtgtgggtgcaaatggagactaacggtctccagatatggctgaaagattctcacccagatggaatatctggaagatgcctctggccttgatgcagtcacttctctgtgatcggtgctggtttggaggtttttccagctgtcccagagagaacaggtgaagctttactttcagagtaattccggtaccatctagaaagcatgttctggtcttgatagtgacagactagagagtgacagaggcatgtgggcctcaagggtacagaattatcccaatatacagagtgacagaggcacgtgggcctcaagggtaccgaattatcccaacatatatagtgacacaggcccagagagagtcagagctgtgccaagggtaaacaggcccagggcagaacatagtagaacacggtggaggggagatgctgtgagctcatgttggagaggtacacagcatccagattatggagttaaggccacacagctagagagcagcagggccaaaggtccaactggtcagtctgaattggaacttgactcaagctcttaaccaagaccctaagctgaccctgtagagaaaagagagaagggtgttaaaagcagagggaatagcatgttcagatgcatgaagttgctaaagagcctgatgagttgctggaaaagttgtgtgtgtgtttgtgtgtgtgtacatatatgctgtgtctttggaacaaagggtacctaaaatggtaggactgagagatgaggttatgtaggctggctggagtcacacagtgaaggaccttgaatgtcaggttaaaaagcttgggctaaatttggagggcagtgggcagccataaaagggtcttgagcagtgggtgcatggtcaaaatagcctattagcaggcttgcttggaagctgatgtgcctgtttgtttgtttgagatgtgcagcttctaagtgcacatctacttggaagctgagtgcccagtgtgcagacaggaaaggtactggagttagtgtgaccaagcccagggtatcttgtctttcagacacaccccatcttctccttatggaccactcactcacaaacctcccccggtcacaggctcagcacagcaggtgaggttataggctgaatatgagcaaaggacaggcctgtgcaggcccttgggcacatcctcccttaggttgctgactgggccttgtattccatgacctggctgcccacacttaatgttccactactgttaaacctctgggtctacagaccttgaaatccatccatctagtgtgcctgttgggtgccacaaacaagatctcctcccagaagtctacggggatggggacattgataggatgagtgagatagccaatatttgtggagtgtgataaaaccataaaggactactgctttttaaaattgggagcagagccaggtgcggtggctcacacctgtaatcccagcactttgggaggtcaagctgggcgaattgcttgagcccaggcattcgagaccagcctgggcaatgtggcaaaaccttgtctctacaaaaaacaactacaacaaaattagctaggcatggtggcatatacctgaagtcccagttactcagcaggctgcggtgggaggactgattgagcccagggggtcaaggctgcaagcaaactgtgattgcacaactgcactccagcctgggtgagagagcaagaccccatctcaatcaaacaaacaggaaagtaagacagaaggaaggaaggaaggaaggaaggaaggaagggagggagggagggagggaaggaaggaaggaaggaggaaattgtgagcagacattcaagagggccacccaaggctacaccatctacctcatttcacaggattctctatccaagagaaatatggatagagccatgtttccaaacgtggctcaggcccattcagcttgtggttttcgctctctctgtccctccgcagggagtgcctgcctcccatgcatcaaggcctacttccaatgcagccctcgtgggcccctcctttagacagaggcagtcttcccccacttagaacaaccacagcactttgattttgtgctttggaattactcagactcaaacaatcattagggaattctatatcttgcctctccgtctagattgagggtacctgttaattcaacttttcattctcccctcctagaatactacaggtacagaaatcatttgctcaattaaatggtggcagcccagttcccatgaggaaggtctgggtgactctggtaattgtgatggagcggttaacctctagacactggggcaggaccatctgtgttcaaatagcctacctcttactaattgtgtgatctcaggcaagtgacttagctccattcttgcaatcaagaccattgagtgttgtgagaattaatgggttaacacagtcaaagccctcagagctgtgcctggtaccccctaagcattcaagaaatgtcagctattattattacagctattattaggagccagccgggtatgcttataaacaatttcccacacccagcaaagctggagcagacacatacactggcttaacccacagccacacttggaaatgggggagggtagggagctgtaactctattttagagatgagcagaggctcagagaagtcagaagcattcattcatttaacaggcatttatggtgcgatttccacatgtcaggcactgcctctcctcccacttcaaattcagtgaatcctcagagtggggctggaggctagggacagaggactatgtattttaaacaagcaccccctggtgattctcagcttaggcaagttggaaagatgattggattgtaaggtcctaaggcaagcatcttgtcatgttccaagtttggacctgggttttatgggggatatcattttttggtggcagattagtttagcagttaacagcacagaccctgtagcctggttaattgggtatacatctcagtttgccactggctgcatgaccataggcatacctaacctgtgaatgcctcatctgtaaaatgaggctagtaatagtacctacctcagagttgtgagaattacattagttttttatgcgaagtgcttggaaggctgtctgccacatagtaactattataaagcatgagctattattattaatgtacacagtgtagacaagcatcagacagaaggccgggggtggtagatttgacacttcttaccccacgattggctctgcctgtagcgttggcagtgtctgtctcttcagggaggctcgccacctgctcctttccgctggaagagctttcctgagttggggaattccctcccatggcgcccgacagcagctcctagcattctgatgccatgtgctctgcccacagcagcatagtgagaattagatcacatctcgggccaaggctggactgggaggacaggcaggtgtaggggttggaagtgtccacttacgaaggctgcaaatgggaggaggagtgcagaccctggggaggctcctctccacaccctaggccagctttggctgagggtggtgccgcagacaggggaagggcggatgcccacggaggacaggcgggatgccagggtgtctgccagccctccaggacacttattttggcctgctgccctcgggcagggagcaagcaagtgtattttgttttggcattaactcagcaggctgtgggaaaacaggcaggcaggcatcctgaacagggcctgctcccttcacaggccagcccatggtggtgacagaactgccacctctgcatcctgctgtccctctcccacaactctcctctctctcccctgatccctgcctggccctccttacccagctcagcctgaagggtcctttccctgaaaggggctcacagacttggtagcatcccatacctcccaggctaggctctggagaaactccctggtggaacccctggtgttacagatgagaaaacccgggctaagggagaggcagggactttccaggtcctcacaatgagtaaggagcagaactaagattctagtggggctcaatctcccccatggaaattcctctttttgtggtttattttttaacttacaaataaagccataacaaaatgacgggaaactgaaggaaaactcaacaaaggaaacacacttgtgggccagcacagttgcaggcactttacataaacattcccatttgattcccactgcaaccctgcaaagagccattatctctcctttatagacaaggaaacctggctgaaaagaggtttcaagacttgatcaaaaactctaagcttggcagaggagaaatagacatctaacccaggtttgcttgacctcagacccctgtaacctcatccctccaccaaaagtattttactcattggtgcctaatcacagtgcagctcatggcggaaggtgctgatcagcgttcaatacaggtggtcactcaaccttccctgatgtgtcctaggatcagcagttacttgtttatgtggctcctcagcccttgcagaccatttacctgttatttcatttaacctgcacagccctccaagaggaagacaggatggaatttattattcctattttatagatgtagaaaccaaggttgagaggacagtgatgcgctagaggtcacactcagtgagtacctggcagagatagaattagcaccgtggtttcctgccttgtaatgttaaaaccatgtgcctatcagctcctaccatagccctgggactgactgctcatttaccgtacacccccacccctgccacccaaagttgtaatattccctggtaggggcaacacttgacaagataattcctggtcccagtgcctgcttcttagggacttgcctctggccttagatctctgctaccacctggtaggatctgggtccctatgaccctcctggccctgcatgtttcactgctgtgaccttggtctctgtattgagattgggagctcctggtgggcagctcctcacctcagagacctgcttatgactaagcccaggataagggcttgttgagtgatactatggaattcaaggcctagtgccttgaacaaactcactatgtgtcttaaggagagcccctgctctcttctggtggccaccaatcttgaagtctcatttacctgtgctgggattctgtcctgagagctgatagtggaagagactggcacactctcacatcaggctggcaggaggctggtgttgagggaattagctcagggagcaaaggcatgggtagggaaaggtgactaggggtaggaaggagatgaatggggatggggtccatagaccacactgtctgccgcagcatccccagctggacttggtggggcccaggcagggaatagctggcatccagacgtgctaacaagtattcctgagcagtctgtgtcaatgcaggtgggggataatgacacagaggaagacagagtagagagagctgatggaccccaactgcaggaacggtcagggatgctttggtgcagtgtgggcagggggactggcagctactttctctgaagagagcctttgacgaagtcaaactgtcctaggtgcgtgctctggatggggagtagtgtgctactcatgttctggccatgctaaagggccgctgtatactttgtctccctgccagttttcccaggagccctggaatatcagaacagctgatcttctgatacccattcatatacctgctccaggccagtttttgatcctagctctgacttaaccttagaatcatattcctaatgaaatgggagactgcactgcagcatgctggagggagagcacagcttcagagccaggggccagccctccctttccttcactagctgtgtgaccttgggtaggtcatttcacttctgagctgcagcctgtgcaatggggttatatgtattatgaggagttgttgtgaatgttggaaacaatgtaaataacacgcctattttaatgtctggaacatggaagaggcaaaataaatggcag

SEQ ID NO: 2821 - DNA, 7165 bp, Homo sapiens
ctgggacagcaggcacaagccagatatctggttactcttccttatgagggatgtcttcagcttataggagacacaggtggggtgcagttgatgggggcaccaggttggaatcagaaagcctggattgaaggtcctgcctcttgtggttgctgagatctgagacagtcacttcacacctagagcctgttttctcctctgcaaagtgaggggtaaaactgtttaccttacggagctgacatagagaggatgttaaggcactgagggccagagcacttgttctcatcagcatcatcatcagcctcagcatcattgtcaccgtaatcagcatcattggcatcagcatcatcagcatcaccaccctcatcatcatcagtagcatcaatatcactatcatcagcattagcatcagcatcatcagcagcatcagcaccatcagcatcatcgtcatcaggatcatcagcatcatcagcagcatcaccaccattatcagcatcaggatcaccatctaacattttttgagggcttcaaatgcacaaggcactgggctgatttctttacatgcattgtctcacttgtttccaacaatgacagcccccaaagttaagtattattattgttaatatcctcatttacagatatataaactgaaacttagagagattaagcaacttgcttagggccacagagctatgttaagtgtaattttcaaaaatgtaaatcacaattctcaggaaaatataaaatgataccatgtcaaagattttatttaactcaataaccaatgagagaaccaataagaagtttaaacttattcaaagagcattagagaatttagatatatgcaggcaatttaacaacaaaaaaataaggcgagtatgataggctaaataatgttccctctggaaaaaaatcaatcctgatccctggaatttctgaatatgttacttatgttactttataaatagaaaggactttacagatgtgattaaattatgggttttgagatggggagattattctggattatctgggtaggtccaatgtaatcacatgcattcttataggagggagacaggagtgtcagctgagagagaagacataagaacgaaagcggaggttggagtgatgtgctttgaagacggaggaagaggccataagccaaggaatgtaggttatccctagaagctggaaaagacaagaaaacaaatccttttctagagcctccagaagaaaagggctctgcttacaccttgattttagcccagtgaaacagattttgaacttctgacatctagtactgtaagataatacatttgcatgatttttacaccctaaaatgtgttacattgttatatcagcagtagaaatttaataccaaaagattactgggtgagatagaaagctagttaatgtccaacagggctatcaactataacccttggagctaattcttctaccagagttaaattatttgcttctctgcgggaccaaaatttacaagtaaacctctgccgttatggagatgaaaattgactagtcagtagaaatcccagttctgcactggcagatcactcaataatctcttctgcacgtttccaagtttagaatactcttttggacagttaggaagtcgaagcactgagatttgaaccaggctcttctaagtccagaatctgtgctcttaatcactaaggaacatatttttttattagcattatttcatagactagcaggacaatcagtggcaaaaaaaattgtccatggaaactgagaacacagcttaaagattgccaggtttgggcgtggtggctcacacctttaattccagtgttttgggaggctgaggcgggaggattgcttgaggctaggagttcaagagcagcctgggcaacagggtgagacctccatctttacaacaaaaaaaaaatagccaagtgtgatggtgtggacctgtggtcctagctactcaggaggtggaggtgggaggattttgtgagcccaagtgttcaaggttatagtgagctatggttgcactctagcctgggtgacagagaaagaccctgtctctaaagaaaaataaaaaaaaaaagagtgccagtttgattcaccaactccttcatggtgcttcccccaaacagaggaccacagaaagaaccttctccctccataacatggaaattcctacactagctctctgaaaacttagagccaagctttcagtaggtggttcctggttggagtaacttgaaggctggggtgggaaactaaaatacacctccccacaactgttcccttccctgctcaagagtaaatggtcttgacaagcccttctttaaaactgtgttacttggttagacatcaaaacactttgcctagtaaatgcttgaaaaaggtttgcattgcatttggtttggtggaagggcaaagtagactttgggagtgagaaaagtcaggagggacaaatgagtgagttgtatcaggaactagcatggcattcttaagagtcatgcgggctgggtgcagtggctcacgcctgtaatcccagcattttgggaagccgaggtgggcagatcacgaggtcaagagatagagaccatcctggccaacatggtgaaaccccgtctctactaaaaatacaaaaattagccaggtgtggtggcacatgcctgtaatcccagctactcaggaggctgaggcaggagaatcgcttgaacccaggaagcggagcttgcagtgagccgagattgtgccattgcactacagtctgggcgacagagtgagattctgtctcaaaaaaaaaaaaagagtcatgggttgaagcgtcccactgcagttgggaacctttatgggaaagtggggtctctgattagacaggtggaatgtggccagagtcttgaatgggggctgggcagtgtaggtttaccttatagggcaatcattcttgaagccgaacattagaataaactggcaagagttaagaaatatgaatgcaaccctgtattcatctactgaggctgccataacaaaataccacagaatcggtgacttaagcaacagaaattaattttctaacaatgctggaggctagagatcaaagtgttggcagtgttggtttctcctgaggcctctttccttgatttgtagatggccatcctctccctgtgtcttcagatggtctttcctttgttactgtccatgtctgaatattcttttcttataagccttcccctattgccccaattcttcccattaggaacctcaccagcaccacaggacccaccaccaccatcacaagccttatcatcacccctgccttctctatccctgcagcagtccggggatagacacagggagaggacagccatcttaccagccgaggaaggaagcctcagagaaaccaacactgccaacactcggatctctggcctccaggattgtgaccgcacccaccacagttatcacaggggcagctataatggcagcagctgcagcagcagtgagccccatgccaatagagagacataggcagtcacacccattgtagaactgatcacttaggccaagttattaattttgtactggaggaaactgaagtccagagaggtcaactgacttattcaagcctatggagctcttaaatagaaaactaagtccaaagatcctattttttggcctcacattttctttctttctactggtccacatgacttcatcccagcccatcagccctggaggctgggctaaggacagccccactatttgagcctgctcttccttcctatcaggagcaaaccatcatgaaaatcagccccattaaactctgattgtctgtgtctgggccatgtgtttcccttgtcaaggggttgaaatgctttgatttaagggtaggcaggatacttcttttaatgtttttagttaggacttggtcagcaaacaggaacaaacctgatcaaatgtggcataagcaaactgcaaactcggctcatgtaacaagaccaaggcagccctggctgcaggcatagcaagattcagggctcacatgatgcaatcacgtgtctctcctttctgcttgctttgcaatctgttgactccagtctcagactccatttggtagcgagatggcagcttcagtttgtgaattctctggtgcagcaggaaagaggtagcctgtttctcaataacataaacgaaagtcatggaattaattaatgcaaaaatatttattgaggtcctagtatgcaccagacattcttctacatgctcgggatactgaagtggacagagagaagaggttcctgtcatcatggagcttacttgagtcttcttgggctctgacatgactgtttttggccatgtgtaatctgtgagccaatcactgtagccacgagtacgcgatgtgctgggtcatgtgccccacttaaagaatgcaagcctcaggccaggcgtggtggctcacgcctgtaatcccagcattttgggaagccgaggtaggcggattgcctgaggtcaggagtttgagaccagactggccaacatggtgaaaccctgtctctactaaaaatacaaacattagccaggcatggtgctgggtgcctgtgatcccagctactcaggaggctgaggcagaagaatcgcttgaatccaggaggcggatgttgcagtgaaccaagacgatgccactgcgcttcagcctgggcattctttcaaaaacagaatgcaggtctctttttgagtgccaggactatgtcatagttatgtttgtgatgtgtccacaaagcataacccaagggctgtccataataagcacatgagaagtgacatcaaacgagtgaacaactgagtaaataaaccacagagagagaaagttcatgaaaggcaaatgtgtaaaaacacacgaaaaggggacaaatccaagtaaatcgaacaacgaaatgctagctctcagttgccaatccaaaaagagacataatattcactatagatgtcttgctaaaaatatttgcccagtgtgtttcatatcaggccaagaaaatcctgctcattattcagagaaacattagacacaaaatctgaagttgcagttcatttcagagttgtccctggggggtgtcaacaaaccggggtcactctggacctcacactttgaggagcaagtgaaagaagaaatgaagacagctcacagctggcagctaaaatatgtcgatgtcattatgtaaatatctgccacccacagccctccatggtctctcttgcagcctgctgtgggcacctgggaaacacttctccctgttgtctggtgttcttggacatagcctcttagttcctttgatgttctgcccttgatgttcattttatgcagctttcaactggtaaaaaagtttaaggcaaggaaaaagtctggaagaaaatttatagctcctaaattgttaacatgtaaaagagccattcgttggtcctaaatcctaaaagcgtggctctgtatatcttgtataaaacctatgtgggttggcacttggagggatgtatgcaattttagtcattacactgcttaaggaaggacctataaaggacacgtagaaagaggcaaactaaattattaagaggaacctacatttgagcatgagctcaaaggaggtggactccagcatggagagaccaaagctctaagaagaaataagtacatgctatgaattcatgaagggcatagaaaagatgcctgtaaacaaacttattcaccaaatttcaatagaatcaaataagaggggcaaccatggggtttcaaaagggtcaaaattgtacaaatattaagtgtaagtggctttaaacgatggtggcaaacatgaaatttaaactaatttttatgttttagagacacagtcttggacttaataaaaagagctttaaaaggtatattggggacaattggtaaaatttacaggtaagtcacatattaaatggcaccatttaaccgaataaatgttagctttcttaggtatgatggtggtgtgcttatttaggagaatgtccatattcattcaagatgcacggtgaaatgttgggggaaacatggctggattttgcagctgactttcaaatgaattagaaaaaacatctataaatatatgagagaatgacagagcaattgtagcacaatacagtcatgtgctgcataatgacatttcagttaacaatggattgcctatctcgacggtggtctcataagattataatggagcagaaaagtttctattgtccagtattatgctatgctatgctatgctatgctatgctatgctatgctatgctatgctataccataccatactatactatactatactttatttatttatttattttttggagacaaaatttcgctcttgttgcccaggcacgattctggctcactgcaaccttcaactccccggttcaagcgattcttctgcctcagcttccagagtagctgagattataggcgtgcaccaccacacccagctaatttttgtgtttttagtagagacggggtttcaccatgttggccaggcttgtctcgtttatctatttatttttgagacagggtctttctctgttgcccagtctggagtgcagtggcatgatcgtgactcactgtaacctcaaactcctgggctcaaggaatcctcccgtctcagcctcccaagtagctgggacttcaggtgtgtaccatcacacttggctaattaaaatgattttttttttgtacagacaggggtcttactatgttgctaggctcatcttgaactccaggcctcaaataatcctcccacctcagcttctcagagtcctagaattagcactctgagtacctagcatggaatttattacctttagaagtagcactgtttgaaaatataaagtcctttaagaatttggatatgttcatgagtgatgggtcaagagtgatgggtcagatatgttcgtgagtgatgggtcagagacttgaagatgcttttgatactgccctacccacagagaacaatcacacccacccttgacgcatctattggagaccgagtgttagacaagagtccagatggctcacaggcaggtctaggacaggtctcagcaatgttttgagaataaaacaaggaagatctgctgaatgtttaagttttttttttttgag

SEQ ID NO: 2822 - DNA, 734 bp, Homo sapiens
ctgcaggttacactatttgccaatatctatttaattgtagcaataacaggaaaaactcccaaatccaaccagctagaaattctctggctctcttccactttagtggaatcaaatttttgcacttgcggtcatctttatatatgagaggagagtgaggctgggagaaacttggtgttaaaaataaagcaaagttacagactctcactctctagagctcatggaagattctggctttttattattaatgattagcattgacaccatcccccaacctcaagagcatgctgaggatcttcagggaactccagcttgatctgggcagctgccagggttgacatctatctgaagattctgttctcctcctgcccatcatgtcaaggtaccatgcaggctgcctgaatggacaaagtcaccaaaacagatgtcttcctctgagtttcgaagtgacagcaggaagggctgaaccctcatgtctatttctccaaagatggagtgaggctctgtctctgtgctgttattctgtcctcccgtccatctgaacatctttagcaaatggttcctctctcctgctgttcttcagccgtcctgctgtccacaccctggcagcctggaggtgggtccagccaaccatgggcctgattcctgagtaggcttcaccccagcctcagttccctccttgggtgagttggactgtgtgacctgaaaaaacagagtctcaagagctttttcattct

SEQ ID NO: 2823 - DNA, 794 bp, Homo sapiens
ctccaatgtgccaaaataaagcagaagccggagagtaaggatttcagatgaggcaaccaaaagaggttaggctgaagcctctgcatgtcccgatgcctgatggagatggaggaatcctttctacccagacagaagtcacactatgtagcctgtcctctttagaacataacattctctggctaacggtgattaagccccaggaaacatatccaagacaccaagaaggccctcactggatggcggtggctcaagcctgtaatcccagcacttcgggaggcggagatgggcggatcatgaggtcaggagttcaagaccagcctggccaacatggtgaaacctcgtctctactaaaaatacaaaaattagcaaggcgtggtggtgcacacctgtaattccagctacgcaggagactgaggcaggagaattgctttaacctgggaagtggaggttgcagtgagccgagatcgcaccattgcactctagcctgggtgacagagcgagactccatctcaaaaaaaaaaaggaaagccctcactggatgtgacccttcaattctggtgtccctagcctccagaactgtgagccaaataaatttctcttcactatgaattacctagtctgcggtattctgtgatagcaatataaaacaaactaagacagtgggagataatatcacagaacaggcccaagccagatgaagcagacttttgtaggttgaggtaaggagtttgacttttattctaaatgtattgggaagccactggaaagttttaattagtggagtaatatttggc

SEQ ID NO: 2824 - DNA, 3828 bp, Homo sapiens
gaagagccggttgtcagtcttatcaagcagggactcagcttttgtccccagcacaggcccagctcctttgatccgcagcaaggccattgtttccccggcagtggcctctctgcttcacaggggaaaatgtggtctttgttctcctgagactttttatccaagtcctgccctggtggggacaaaccgggcggggctccatgtgaggatccagtctctggcagctgggggacaagggcagcccctgtaccctttcctctgccttgcgtgggctacacaaagcccttagaatcctcttgctcagtacaaatcatgctgggttgggggtggagagagaattgtgggcaaacactttcagcttctttattttgaaaaattgttttgtttccagctcaatcatagtataaatcaagtgcagtaagtcctggtaaaaaactaggtttgatcttacctgaaccacttactggctgtgtcacctgggataagacatttcacctttggagtcacagttactttctctgcaaaatccagaaaataatactatttactgcacagcattgcaatgaggttgatgcattcattcattcattcattcattatctattaagcacctactccgtgtcagacactggagaatgaaatggacttgattgtgccccacccccaccaccccatgaagcttacaagggaaggaaggcattaaacatatgcttgcacatgtaagtattgcaagaagaaatacagcttgctacgagacaggacttcactgagtcttggctgggggtgggacaatcagggaaagcgcccccagaaaagcgatgctcatgttaagatttgaaagacatggataaaagagcctggtccatgagagatggtctgaaaatattagttcccaccccctctgccttggatcagatccctcaccaacacctgctgggtgtgaatgggcttaagaagctccccctcccctctagggaacttagctgaaaagaagtggattctgggaattgcttccaggggcctggaaattgatgaagacacatacaagggaatgaacatggggccagctgtgacattttctgtgtgccttaatgagaagtgctggggctgtactacccggagctgaactcttggcccagcttgccaggctggaggaggagggggagttgcttcacagactgcagggctttgtgaggggaaaacaaatgggtctgtaacttgatggaggcagaggggaggctgccagagctgtgagcctgaagaatagctttcagaggagtgtcaggggaggaggcagcctcttccctcaagctaggggatgtgcagagcagagctggctcttggatcatccccaaatctggattgtgtgggccatgctgctctgggcacccctgggctgagttactcacctatatccagtactttgtacgagccaggggcatttacagagggtatcagagttaggccttgcagcaaccctaatgggtggggggtacttctaccccaattttgcagatgagaaagctgaggttcagagaagtcaagtaacttgcctgaggccacacagctaggagtggtgaaggtgagatctatatttagttcagtatgactttaaatccatattcttccttatgtatcatgctgctagataattttttgatcaatatttccctctgaatttttaaaatgtaataaagagtcccttgtatgtaatatgtttaacaaagaactcttgcaaatgccatgatgcttgccctgtgagttgaaatgcttttatcctcagattagagatgaggaaatggaaggtcagcgaacccggtggatctcttaatgccacacagcaaggaagtcagggagctgggtagatgccaaatctcttgcactttccaccactgtcttgagacccaggtgggctcttcaaggtatccgctgacatccagaccttctcctgatccttaaaattaaaagcccaagcacagtcagtttgtttttctaacagactcagagtgttcactctttctgactcttgataaagccagcagtcaaaatctcctttcctggggcccctccttctgagaaagggatggttagccatgtgtatttttcactggggctcccacaaagaatgtgcatataatacgaaacatatgtcatttgtgcttgtgggagtgcccctaccccatgcccttccctgcacagctgggagccccatctgcaggaaccctgtgcagggggatggaaccatacacacctagagaggggcccgccagacctgcccacctcctgcaggcagaactgggtactgatcccctctgctctcctcacttctccatgggagtcctggtcccaccacgttttcattcttggcaaagaacggtggggctgggattcaaatcaggtgtgtctgaggtcaagcgtgaaacataccttgcatgggctacagacatatcagtggatgaattaaagaatgaactggggaagaacacttctgcctctggtttctatgcagtaggtgctgtttaaagtttactggaggaaagagtaagtacaccctgatgggggagcttcatagtgggtgtgtttcaggagaactctggagctgaaggaagcacattggtattttgtcctttcccttcttagaagatagattgtcaggcacagtggttcttgaatttgacgtatattggcatcacctggagggttagttaaagtacagatcgctggccccaccctggtctttcagattccatggggccaaggatggggctggagaatttgcatttttaacaagatctcatatgatgtgatgctgttggtttagggccacactttgggaactactggtgtgtaggaagaaagaaagaatggtgggtggagcttgtgagacggaaagataagaaatgagattataccatgctcagagtcaacattctaaaactcaaacttggagacatgactcacgtgctcaaatatctccctggcttcccactgccttaccagttgggctctgctttcgtccccagcctcatggtttacattcccctcttggactccttatctcgtgccacaagcttctcatccttcccctaatgcagtggtccttttcttcttttcctacctttgcacgtgctgctacttctaccttggcaaccccagtcctcttttctaaacctggaaaactccttttctaaaagaacctatcaactgccacctcctctgagaagccttccttgatactcctaaatgaagttttagcttccttccctgtacttctacagcaataaggttgtatctctactcatggcttcatcccctatactgcagttgtttcttgcctcttttagcctggaatcttcttgagagtaggaactttagtcttatttatcattctatcccaggccagggcctgacacatagcaggcactggataaatgcttgtggacagaatgggtccatgataatgtctgttgtgcatttgttatgagttcggtgctgggtgaagcagtagagagtaggataatccacggtaggccattcatgcagctgccctggggaggcactgtcctgagtgctggggatctctctctaaagaatgggagagacaagccctggctcacatacagtttcttgcaagagccggagaaaggcatagactggttaatttcagcaggaatcagtgcagtcatgggggaaacacagggtgtcaagggaactcatagcagtggcacctcatctgagcggaattggaggtgaggatcaaggaggtgacatctaaactgagacctgaagtaggaagatgaggaaggaaagctagagcatggcacatttggg

SEQ ID NO: 2825 - DNA, 5590 bp, Homo sapiens
atgcaggtttgttacatgagtttattgcatgatgttgaggtttgggctatgaatgatcctgtcccccaggcagtgggcatagtatccagtaggtagtttttcagctctggccccacaccctctctcctccctctagtagtccccagtgtctatttttatttttattattattttttattttttgagacagtgtctttctgtgtcacccaggctggagtgcagtattgcgatcttggctcactgcagcctcaacctctcgggctcaagtgattctggtgcttcagccttccaagtagctgggactacaggcatgcactaccaagctgggctaagtttttatattttagtagagatgaggtttcatcgtattggtcaggctgctctctaactcctgacctcaggtgatcgacccacctcggcctcccaaagtgctgagattagaggcataagccactgcgcccagcccccagttctattgttcctttctttatgtccatgtgttcccaatgtttagttcccacttataagtgagaacatgtggcatttattttctctggggtatataactggtaatgggattgctgggtcaaatagtaagttttgttttaagttctttgctaaatctccaaactgctttccacagtggctgaactaatttgcattcccatcaacaatgtgtaattgttctcttttttctgcagccttgccaagatctgtaattttttggctttttaataataaggccattctagctggtatgagatgggtatctcattgtggttttgatttgcattctcgggtgattagtatacatgaatttgcttctgcctttgccacccctgagacagcaagaccaacaaccccttctcttcctcttcagcctactcagtgtgaagatgataaaatgaaacagttggtgatgtttcagagaacccaactcaaactgacttgaacaagagaaatcagtgtttactgcagagaacacagaagccagcaagcagcagggaagggaggcgaaccaatgcagcagcccaccgggaccgaggaggacacacgcagagcaagtcacaggaagcgcagctgaaaacaaatggacgcttatcccaaatgcacaggacacttaccaagaactgatggtccgtcaaagtaaagctcaacagctttggctggcaggacagtcaaacttttggacgacagaaagtaacagtgggaaatgggacaacatctgccagcaacgcgagaggccaagaccatggctgctacaggaggggtcagcgtcacagtacacgcatggcggcggttgcacatgcatgcctggggaatgtgagtgttcagacatgccaggagtccagcctcaccaggaaacaggcacacggggacagaggcgcaaacactgaaaactctcgctgaatccactcggctgagcggtggtcacgagagcacggccctgcgctccccacaaaactgcacctgggccccagggcgagacaggcgtggaaggtgcaggggtgtgtgtgggggcaggggctcctggctcagagccgtatccaggaaccccccttcaggctggagccctgccctgagccccctgtggagagactgtggagagccccctgtggagagggtgactgtgggagagcagcatcaggcctagtctcggctgtgaagtaccccccacctccacgcaggatcccggggattctgtcaaggtgggggccgcctgctcagcccaggctccctgaacgtgtggctagctgagtttgcggaagaaaccaggagagtgccaacaccaggcttgcaagcaagaggctccctgactgcctgatcctggagcgcaccccatcctccctgtgttccctgggcctcagctgttccccagtgaccttggagacaccctgccccaccctggctccacaggagccctgcccatcaccgcctcagctctgagtctcccctggggacacaaccttcctcctggtgcagaggcgcaggatgctgcccctaaggcccatcttcctctgcagcatgttttgatgtcagctcattcacaggaaagaaacaatcacatctcagtgcccagaatggggaccaataggagaggtcactgggaataaagcccacacgcaccccagggtccatgggctccccagaaatgcaggtggcctccgccagagccaacaagcctaagttgctgatcagcccctccctgcttccctgtgtggaagaggaaacagaggcccagactagtagggctctgccgtggtggccggctgcgtccccagacctctggtcccagggctggctgggagtgcccctccctgtgctcacttcctgctctcctgggaaatggctcagggatggggcgtgtggggacagatgctggcatagctcacaaaatgcttgcacaagggacactccatggcaggtccctgcaggagagcaaagtcacaacattcagagattccctgcactctgaggcccgcagagcctggccgaccaagcgaggctgggaggatgttgcctgctggtcagggcagccctctgatcagggcggccgagtgaggctgggaggatggtgcccgctggtcagggcagctgagcgtggctgggaggatggtgcctgctggtcagggcagccctctggtcagggtggccaagcgaggcagggagggaggtacccaccggtcagggcagccgaacaaagctggaaagatggtgcctgctggtcagggcggctgaatgaggctgggaggatggtgtctgctggtcagggcagctcaggaggtgctgcccaggaggtgctgtccaggcagagcctagggctggtgtgggtgtgccatgctcctgagaagtttctgggttgtggctttaatgttctcctgcagtgagaacgctgacacttggccaaagggtcctcacctctcccctagtacacttctgagatgccaggaaggttctgaacatcagattgattcctgggactcccctccagggtggccttactggagtcaggagcccctgccccactaggatggctctgcagtggcctgaggacagtgagcactgactggtcactggtgcaaagttgcccactgtgatggttttgaccgttgatgggaaccaagtgaaagccctgcagctatttctaggcatttcagagggtgcttccctgcatgtactctgctgcagaccatcctccctgggccaggagcccgctacacagtaggagattctttttcttctcttttgagcacttttattctctttttcttaatctctgctcctcctttgaactgagaaatgtgcaaatcttttttgttagttttgaggttgcttcttatgcatatttcatctggaactttcccctttgggggtgatctgttctatcagcctgcccgctgctagagaggccgaggtggtccggccagccgtgcgctgctgctggtgtctctgtgggcatgacctggtgagatatcattctgcatctgggggtccatcctatcagccctgtgttctagattccccagtgactgacatttagccagtctcctctgtcactctccagtgacatgtacacactgttggcacgaactgcagatgtcacgttctgtggctgagagcctcagtgtgcatctgtagtaggaggatgtcagtgaggactgtcctgtcgctgctgagctggcaccgactgtgcctggtctacactccaggtctgccaaacgacccagcaaggtccttcacaactcttctgatccaggatcacacatcacttgtgctttgatgcctgcttctgaacaattttacctcctgagatgtccatttttgggagtgtgagccctcctctcctggtgacagctggctgaggccgtccagcctcaggacacacagggaacggctgcataaggagatctggggcagggggcccaccaggatgttctgccctgtggggggcaacaccggctgtggtctgccggcggcatccagggacagtctgtctaggtgaggctgaggccgcccccactcgctccctcacccccatgctgacagcagtgagctgaccacagactgggggagccccacagggagactggcctccccagcacatgccccgcagtgccagacgcggtcatcacagaggcaggtacacgacaccacggacgtgccacgtacccgccatcgggaccaaggaccactgagaaaccatgaaggccatgcagcgactgtggtggcaggaccgtcaggaggccataggtgccacggctcccctctggtggttcacctgcccacctgtagctggggtggcccctccagtgcgctccccagagcagaacaccccccaggcaacacgtctgatgaaggccaacagcgtcagtcctctggtgtttggtgacatcaaagctgtgccgaaaggccttccctcactgctaacacttgaagggcttctgtccggtgtggaccctctgatggcgaatgtggtctgtcttatgcttaaagatccacctccattaactgcactcttagggtttcttcctctgaaaaggaatgaacacgggaaccccctcaaaggcatttttaaatgaagcgtggaaggcatcaaagatgtgctcttcttcaggactcaggcttctccatcattctctgttccttggaagcgtgagggctaaggagctgctgacttctctctcttggccccacttcaagaaaggcttgcttcccacacacctctccacgctcccagtgcgggactgacactctgcaccgggaggccaagggccaccatcgtcttgctgggagaaggtgtgacgtttcttggtcataggagggagtgtgatctgacaccagaggacttaatataacattgcagtgttaacatcttcactggcagattcatggactttccccctcctgaatgcatttcaacaccttgaaatgaacgatgcctcatgtctctgcagggtggacatagctctaactctctgaagctggtgagaatgttgaagcctaggggtgccttttgaaagacataaatttgggccctgaagtggtagtggggaggtgggataggagaaaaggagaaacctttgtggtggaaagatatctgggttggtcgttcaggttctgctgtaattagttgtgagaaagtcagtcagttaccctctgtgagccctatttttttaaaaaaataataatggtctgcctatttcagaagtttgatgcgagaaccaagtagaaaggttctttgtgaagcaagtattgaaatatattctcattaaagcgtgtgcatgggattgtgctaagcactgcagggggtaggatacaaataatacttagactctcacctcaagctaataaggcaataaaataaacacctcaataaatagaacaagtaaattgcaaaaccagtaatttggagagtgattttcaccacttgagacatggtgtctctagagcagtggctctcaaatctggctgttcattagaattacctgggagctttaaaaacagataattgtccaggccccagccccagaaattttgacttaattagttggatatgcctcaccttccactttcccctacattatcattt

SEQ ID NO: 2826 - DNA, 1649 bp, Homo sapiens
aaaacaactaatatagagttgacaaacctatattagatgaaggtgataaaaattattatgtcctttatcacacaatgagtctagacagaaaccaatcaagggatctataataaagatttaatggaaaaatcttcatgatattcttcatatgtgactactggaggtcttataacatttctaagtaagcttaaagcttaaagctaaagcttctgaagttcttgtgagtttcagcatttaaactgcccggcttcttgtctagtcacaggaaggctaattttatcagttttataccacagaattacagtactgaccaagaattatttgttagaccagggggtctaggtcccacagagatgaatcctgtactatttgttttactgcttacattgcacaacagaagatatgtagatcagaaagaagtacattttccacatgcaaataaggtcactatatttctctaaattttataaattgcatctgttttgtttttaagtacaggtcaagtgaagttcttctgctgatatgttctgctactgcataagagacggaatctatgttgcctcgactggtcctgaactcctgggctaaagcgatccttctgccttggcctcccaaagtgcgaggattataggtcttttttcccccctctgctcccacaccacagcaatcaacaacacagaagacaacttctgcaaccctatcgggagaggaggggttctctccaccaccaggtgagcaatcagttctgcagcggacaccaactgggtgtccttcaattcaattctaacactatctacctggagacagtgtcaggttgagggctcagtccccaagactgccccctcaacaggagttgcaagtctggcctcaggaacttctgactgacaggcttcaaaagttgggattctcacaaacccatctttgctggagcagctcacagaactcagggaaacatgtttaccagtttataatagaggatattaataaggatacacatgaagagatgtgtagggcgaggtatgggagaaaggatgcatctatcaagtaccatgcactgtgctaggtactagaaatatagtgagaagtagaatagcctttgagcttaaatggcctcccactccttagtctactgaaatagtcacctaatgctttattcccaaatgcttgtctagctgcatcgtgaaggacattcaacatttcaaattcctaggcctcactgggaatttgaatctgtaaattctgattcagtagatctaagtcaggatcccaaaatctgagtttttaaaaacttccaagatgcatatgatacgtaagtttgggaaccactagctgatcattattgctaaccactgttactctgctttaatttctttctgaaaccatcaccataaagatccttccgaagtaaagaaatttggcattatggcctgattaaaatcccattaaatgtacacaggacaaggtctaattatttaaaaggaagccctcccttacctagttccctgtccacctctttatcctcatcattttccacattcttcagccacactgcagttactcaaaagcaccatagtatttcctttctggcttgcttactctactccttctgcctggggtaccattcccaatatgtggcttggtaaatttat

SEQ ID NO: 2827 - DNA, 3114 bp, Homo sapiens
ggccaaactaaatactcggtgcagcaaccctcgcctgggtcaggtcaatcggctgccagccggattggccggcgtatcattccagaatgtactgtttgttctgtggggtttaggagttctacagtggttctgccccatctttctaaaaatacaatacagtgtttcactatgttacccaggctggtcttgaactcctgggctcaagtgatcctcccactttggcctctcaaagcactgggattacaggtatgagccaccgtgcctgacaactattaatttttagacaatcatttcacaataaattttgaactattttgagtaattaagggctaacttgttcaaatactcactagcacataagtcccttaacaataagcattttaaaaaggaaaagggcctattatgaagtttctggtgaaggatatgatattaaaaagccctcttgggccaataattaattattgctgcagtttcaaattttctttcttttttttttttaaaaaaaaaaaacagtggaactcctaaggacatcttgtgaatatcaaaacaaataaaatgtccactgtggaacagagagtctcagtttctctgccctccaccaacccccagttcatgagaagcagccctctaattcatctctctcccacaaaaatgttgcattattcatcttatcactgaaagtttttatgctttaatatctccccatttcccccactcccagccctaacaatcacctttctactgttcagggaatctaatatacagtatggtaatgacagttaaaataagcagagaataagaagtctccatcagtaaaactcataaaattttttttctctatccaaaaacaaaaccaaaattttatttttattttttattcttccataagttattggggtacaggtggtatttggttacatgagtaagttctttcgttctttcatggtaatttgtgatattttggtgcacccatcacctgagcagtatacactgcaccgtatttgtagtcttttatccctcacccatctcacactcttccccccaagtccccagagtccattgtatcattgtatcattcttacatacctttgtgtcctcatagcttagctcccacatatcagtgaagacatacaatatttggtttgccattcctgagttacctcacttagaataataatctacaatctcatccaggtcactgcaaatgctgttaattcattcctttttatggctgagtagtattccattgtgtaaatacatatatatgtcacagtttctttatccactcattgactgttgggcatttgggtcggttccacggttttgcagttgtgaattgtgctgctataaacgtgtgtgcaagtttctttttcgaataatgacttcttttcctctgggtagatacccagtagtgggattgctggatcaaatggtagttctacctttagttctttaaggaatctccacactgttttccatagtggctatactagtttacattcccaccaacactgtagaagcgttccctgataaccgcatccatgccaacatctactgttttttgattttttgattatggtcattcttgcaggagtaaggtggtattgcattgtggttttgatttgcgtttccctgaccattagtgatgttaagcattttttctttttcatatgtttgttggccatttgtatatcttcttttgagaattgtctattcatgtccttagcccactttttgatgagattgtttttttcttactgatttgtttgagttcattgtagattctggatatttgtcctttgtcagatgtacagattgtgaagattttctcccactctgtgggttgtccgtttactctgctgactgttccttttgccgtgcaaaagctctttagtttaattaggtcccagctatttatctttgtttttattgcatttgcgcttgggttcttggtcatgaaatccttgcctaagccaaagtctagaaggctttttctaatgttatcttcagaatttttatagcttcaggtcttaggtttaagtctttgattcatcttgagttgatttttgtatgaggtgagagatgaggatccagtttcattctcttacatgtggctagccaattatcccagcatcatttgttgaaaagggtctcctttccccactttatgtttttgtctgctttgtcaaagatcagttggctgtatttgggtttctgggttctctattctgttccattggtatatgtgcctattttataccagtaccacgctgttttggtgactacggccttatgatgtagtttgaaatcaggtagtgtgatgccttcagatttgttctttttgcttagtcttgctttggctgtgcattctcttttttgattccatattaattttagagttgttttttctaattctgtgaagaattatggtggtattttgatggggattgcattgaatttatagattgcttttggcagtatggtcattttcacaatattgattctacccatccatgagcatgggatgtgtttccatttgtttgtgtcgtctatgatttctttcagcagtgttgggtagttttccttgtaggggttttttgactctttggttaggtatattcctaagtatttaatttttttttgcagctattgtaaaaggggttaagttcttgatttgattctcagcttggttgctgttggtgtatagaagagctaccaatttgtgtacattaatcttgtatctggaaactttgctgaattctttttatccgttctagcagctttctggagtagtctttagggttttcaaagtaaacagtcatatcgtcaggaaacagtgacagtttgacttcctctttactgatttggatgccctttatttctttctgctgtctgaatgtcctggctaggacttccagtactgtgttgaagaggagtggtgagagtgggcgtccttgtcttgttcccggtctcagagggaatgctttcaacttctctccattcaatattacagtattatgttagctgtgggtttgtcataaatggcttttattacattaaagtatgtcccttgtatgccgattttgctgagttttaatcataaagggatgctgg

SEQ ID NO: 2828 - DNA, 5878 bp, Homo sapiens
cacaaaaatagataatctgaacagttctatataatcttctaatgattatatatgtataatttaaaaccttctcaattagaaaactccaaactctgatggcatcactggtgaaatccaccaaatatgtgaacaaagaataatatcgatattatgcaaatttttcaagagaacaatgaaagaatactcccaactggtttcatgaagccaacaaaacttgacaccaaagcctgactaaaacattagaggagaggaaaagtgtaaccaatcacaaatgtgaaaatggatgcaaaatttctacatagaatattagcaatctaattcagcaatatataaaatgataatgcatttgttggggggcaattctcagtgagtctcttccatttatgcatgtcttatgaatagaagtactgactgacattttttccaggctatcttggcaagagaaaaattttgaacatagaattggtatctcctcctgataccaattttgctgctgagcaaaggcaaacatgcaggacaagtgtggttctgaccattataaaagatttaaattccttacgatcaaggtttctctcctgtaatgtagcgatataaatgatattacaataggcaataggatcaagtaggtcccaagattcaaaatggattgctcccactcttagtatatgtgcatttctgccacaatagtaactacctccaacacacctagactcctgggagttttctatgactagaccacgtgtgaagggttgcggccaacaggtttggggaagacctctcagaataagcttaaagtatgagcatatatacatcccatgaaaattctcaccagaaggcctctagtacagtggttcttcataaccagatagataaaagatggtatgccctaggagtatgaattaaagcaccaggaaataaaggaaagtttattcatggatccaccaacatggattaattcttatgttctgtactctaaagactttgttgatggaactatgtaaaggcccagtccctgtgtccccatttcaagacaaaattgcagggccattccagatttagaactccctataggggctggccaaggactttgcatgattgtttcacaacttccttccagttctcatcctttcacccatccagagctgatggttcctagagcacccttcaatgaacatcctacacacaaacctatctccaagtctacttttcaaggaatctaatttatgacacaggttagacacaagctggatttgagttttatttctctatctgtcatgctatatataactctacaatctgtggtgtttctgaaaacttcatcgtggaatcttatgcaatattgctcctgaacaaggagcagacttttggtaaaataagatgtacaatgggctaaatttcatgggattcactaactttatcatctatcttattgcaaagtaagccgcttagaataacaatgtatgctccaaaccagaaacaacaaataatattgtttcttttatagccatatcccaagcatctggaaaccaagcagttgacataagagtgaaaaaatgaacagaactatcatgccaaaatatttttgtaatgcgtaccttctctgctcaaatatttcagagccactttccaaatttacttgcttgttcaagtaataacccattaataactttttactccatctttttaacttttggttctattggtttgaaggttttgtacctgtgagatttgtgcttccaagatggagcaatgccaacttaatgataaattgagactgcagtttgggggtctttgtgccaaaagactattgtgaccatgaaatttggaagccaagcataggataccaggagaggttggatagaagcaagatttatcagaattagccttggaatctctgactcaagtatggactatcatcagccattagcaccagacaaaatgcagccactgacaatcttctgggatgccgctaagtatacttgacctaacaactaccagtaaaactttctgacatgtgctttgattctagattatcaactaagaattcagggaaacattctactaaataacatgtcctatgtaagtgagataattataacagcctcctcactaggttatgggcccccaaatttgtacttttcagatctttcttctacgttgcagtcagacacagatttgatcacgccacaccattgctcagaattctttggatgcaacttactgcctataggatgaagaccacactcaggcatttccttgaatgctgacacaatcctaccccaacctacctcacgatcttcctactgcatgcatgctcccttcagatctaattggctttttttcactaatgcctgcacttgacctaagtgaagattctgaagcaggagagaaactggttttctaggcctatcttgagtctcttttatcattgaccatctttcgctaccacaaaagaatcatattctattgcacaagacctagtgggcctcatttaagattttgaacattattccaacaaaattcctaaaattttaagtttgtacttatatcataaagctagaccttgcatttaaaactcacctttagaaaacttgctttaaaaaaacaaaaacaagtaattttgatgaatttggaaattctgtgacttaatcttatctgttatctgagtaagagtttaagcaacagtgacactggaaaataaaatgatatttatgtataaaacaatgataatactatagaatgtcatctttcagggtaacatttgttgagttacagaactgattcattgattgcactaaagttataccattgaataacttgcatggagggaaaccagaattataaccacgggtaaaaattgatatattagaggtgaattttggaagaaataaaaatgtagaaggcaattataaggggagcacttaaattaggtatgaatggtttatgctattgattaaagcattttaaaaatcaataaaagaacactttgtaccaagtagctttcaggaactttcagggaagaccatttgattcagttcaaaagtcagaagcctctgccctaacaggtaaaaagcgtggttccatctcctttttaaaaataaagcaaataactacaatttagagtctaaaatcaagcattaatgatctgctccagtcattttttaaagaagcaagctatattaaaaattttgatacttaatgtgaaaattatatttttatttatattttactacatgctgttatcttctaataacaattcatgcctaatttatgtgctccccttctaactgctttctatttttttgcttcttccaaaattcatccctaatgtatccatttttacctgtggttgtaattctgatgtcccttcttgcaagctattgaacagtataaattttattatcatttttaaaatttttttatgcgttgatattaaatgtttatatttgtaaagtacatgagatgttttgatacagcatgccatgtgaaataaacacatcatggagaatggggtatccatcccctcaagcatttatcaacagtctaactgtcatgcagttataaacttcttaggagaaggatctcttgtgttatataaattataaaatttaatgccatatccttgtacaaggtaggctaacaatgcctactttgaattgtactatattcattcaagaagctttttaaatctcaggctttctgactctttgttctgcatttctcccctttcaactaaagaatatattttataggtgagctacaggtggttgtatgtatgcatctgtcagtcttattcctaggaacccattcgtgatagctctgccacatccatttgacaataaacgactcaagttcaagaacgctaactgctttcttgtcaacttctctgaaagtatgtttaaaacacattttcctgactcatacatttagcttagccaggtcaccaccaggcccggccttgaaagcagcagatgttgacgggttaataaaaaaaagagtatcatgagaagtggtgaccaaagccctctgctcaaaatctatcctaaaaactatggctgacatacttgtgaagtatattaaatgagaacctttcttgctatctaatttgggctgaaattccagagccaagaactctaagtaccctcacattctaaaatgagttgcagagtccttgcaggcattcacagaaggagactccaaacagccttggtgactcctaggtatcacctaccctaggaaaaacctacactgccagagtttggtgcagcaggacaatgggtggttcctttggaaagggtgacctcaaagaagactttggttctcttggactttgcatgaaagtaacagccacaggacaatgtgaatccaacaaataacatctgtggaagtggacttccagaattcaggcatcaagtcataagcaactggccaaaagaggcagcacctatgttggaaaaagtcagtgagaagtctcaggaaatgtgtaacagtgtgtgcatgtgtgtgtgagtctccaaaaacttccccaaagattcagggaagaaggcaatgatttgaatattcaataaaacccaaaggtcacttctgtctcataaatctctctctgaacctgtttccaactttggagaagccagtggcccaggatgttggaaaaaaaaaagtgtggaaaagtgagtggggacattggtaaaagttgaactgtgtcttccctaagatagggaagcaaagaaatcagaaatgttcattcgaatgagagtttgggtgtggaatattaaacagaactactctttctattaactaaaatatgttactgtttattcatacctgagagtgactggaaaagctagaggacctgcaagagataactcatgggtagagaaaaatgaacaagcagctccaaatgatattgaaaaaagaaataaagcacttttggaattttgtctctaatacaccagtttgttccataaatttgttgtatttatttcttagttttgtctaatgcttggaaggcactgttaaaaaaaaattatctatgctgagccatcatacctgaactatcagaactccttcagttgcaaaacaaaacaaaaaacaactcaaactagatttaaaaatagacaaatgtcttggtccacataacttatatggcttcgtgcacaattgaatccagtggctaaagtaaaccattaggattttcttactctgtttgtcatctctgttggctctctttatgtctcctacagatgctttcctctctgtgattttgcatctgttattcctcagcaacaaatataaactattagagaactttcttggatcatgtgcctatcactaatgcaatcactggaaacaagagaagggggtctctgattggccacctggtcctatgcccacctctatgatgatggtggcactggtggcaccatgactgatgttctcaccaaacccacatggagttgtggaaaagtggatggctggaactcaaaagaaaagtgaattgctgtaaccagagaggaaggtaggcaaaaacaacagatattccctacaattacctaagcttgttgtacattacagtgcatagctagccagctgggagtctaggattaagcttggatttctgccctcaatgagtaaaaatatctgggtagaaaacagaagattgcagcaaaatttcccagattatgttctatgatgttttaagaatagattcacaatttcttttacactcttcccttccaacagaggaccattattctgtcctcttgagggtgggctggacctcatgactcacttttgataaacagaatgttgtcagcatgatactatttgacttctgaggctaagtcattaaaaaaaggatagtttctgcttgtctctc

SEQ ID NO: 2829 - DNA, 1315 bp, Homo sapiens
ctttggctatggcagcaaggctttctggtcagtctggaaatcagtagctggtttcctttcagacccatcaagtggccatcctattggcttggactgaagacccccactggagaactgtctctgcagcctatactgatgacactggccactgtccagggctccaccccaaggagtccaagccccagacatttagccttagagagaatccagattttgcatttccagtgcagggattgatggagccttgtgtatcaaagtgccaatttctttctaacaagctagggaggataccgttgacagcagcagaaaggggtagcagtggtttgctttccaaatggtaataagaagggcctggcagtggcaacctgtccacgtatcattaaaaatggactctcctgcttcgtttggaattcaacccaatgaacttgaataaactctggacaatgaccagcacagagccctaagcaggatacagcaagattatttgctttactcatccactgagtacctaccatgtgccaaatactatgctatatgccgagtatacactggcaaataaaacagatatggtccctggagcctatgaatcttaccccatctagccacaaataataaaaataagaagaatctgaaggacaagtgggacagaaatactcaagcagaatgagggtgagattgaagtccctgaacatacagtgccctttacacttgatcttagccaaaaggccgagaagagattacagtgctttttaaaggtagcatttcacccagccaataatcaatccctttggccttcttgaggtgcaaggccacacactcaaattctttaatcaaacaataggctagtgcaaatggagctatttcttaaacccagctgtttacacagcagctacaaatctgttcagaaggaatcccccaccatccacaactgtctatcgagcagatgtgcaagagtatttgtctctcaccaccagggttgcagtcaggacaagagagcaggtttgaacgtcttcggctcctagaactgcacaagctgtgtcttcagtgcccagaggcggctgcaacgtctccccagttctcctctcagaacaatggaaattttttttagaggcgtaataggaaggtttgcattgaattattaaacaatgggtattgaaaaatatgttttctttgacctctgtacttctagcttttaccagtcagtgttttcttgtaccaaggctaagatatgtataacactgaaatggatgtcttcttatataatattttacaagcttttgaaaacctgtgccctttaataaattttaaaacgttt

SEQ ID NO: 2830 - DNA, 22315 bp, Homo sapiens
aagcaagtcatttggccagagctgcatatatcagaaaggaggtgtctatttctcctgcagggaggggcactgaatatttgggacggtctttttccaggaagataccagctctgcctaaaatatagcagttgcatgcgatttagaaatctgacaaacaggattgtcagaaaagatctgaaggaagctgccatgtggggaattgtaattttttcccctaaagattatttcatgcttgttggatccatcatattctgaaatccttttgctgtccaacaaatattgataagtggaggctattcagtcacatagttcttaggcatatcacgccatagctccctgacatatgcctactggctgccttaattttctcccaatttgtagctccatgtttccccatcttcctccccacaccccatctttttctttttttctttttttttttttttttgcccttcttcatttcttctctggtctccaaaacccagatgactgtgacttttctgtgatcacttaagattttcaagctcctccctcaagaggctggtaatttccacttggagcattttcctactattttgtccagctaagcagtaggttcttaggaaaactgtgtgtcttggagaatgaatttccatcagaggttggagtgcagtggtgtgaatatggtttactgaggcctcaatctcctgggttcaagtgatcttcatatctcagccttctgagtagctggggctacaggtatgtgccaccacacccggctaatttattttattttattgtaaaggcaaggtctttctatgtttcccaggctggtctcaaactcgtgggctcaagtgatcctcctgccttggcctcccaaagtgctgcgattacaggtgtgagccactgcacctggcctctactttatttgttttcatatttatctgttccactagactgtgactatctagaggcagggactctatcctgagcatctttggatctccaagcctggctcagggcttggcatgaggaagaaactcaataattagttgaataaatactgaatacattgtaagaaaaattatttgtcaaaaaaaatcagtaacctactacttacttattcatttaggaaatacttgttgagtccctacaagatgctggatgctgttctaaacagaggatacagtggtaaccacaaggctacagtctattggggaaggcagccaacaaatgctttcactcattcgacatttattgaacaacaacaatgtgccagacactgtcctagattctgggggttcaataatgaacaagataaagccactgccctcactgaacttacatttgagtgagcatgttttgcccttaagtagccatctttaaagctgaaggtaagcacaggggcaccagtttttttagaaagcaaagcaggtctgtggctcctgatagatgagaggcaagcaggatgccactttaggtcatggaaagacaatcccctgagctgattggaagccagaacttggagtgaatgtccttatgggtcaagggtgtctttgctaaccacatctgaagcccttggcatcgggggattgggatgggtcccaagtaagaaaatctgagcttttcacacttctccaatgacaaagtcttacacacagtaggtcacttaatttctgtgggattaagtgactcttaccagtcatttatcaagatgtgggctcctagaaatggagcttgagagatgaagggctagatggagcccagtggagctctggcagaagaagggggataacattgccttgtttagatgctctggatttttttagagcatgtgtcattggctctgcatgctggaaccagccttttctgggaagctaaagggtagactgaacccagcattgtatcatattaatattccccattctcctaagctttgggagtctgtattcctcttatgtgtaagtaccaaattgcaggggaaatggtatttctctgcatagaaggaagtaccttccatgggattttccagggatggaaggctggattccaggtctgcatttctcccacgttggtgtgaggccttcaggactcaaatgaatgaagtaatctcttagtgtccctttcaacctcgccattctctcttttgagacatttctctcattcccaggactttggccattgcagttgggctgctccttctctctcgtgcatctttggccaccaaagaagctgctgtgaatcagtaggattggttttaagcactggcgtttggagacagctgcttactcagtgtgattttgcaggctcagggaagggactttcctccctacgcaagtcccaaaatacctcctttatcagtcttttggtgtttgggactgctttactgtggacaaagcctttcattccacaatgaaggatcaaaaatagaaatgaatgcacatgtgtttggcattgcccataacaagctgttcttggccttcatgctgttgctcgtgctgtgccctctgccaggaatatcctccccatgccctcgtttcccttatactgatcctttaagagtcagtttaagcatttcttaccctagaggatgccgtaattggtttctcttgattgcaagaaacagagttactcagagtagatcaaataaaggctggttgagtggggttgtgacactcggaacatgaaccccaggatgaagatgaggaggggacctaactctctgcttcgacagtctgtctcccctaaatagactttcatatcttgaaagtaggggctatgtcttactcgtttttgaaagctcagacctagcacaaagcccacctcttaatagatgtttgttgaataaatgaatgaatgaatgaataattgaatcctaagtatggatagaagatgtgggttctgtcttttagaaatttatagtctagttgggaactagaaaataggtaaaaacctaagtaaacaatggttaaaaactggtacaaagcttgcaagacaaacacattaaaggcatcttggggggatgagatttagttagcagatagccctgagaaagacttcagttcatactcacatgcaattgactaagatgtttctgagtgcagaacacagacttttagttgagaaattgaagtgaacattgaactaatgtataatttcctaaagggtcccacaaaggatgactagggacagtaaaagggagccagggaagcctcagagtaggactcagaggtccttattacttggccaatggttggcctgccccatcaggtgccttagagcccacgccaatgcccctggactcatgagtgacccccgtggccttatctgagtggctgatctgacagagcaaggtgtgtgctttgcgcctgctgagttactgccagctgcctgtggtggataaacaggcaggcctctgggcggccctcaggactctatagtgaacaaagaaagtcgttcagatgttttcagattgtattgagttaaatcaaaggccaagagagcagaggtctttgcagttctttgttgtagagggtggcccctgggcgagtcccttatcatactctcttctatttagatgtgtttctttgaaccttcccgcagaaagtgatgccctttgacaggctccctcagcttgccaaggataagcagtgtgcagttgtgagggattcccagggtctcttctcccataacatttattgtcagtcctgcctacctgaaacttcatcttttcttgtactcaaaatagagaaagtgggtgcctaagtgaacccactgagcccagccccctcaatgaggaaactgaggctcaagaaaatgaaactttcttcatattcatgtagtgctttgagttcatcctgttttgccacatatgctcacgtggttttccatttccttcattaaacagccctttatgaagggcctactgtgtgccaggcaccgtttaggcattggatgggtgtatgggtttggctgcaagttacaatactcagccagtagtggcctaaactcttaccagaaaggggtcccaatccagacccccaagagagggttcttggatctcgtgcaagaaagaattcgaggcaaatccacagagtaaagtgaaagcaagtttaataagaaagtaaaggaataaagaatggctactccataggcagaacagccctgaggactgttggttgcccatttttatggttatttcttgattatatgctaccaaggggtggattattgatgcgtcccctttttacaccatatagggtaacttcctgatgttgccttggcatttgtaaactgtcatggcactggtaggagtatagcattgaggatgaccagaggtcactctcatcgccatcttggttttggtgggttttagccagcttctttactgcagcctgttttatcagcaaggtctttattacctgtatttgtgctgacctcctatctcatcctgtgacttagagtgcctaactgtctgggaatgctgcccggtaggcctcagccttattttacccagcctctattcaagatggagttgctccagtttaaacacctctgacaaaacaatgcaggcattcattatctcatctaaaataagaaagaagtccagggctgtggtccttagaggctgtagggtccacagctcagcagtgccatcaagaaccattcttggtgggtcagtgatatctcccctcagatggcaagatggccatcatagcccccaacaacatcctaatgctcaaagacagaagcaagacagaacagggaccttcactttgctcttttttttttttttccataggggaagaacacctttcctagaagtgcccaggtgccttcttattataacccagtgaccatatctggatcacatgcctgtttctagaccagtcacaggcaaaccagaatgggatgccataaatggctgccttgggccaattgtgatgtgctgttcatgggaaaagcagtgagtctatcatgtccactaagagcacaggctctggagcccgatggccacagttcaaatcatggctccatcacttctgatttatataaccctgggcaaggagcttaaccttttgttcctcagttttcccatctgtaaaatggtgataatgatacttcacaggttgatgtaaggattaaatgtttaatgtacataaggtgcttagcacagtacttggctcacagtaaaggttaactactaattatctattgtatatttcaaaggagctagaagacagcaattcaaatgtttctagcatgaagaaaagacaaatatttaaggcaatatatatcctgagtatgatgatttgatctttacaagttattcaaatgtgttaaatgatcacatgtatccccaatgtatgtacaactattatgtatcaataaaaaataaaatttcaaaaagttaaaaaaaataacgatcatcctcaagactgagcaatttcttgcctgaataaaatcaggaaaaggtcctaggttttggatggacaactccagtgcctgccatgtgcggttgccctccggttcacagacaagtaaacaagcaatgttgaaatcttgtgccatggtactagatactgtgcgccgcccccctcaacaggaggggtgcctggtccagacttgggggatgtcagagaaggcttctcagaggaggtggcactgatgtaggttttcaaaatatatagcagtggctcggcaaaggcagagtgtgggtgggtgggaaaggaaggttctccaggcagaggcagcagtgggcctagagacactggagcgtggtgctctgtggtctatgtaggacaagtacacacaattgattgtgcccagagagtgaagtgagaacctggggtggctctagacgtatgtgctgccaggctggggcgggcttggatatcgagctaaggggtttgtgtcttttcccacaggctatgaattttgagctgaaggtagccctagatttttatttttggtcagtgactcaggctgcaatgagaagggtggatggggggcggtgggacccatgtaggaggctacagcaatattcaaggggactagggcaacagcctgaactagggcaggtactggagggctggatagagagagagagagaccaagcaagaaagtaagaaagtgggatgggaaaggggggaaataaatacaggcaggaggatggagagaaatggaggatggtgcattcaaatttggccaagttggatctaggggcagctggagatgtcagcaggccctcacatgcacagagtctgaagccaggagagagacctgggctgaagacagcaggtgcagaggttatcatcatggaggaagtagataatagacaaatacttgcgatagatgaaattgtcccgggaaaatagaaataagagcaacaaccctgcagctctgagcatggtttggattttgccaaaatgttctgttttgtttggacgctttatcaggctgggtatggttcaaggcctgtagccaggcaaaggttttgtttggttgctgtacaagcagctattgtttaatgctcagcctgctgggtgaatttctgcacactgcttgtggttattcaaatctctaagccctgatgtggggggagaagagaggtaggttgaaggtggatccctatagaacaccagcattaacagggcagcttgaggaggagatcaaagggaacattagggaggtgggaaggaacacacgagaatgtcccaggacccaagggaggtcatggagtgcacttcatgtgttagtctcttcaaatggactgaggatcctagcagacgtattacatatttctcttcttcccagcagagtcccactgtcagctatttggtatattaaattatattgagaatctatattaacttatagtaagaatcaagatccacagtagagaggatggggaagcagtttatcttcctgaccatcccctgtgggtggggttgatgccacaggttctgggccacacagagctgagattgagaactggctgtctgtgtgatgttgggcagcttactcagtgactctgggcctcagctacccaatccatcaaacagagatactaacacctaccctaaggatgttcagacaattacatgagatactgcatgcgaacattcagcatatatgaatcctgtccagtagcaagtgcttgctaactggtaatcactatcgccctgaggtccttttctagcacccagctcaagattggagctctagcatcatgttttgaaggaagaagggaaaataattttgctagtgaaaaaaaacctggaggagcatgggcttgccaagagttaagggagcaagcatagaccagggtgtgaaagataagcagagagctatcttgggaagagctccgttaggactctcaacaaaggcaacatcacagaaacaaaagcaaaaggattctcaatgaagaacagactggccacaggaagctggttatagagagatccaaaatggaggcggaaactagtatgaagaactccaagtctgggtcctacaactattctgtatctttgctgtttcttagcaattcaaatgtttctagcatgaagaaatgacaaatattttgtcattttgtctttgtggagtctgctctgcctccttgaccattctgtcatgtttatgtaattagcatggtagaaagaacatgcatattggagtcagagaactctgggtttgagtccctgctttatcacttacccacctgtgtgatcctgtcaaagttatttaactccctgtgcctcagtttcctcatctgtaaaatgggctaactcacttcagccagttactatgtggtgtaaatgagattagtgtgcataaactggctggcacaatgctgacgcatagtaggcactcagtaattatttttgcctcgtttttccttgtgccgtaagtaaggaagtttctattgcccttgagaagaaggtcttaaaagcatattttgtcctgtccggaaaacccgttctgaggatggaaaattttgctgatgagtgaacttggaaggatcatgtttccagggtcagggcagaaaggaagaggcccaagccctggggaaggaatggcatcagggcacagctttgtggtggtgacccacaaccgcgggcccagcaggccctgtggaactcccacattgacttccctatctatgaaacagtgccagtaactcagtctcaatgcttccttccccttccctgtcccctgaggatcccgggactgtgaactccagttgtggcggctccgtagcacctcctctgctgcctcccagaggtcacttccaggatggccgtcccagaggagccctccttccaagatacaaatggccttggccccgcttcacctgacccaaaggccgattaagaggtctgtgggggtccggagggatatctctcaaagggcccctcccaccgcccaatatatcgtaactcacaattgtacagcacttggaagttgtcaaaaacgcttttgcattccccataatgtaggcagggaagctattttacagaaaagggaaatggagcctcagagaagagacctgcttctgacagcatggctaataaatgttggaaccaggacttgaacccaggaactcccagcccagggacattctgttttataaatacggagggcacaacgttccatccctttgacttgtaattagtgggtgttgtatgtatggttatgagctttacccatattttttggtgctaggagggaatctgtcttccttccccactactcttcctctcccacaccactgtttccttgagtctttaaaaggtgtcctgaagtacagaactccaccccccatctcctggagggcctcactgacccacctgtggttgcctctaacacccaggcttgaggagtgaagccatttcccaacctgctaatggcactgctgggagctcaagaaagctatgctttcaggtgacgcattgtcatgccggtctacacgaacatctctgtcccctgtaacagcatctgccatagcagcagcccagctcaaatggcaggcaaaaaaacttgtctggtgcattccattagagagcaggaagttaccagcattgattgaaattctcaggtagagtgagtaccaggtggcatttgaagaggataatttaattcaatagtttatattccacttaagttcctcctctatctgactgctagtaaacagctgtaaaccgcctcagctgtcttagaggtgaagaggaaacacagtctagaaagtaaaatggtgatagcaggacagaatctcaagagaccaaaaacccctgggaaaataggcataggtggcctggtgtgtgaagggtgggtgtaggtgcaggaggccccattccctcctgggcccccactgtgcaatcatgagctcacaatcaatgatcactgacggttcctcctgctctgaactccacactgttactggggagctcagtggagtggggaaggaagctgagaatgtggattcagaaaaccagagctcaaacctggtcttggctcttacttcttgcaggacctttggggcaatccacactgtctgtctccctccagggtgcaatgagaggcaaaagaaagaacgtatatgacagcgtcttatgcccgagagggccagttggatgttagtagttactgttgcatcgttattggaacagagaagcccccaaaggcctgcttcccatcgttctccttgcccaagggctgggaatcctgcaggagggccagatctgtgctcaatccaggcaggcagtcaccctatgatttgaaaactgtccaaactatgcccggcccagcaaagcttgcctccgcataatggacctgttgaagcatggtagtctgttgccttaaaagggtaatggtgacattttctcagcccctgacacctaagcctccttcccttccctgattggttggttggctctcaccttaggaagcagagaggagacccctgaaacgggtgggactaggatgggtgaaatgtaatcatcttgaccatcctcaattcactttctcctgtgttcctggcactgttctggggtggggtcacaaagcagcactcatgtcatctctccatttattcctccattggttcggcaggcactgtgagagcattgcctatggcaggcgctgaggacacagagatgaagggcgtggcgggagctcaggagcctggcatctggctggtgggcccggcacacacacaaaggatctaagtcctccagttgggcttcctagttcctctataaccagaagcgaggctgcctgtgggcacctcaggaattctgccaccatccagttcctgctcactgcttaaaaagtctaaataattggaaaaaagtgatatgatctgtttaatacaaccatctagttaaatgccacagagttcacctactcttcattgtcacaggtaaactgcgatgtcttcttctgtaacggtagccctgtgctgacacagtctcgggttgctttctgtaagcgtcatttgagttaaatatgtgaagaagtgggaaggaggggcagacagcctcactgcagggctggacccccatcctgaggatggcctggcagccttgatgatggtggctagttgcatgtgtgtgagcctcagccacatgaggaagacgtttggaatgagggcacgtgaaatgatgggtccagcgtcgctttaggggtggggagccattgctaagggaggtggtgagagctgagttcagagtatctgaaatataaactctaagaaagatcgctcctcaccaacccagtctaagtcaaaaccatcgcacaccgggactattgcaccggcttgtggtccgtctccctgttcttacccttgtacctcaccttctgccggctgtgtgtgacctgacttgcttccctcccattctttcctagctcattctgccccatccctgggcttcccttcacagattaagtgcatcgcagcctgccctatgccctttgcacctgcacttctgttggtctagtctccccctcccgaacattagggccctgctcaaatgtcacttcctcagacttccccacttaaaatcagaccccaacaccattatatcccagggcctagaaaaatggcaggcaagtagtagggattgaaggaatatttgtgaaggaatgaactgccctaattaaagggggttggggaaagagacctcaggacccaggagcacaagtttggagaggaacagaggacttgtgcaccaagatgttgcctggctactctctgggtgctgagggggagtggaggtcatggagagaggtggggaatgagaggtatggggtgcctgggtcagcgtggctggcacccctgctctccccagggccctcctggctgaggtcatacccgctttcccagcttcccttcacgcttctttcatttccaccctaccagccgctccacaggactaatgaataatgacaggcctgtaattagactgacattggagcctgcgttgtcccagatagttgctctccgaggcgaaggtctggtctcagctcccagctggcacctcggcttttccctccacatccttgctcacagccttgacttcctgcaaagtgacttgcctcccagatcctgaacagtcagataggaaccagatgggatgttgggacatcctgtgtggcacagaattggagagacatggagctcctctcagctggtgccagcatgtcaggcagagacagaatgagtgaagagcccagggctgggatcgtggcactgttgcttcagctcccaggtctcaatttggttttccataacccctcaaaatgttggccaagatcagccgttttgtactacgcatttggaatactctgggaatgcaagttattgagttctgcatgaaaccagaagcagcaagaagattgtgatcatcacctggttggcaggttttcaccaaggtctgtggacacctgtggggcttctgaggggagcaaagggcacagtgcctagcacatagtaggtgctcactcattattgactgacagacttgagaaaggtcttagcatgaagcacatctcagtgggaggaagtggccaggacgtggggagctgggacacttgtgcagacaggccagggggtggctccaccctgccccttgaagcctgctcttgttcctcctgggaatacctgacagcagcaattagcaggaggtcctttagtgtccccctctccactgcatgcttcccccactaaggcagggatggtgcttcatctgagtgacacctcattcaaatgggaatgagtcctcagtctcatccagagtggaagaagcactcgttgtctcctgattctgctttaagaccattgccatcgctctgacgagccacgattgtcctagcctcaatgggggacatcatggagaagaaggtgggcgcaatgagtcacgcaacagcagaggctgaggaggggagcaagggccaccagaaaccaagaaggaaccccagagtgaaccccactgaaagaaaaccaagagtcacagcacagcataagagaaactcgtgtctcgctgaagtaatgggaacttcaaatgtagctcttctaggagtggggatctgagcccctccatcaagctggctcaaacattcagcatgtgcattgatctcacgtaaggagcagtccagagcagggaggggcttcagggcctcacagctgagagcagcaaaggcaggattggaagctggctaacaggtctgggaccctgacatgtagcggggaggcctgggcaccttcctcagctcaccctgctcagcacaagcccctctgggcctcagtgaggcaagggtggcatcacagcctctgtggagatgggatggggctgatggcctgtgtccttagctgtaaggctgaccataacagggatgtctgtgggggaagaggggaggcagccttcacagaggtctggggtggatgcagggaccaagtcttgaagggatatctggaacaggagcaaagtgagctatcgggaaaatggggttgtgggggtaaaggacccaggcctcagggcagggcagatgccttatgaactcaaagaccacaaaagaaggaaagaaatttcacagacaggggcaagtatttaatatctaccatctctttaatccttaacatagccttgtgaattgacgggagaaaacagacagagaaccgttaggtaatttgtccaagatcattcaactgggaagtagcagagctgggatttgaacccgtgcccagagccattgtttttctacttgccagattggcgagggtcatgggggaagctgctgctcagtggacatgggtgtatgtgagactcaccccatatgcattagatgtcacggctgcagaattgcttccagactccactggctggccagttgggagcccagaactttgcaggctatcttgacccaaactggttgagggtctggatgggccaagggcagatggaaggttctcatccctctgagcagggctggcagaggtggcaggagccatcaagggtattagtctttgtttcagtaaagtggtttatgcattttgtgagcttctcagcaaaacaataaagcagtttatgcatttgtgagatgcggatcagaggtggaatttcctttcttctcaccaccatgatccactttttatttcatttttatcctgagtgtgtcctttctgtttctcaggcggcttccacaagcaacacctagccttttgggagtcctggtgtgctgtcattgtttacttgatttctcaacacctttctcctgcctgaagtgctgcctaacaaggattttaaaaaattatattactgtgatttcccttgctcttttattttctctcttttaacgtgaaaggaaatatgtctttatgcaatccccccacctctcatcttggtggggtgcttctcatcaagtaacaatcctctcacacccctgaaggtgtaaccagaacagctgcaggtggggccaggaagggcaagagtggatcccaagatcctccaggttgacacgtcactcctgaaaacattctgctttaaacagaagccacttcgctgctctgacgtgaatttctataaccaagacatactcttcgacctagagagatcaaggcatgaaaaaatggaacttctcaaggatgaggaaacagactttgagaggtaaaataacacgacggaatctatgcactacctgatggctgagctgggacttatccccaggtccagtggcctctagagcacaggtgtgttactaccaccccattctgcccaagtgaagcaagcagcagagaaataatatgcaggtttgctttccaaggaacccaaatgaagatagaatgactcaaagagaagatgtatagaagtacttacagcatgtggcacatggtctctgtgcctgggcaccaagcagactgtggtatcaattacagtggaccctgtgcatccctcagccatccaggcaggtgcagacactcctcaggctagggatagcctcaggagactgactcagccagaaggttgccctggagaagaccaggtagtccctgttggcatgctcagaggacgtgtagatctctcatggatggtcaggacaatcaccagtaccaggatatctggatcaggtaaaagatattccaagaggaggttcagttcagaaggcaaatggggcagcaatcagcactgagatccctgttcatacacaatgggtaagagacccagggacctaattcagcccaagggaatgggttcaggtggcgtctgggtgagaatcagggccagcgaccatcatctgggactgagaggacaactcaattcagaggcagaaattcagatttcttgaggggcaatctagcatttatctttgaattagcatgaattcttatagaaatgcagtgttgctttatatgtatatgattttgagtttacacaaatagtacagtattatgaaccttgttctgtatttcactttttaaatcctagcactgattttttaaaaacattttctttcaggtatatttgtttatttatttacttatgtataacttttatacagtaacatgaaaaatattaagtgtgtagctcaatgaatttttaataacagctttgttgagatctaaaatctcaatcactgatcataaaattcacagttttaaagtttcagtagtttttggtatattcacagttgtgcaatctttaccactgtctaatgcagaatatcttcatcacccccaaaataaatcctgtacccattaacagtcacttcctgttcttccctgctcctcacccgtgcacccattagtctactttctgtcttatggatttgcctctgcctctgtggatgttggatatttcatataagtagaatcatatatgacctttcatttctggcttcttttacttagtataatgttttcaaggttcacctatgtcgtggcatgcataagtacttcatttctttttactgctcagtaatattccattgtatggatataccacattttgtttatccattcttcagttgatggacatttgggttgtctccacatttaaggtattattgacatgaataatgctgctatgaacattcatgtataagtttttgtgtggacatgtagtttcaattcttttgggtgtatacctatgagtggaattcctggatcacatgctaattatatctttaacattttgaggaactgccaaactgttttccaaaatggttgcaccattttacattctcaccaggaatatatgagggttccaatttctctacctccttgccaacacttgttattttctttttaaattatagctatcctagtgggagtgaagtggtatctcattgcacatttttttttgcattttctgaatgactagtgatgttgagtattgtttcatgtgcttattttagtgaccatttgtatatcttctttgaataaatatctactcaagtgttcattgaattttgacatgtgtcaagttaccctcgtgtaactatcacccaaatcaagatacagaacatttctacctccctagaagactcccctgttcttcttcccagtcaacttctttccccaagagtaactattatccatttttatttatttatttatttatttttgagatggagtctcactctgtcgcccaggctggagtgcagtggcacaatctcggctcactgcaacctctgcctcccgggttcaagcaattctcctgcctcagcctgccgagtagctgagactacaggcgcatgccaccacgccctgccatttttttttttttgtattttagtagagatggggtttcaccgtgttgcccaggctggtcttgaactcctgagctcaggcaatctgcccgcctcagcctcccaaagtgctcggattacaggtgtgaaccaacatgcccggcctgagtaactattattctgatttctattaccatagactagttttgtctgcttttgaacctcaaagcaatggtactggatgaggttttttttgtttttggtttttttttgacagagtttcgctctgtcacccaggctgaatgcagtggcgtgatcttgactcattgaaacctccgcctcccaggttcaagggattctcctgctttagcctctcacgtagctgtgattatgtgtgcaccaccatacccagctgatttttttgtgtgttttggtagagatggggtttcaccatgttggccaggctcgtctcaaactcctgacctcaagacgtccacccacctcggcctcccagagtgctgggattacaggcgtgagccacagcgcctggccatggatgagctctttaatatctggtttcttttactcaatacagtgcatgtgaaatttatccaagatgttctttgcttttttggtcattactatgtagtattccattgtatgaacatactgcagtaggctcactcattctactgttgaggttgatttgggttggtggtagttttgggctatcacaaataaagttttagcactttgaaaagtctgttcattcagctggtctctccaagagtacagattagctacctgggtctcagatctggctgccaccagagacttagtgatggggacacacctgagaacccagtggcagtcaggctgggatgctggtcctcagtctgaggagggtgagccagttgcagggtggtggtgtggtggcatcaaagtgctgagctgtgacttgacagaaaaggtgaaggtggaggaggcagggggtttgaaggctggggagcaaccctggtggagacaagactgcagttactcacttctagagatgagtcagagatgagccaaggggcctcacctctcccaaggaactttaatcatgcagtgactggcatggggaccacagacttgcactcatgtgaagggccccctgggcataacacagaagaacacagtgtgcatggtgtccctggaactgggctactcgaccctgaaggggcatggacatttgtgggaccacaagcaggaaagttccagcattttcttaggcttagctgtgtctatgaaggtaaaaccaccaaacaaaatgagtattttcctagtgccaatgcagagcctacccacgcacagtccttgggcagatcaaggctgtgcgtgttctctcagccagaactgcactctggacatgagctacagggtgacctcatgagggtccattgcggatatgcacatggatgttctgtgtagtgatgctgtggcagctgggattggaggcaacacaggtgtccatcgttagaggaatagagaggtggcatgtggcagaacctcctgcaaactctgagcagcagccagaatgatgaactccatctgcacatagcttctctgctagacattttgaaatagtgctgaaggtaaaaaaaaagcaaagtaaaaagaacagagtctgtaatgcaataccatgtgtatgaattaaaaaggcatgaatatacaaatctaatctcagggtacactacaaaagatagagtggttgcctatggtgggggtggtgaagggtggtaatggcaatgtgggtgggagaggggtcctgcatgatgatctgagaaggttgagtgacctggccaagacacttaacactcacatacctgcacagaaagaatgggagggaggaaggaagaaaagaaagaaggaaggagaggaggaaaagagaaaggaagatagagaaaaggaaggaagaaaggaaaaaagaagggaggaaaggaggcagggaaggaagaagggagaaaagagaaaggaaggaaaggaaaatggaaggaaagaaggaaggaaggagggatggaagggggaagggagaaaggaagaaaggaaaacagaaaaagaaggaagaaagaaaaaagaaggaaaggagggagaaagagaagtcacttctgctctctcagacttgctcgaggaccttcactgaggtgggggctgccagtgtaatgttcaaagttgttgccatttcccaggagtttctggaggggcagggagggctgaacggtgcgattccaaccacccaaggagaagggaattagcagtgctctcctcctctcattaattgagcactcatctgggcgggcctgggcttactaagtttccagttcatcaagattataaatgagatttctcctccttcctgtggagcaggttgagatttatactgcatcctgggcaaaggattctctgggcttcatcttcctttctggggcttctttctttagaaaggtgggttgggctcccttgaccagagaaatcccaaagctgagagagtccttctgcccacccccagccctcccccaggcaggagttggtcctgtgagggaaacaggttgtacctaagcttctgccattttctgtctcatgtctgtccctccatatgccccctccctcagtcctgcccccaccctacctcacatccctcagcaagctctccactcagaccctagctccagttctggggaggggaggctggtgcagagtataggggatagcgcaagtgctcttcaggagccacagacagagatctgcttaccctgagcacatggcagctggggcgttcttcttgctcgcctatttgtgaaggtctacccagaggaaatgggctatggcaccacaaaatggtccaactggaagtcaaacatgagacactagaaagtatcctacaggctgcagtgcttgggacttgagacccctgccaggaatccccaaggagaaaagaggagttcatggacttgtggccttgagcctcttgtgctgtcacttatacccatttccatagaattacagagtgtcggtgctggacactagacagtgtaacatcgtcttgtccaactaccactcatcatgtagaagggatgtgaaaaggaaggatgcttcccagggaatgtgggaacagaaggaagccacgtctccctgtgccatcctagactaccgctgtgtgtgtgtgtgtgtgtgtgtgtgtgtgtgctcacacacacacgtgagcagctcctgccttgacctgagcctagagtgttcctccttggaaggggaccctatttcacaatccatctggtcctggagaccagtggggctaagttttgtttagggatggggggagaaagcaagtgaaggagagacagagaaagagatgaaaagacagggacaaagacctcttgacagagagaaattataaaatagggcaagaaagagagagaagagcagacacagggttggagaaaatgaagaaggaggagccagaaagagaggaatgaagggtgaccagcagaccaggcagagctcacagcccaccctggcatggtttctctttgcagagggttgctctccccatcaccaccctcctagtcattctctggagcccctggtcataagtgggtattagcttagcccagtgcttgtgttcaactgtcatccaagctgagcctcccttactgcacccacaactacctggttaagtaaagccttaaggaggggtggcagggaggaggtccatgtgagccagtgccctgggtaactcccaccgtcttccttgctttcttcctatgcctgagaccagagcctaagcaagccagtgtgtgctttggccccagaatccctgttgggggcagcaaaggagatacaaagtgatggaggaagcacggtggtagccctgtggcttcagtgaccctgtgtgagacagaaatcagggttggactggaagaatggggaacaggtatttcctgcggtcctgctgaacagtggctcaaccagtccacccaaaatgtcagaagcagagaaactgtaaacatgaacagcggtgccatagcaagagctggcctgtggaggctggcactgtgagcccaggcacagcaccccaatgtacaaagagcccccacttatgagccatgtgagggcaggcaaggtactttaacttccctggcctcagtttcctcattgtgaaatggagctaataataataacctaacagggttgtagttatttaataaaatatcccagcactgtttctgttccctagtcaatgtacaattcacagtcttttcccccattccctatgagaaggcacgggagcttctagactctgggcagagccccagacacagcagtcaggatgctcagatggagaagaaaagcccttaaagctctctgtagcagctagcgctacctgtgtttggaaggcagccagagccccacagacatgcatgggaacacccaggattgtaatggaagaggtacaatgccaatcatttaaatttaggtgttcttggtgtcctaatttgatggaagggtaaactgaggcagacagtggggaaacgatagataatgcagagtgaacaagtcttactttggaaaaaacagtttccctggtgggagaggaagggagattgtgctgtgactatcacccaactcaaatgtggaacccaagatgggcaagaagctcaggtggggctaatgctgtacaaaacacctggttagctccgataagcagctgtcccaagccaggactctgccccggctgcactcatccagcccggaggggccatcagtcactcctttcttcttgctcactctgtcttcatccccagctgtcaattcatgtgtctcaaaatgacacgagttaaacatcttaaagaactagggatttatcatatggcgatgtcaactcagaaagcagaaccagggatttgtatctcagtagtggatgattacagttttcttggtgctatgaaagccctatatcctcatgtgtcatgatctgattaataggcagtgttggggttgaattacatccccccaaaagagatgttgaggttctaacctgtgaatgtgatctttttggaaacagggtctttgaagatataattaaggtaagatgtggtcattagagtgggcttccaccccatatagctattatctttataagaagagaagacagagagagagaaggaagatggtcatgtgaagatggaggtagaagttagaattatgcagccacgagccaaggaattcctggggctaccaggagctggaggagacaaggaaatattctcccctgaaggtggcagaggaagcatggtcctgccaacaccttaattggcaaccccaggaaatgaatacagtaggaaaaaaaatatttaagtgggaggaaggaggctgggaggaaggagggaattctgtttaagggaaccctggaatctcttttcttctacccccatgtctttttctattttctatcctctacctcctttcaactcttcagccaatggatctttaattcttaatcaataagcatcggtgtcctgcctccatgtgcctggctttgtgaaggaggcagaagcggcacagcgacgtgagttgaactccttgcctgttgacctctagcctcccgaaggcagttcttgggagtgggaaagggtgccagctccagggtcagagcacctgggcccaaatctcgctgtctgggtgacctcaggcatgtgattacatagcatgagcttgcttcctcctctgcaaaatggggaaaataacacacctattttgtgaggttctcttgagaattaaatgagataatacatgttaaatgattagtacaagcaatcaatcagcattaattattgttatgactgttattattagcgtagggaaaagaacatgaacagcattcagctgactacaggataaagtgtgataaatgctggcacaaaggtgcagatgaagcatttagagaagaaagagagatgaattatttctacccagaaatcagggaaggctttgtagaatcacagcatttgaatagagcctgaaaggacgggtagatgttacccagtggagaaagggg

SEQ ID NO: 2831 - DNA, 2934 bp, Homo sapiens
agatgatgaaaatgttctgtctattcttgctttggaatttcagataagagtagtcatattacaaagcagagataaaaggagaaagcaagaaatcattcaattgctggtaaagtaatactctacacagcaaatcacaatagcgtgttatatatagaaataagatcagtcactgttttcaagcctgctaaataaaactgaactcttggaatggcataccatttgacctttcaaaggttctccagcagtatttaactgatgcaaaaggaacacacttgcaattttctacttttgacatgacagaccctcctcttagttcacacaatgttcaaaaggcacaagtccctcgcttcggaacgcaagagagcattactttcccaaagagctacacggttcatactgaaggatgatatgagaaattttcactttttgtcaaaacttgtactctcagcgggccctctaagaccaactccagcagtcaaacattcaaaaacgactcactttgagattgaaatatttgatgctcaaacaaggaaacagatatgtattctggataagaggtgacacaatcatctactattcatgatgttaagcaaaagtttcacaaagcatgtccaaagtggtacccttctcgagttggtctgcagctagaatgtggcgggccttttttgaaggactacattaccattcaaagtattgcagcttcctccattgtcacactgtatgctacagacctaggtcaacaagtcagttggaccacagtgtttttggctgaatacacaggacctctgctaatatacctcctcttttatttgaggatcccatgtatatatgatggaaaagagagtgctagaagattacgccacccagtggtacacttggcttgcttctgtcattgtatacactacatccgataccttttggaaaccttatttgttcacaaagtttctgcaggacacacacctttgaaaaatttgataatgagttgtgccttttactggggatttacttcttggattgcctactacattaatcatccactatatacaccaccatcatttggaaacaggcaaatcacagtatctgctatcaattttctgatttgtgaagctgggaatcatttcatcaatgtaatgttgtctcatcccaatcacacaggaaacaatgcctgtttcccaagtccaaattataaccccttcacatggatgtttttcctggtttcatgtcctaactacacctatgagattggatcatggattagtttcacagtcatgacacaaacactgccagttggaatttttacacttctgatgagtatccagatgtctttgtgggcacaaaagaaacataagatttatctgagaaaattcaattcatatattcatagaaaatcagcaatgattccattcatattgtaaaaaaagaatcttatctcctatagaaaacagcaacatataaattcaataaataagacttagttaaggatagttaactattatactccaacaattcatgagcaacagtatatacactgagtaaaaatataaaatagtaaaatttcactaaatttagagaaatgcacatggtaataaaaagtataaattataaatgcaattaactaagaacagctctgaatgtatttgcatgggattggtccttgaataaaattgtcttacttcattaatacttcacaatactatttgcataagacaaaataccacagcaaaaaaaaaaatctgattaacaaatgaaaaagcgatctgaacagacatttcccaaaggaagacatatacatggtcaataagtatatttttaaaatgctcaacattaactattcatacagaaatgcaaatcaaaaccacaatgagatatcatctcatcctaattaaggtgactattttcaaaaagacaaaaaatatgacagccgtggtggttcatatctgtaatcctaacactttgacaggccaaggcaggggaattgcttgagttcagaagtttgagatctgggcaacatattgagactctgtctctaaaaagcatattgagactctgtctctacaaaaaaattttaaaaagtaaaaattagctgggcgtggtggcacatgccagtaggtagtcccagctactcgaggttgctccagctcaggcgttcaaggctacagagagccatgattaaaccaaggcactccagcctgggtgacagagtgagactgtctcaaaataaaataaaaataacatattggtgaagatgcgggaaaaaaaaaagaactcttagacactgctggtgggaatgtaaactagagcagccatgtggagaacaacatggactttcttcaaaaattacaaatagaactatcatatgatccagcaataccattactggaaaaaggaaatctgtatattaaagagacatttgaaccctatgtttactgcagcactattcacaatagccaagatataggagcaacctaggtgtccaacaacagatgaatggataaagaaaatgtggtatatatacacaatagaatactatgcagccataaaaactgaattcctgtcattcaggacaacatggatggaattggagggcatatgttaagtgaaacaagccaggaacagaaagttaaacattgcatgttattacttatatgtggaagctaaaaaaattgatatcatagaagtaaaaaataaaacagaggatactacaggctgggaaagctgcagcaaagggagactagagagagatttgttaaaggatacaaagttacagcttggtaggaggaataatttctggtgttctataccactgtaggacgactatagttaagaacattatattccatttagtttcaaatagctaaaaggagattttgtccccaacaaaaagaaatgataaatatttgaaaccatggatactctaatttctctgatctgacc

SEQ ID NO: 2832 - DNA, 1848 bp, Homo sapiens
tctgtgtgcatgtgtgtgtgcacatgcatgtgtgttcacgtgagtgcatctcatctgtcacccacaaccaggggagcggtgcttgtacaacgtggcttctgcaaccagcagcttctggccgtgcagctccctgtagggaatatgagttaatctggatgtcagcctaagatgtagtcagggaggtaagtgtgtgggaggaggccacatcccctgtgcctcaagccggctgcttccacagctgcctgggccagcagcctcgccaggggccgggagcagggcctgggccccccctcttactttcctggctgtgttaccagggccctctccgccctctctgagcctcagtttcctgtgaattaagggcgttgagcccattgttcctgaggaatcactcatctctgagcctggcccattgcctggcattccgtgggcacccactagatacttataaggggagaagttgttccagtccggctggccagtggaatccatgcgtcttgggccatttgaagtgagtgaagggctgggtgcggcccacctggagctggactggaggctgtgttgggtggggcggtgtgacctggaggtgggctgccccctcaggagacagcttcacccctgtgagtggacctcatccttccttccttccactcacatggacagcacatctgtgtgtagacagggtaggcctgtggggggagtgggacagaagccccccccatctaggacctcgacgcagaggctagtgtcttggggcagaattatccggtgtggggggcctcagttccctgggctttcacttgcctcctgaactcctctcccctcccatcctcacccccagagtggtttttgggaggcacccctggacgcctccctccctcgcagagggtcctggtttctgttgcctcttagaacagtggccctccctgctgttttcccaacagcacccgccgtggtctgaggacactttcttctgctcctgtttattgtttatctcccccaagcacaagcagtcgagttaagacaggagcctcgttcaaagttccgcccggggccaggcacagcgcaggctctcagaggagggcccaggaaggctgcggcggcgcgagacaaaagtcggaagacaggaccccgcttgaggagacagcggccaaccctccgttccgcctggtgccttgctctgaggaggaatttggtggttcagtcggcccatccgtggacaccataaaaacaaagagacacacacagatgcacacatagatacacacagatacacacagacacggatatatagacacacacagatacacacacgtggacacagacacacacatagacacagatatatagacacacacagatacacacacgtggacacaaacacacacagacatacccatatatatgcatggatacacaatacacagacacacagatgatacatgcatagacagatatatggacacacacacacggacacacagatacacacatagacacactgagcctccctgggccctcccttgtggctgtcggggagggcacctggagaggacacacagccccatcagagaccagggagtggctctgggagctcttttcgtccaaaggggctggagctccagttagccaaggtgagcgccaggtggtgacaggaatgacagcagggagggctgcctgtgtgaggggattgctgtcttagaccacgtggcccaggaaggcctccaggcagcacagaagctggtacctgagggctcagccccgtggaggcctgcggggtggaaatgccaaggctggggcaggggcatgtctgaccgagaaggcctgtgaggtgggcattgtgtgagg

SEQ ID NO: 2833 - DNA, 2882 bp, Homo sapiens
ccgcaatgccaaaaccagaatatgcactggattcaagattttgttccaattgtcatattttaaactagaccccaatgaattggaaggatgaccaaatgacagccctgtttaaaacttcaatttctaaaagcaaaatcaattacagaaaaaaatattacagagggattatgtgtgcttatgagtgtcttcatgtggtctttctccaagtttaaccaccaaggactttgagagctggcaggtctgagtaaccctggagacaattcactttatcaaaacctgagctaaaaacaacgcatcagctgatgatgaccgcagagagtggcaggactgaggacccaatatttgttttccagcctggtggagagtgaatagtgaggttccaaaactaaacaagggaggtcaggaaaactttccaaccttacctaatggcttctggccaaagcaaggaagtgtcatggaaagtgttgggtggtgatggtgcaaaaggaacttgaggaggagggaagaaaaagcacccctcaaagctggggaagagaaaatatggagaaagccctaaattcctcattgaaggccagtctcggaagtggaggggttatgatctgtgcttcagtcaaagtcatcattgtgcagagccttgctgatattctgtgacagacccgaatttactacacgtgctctgaagcgatcaccttttctagagtttcttctgcctgctttcaaattggatgacaagaagcaaagaccaacagatcctctagaccagtgtcagaaatgagagcgaccttcgagagaaaacatccagttccagagtgaccagactttcaggataggaaaactgaaaacaaaattctgagcttgcttttattttgctaagtaaggatgaaaatttttttccacttactatcactatttcataaacgacaggatgttttaacactgaaaacaaaggtagaaagaatcaacttttaaactgaatggcttcaactctacaaaatactgtatttgttttcttcacctcacaatagcctggtatttgacaaccactgatgtggtccaaccccttattataagatgaagaaaaaagttcataggaggaagtgttttgcctgaggttacaccaggccagccttttcctggctttacagggactaatcacccttgggttccataggtcttggaaccaaatgaactaaggaagctctaaagatgaaggatgtgttggtcatctatttattgcctcacagctccaaatgcactcttcaatacctgtaatatacaagagaattcctttaaacatttctccactaaagggagtgtgatgttaagatttctcagtagagggcaatggaggcacattccaggagaaagaggcttccccaggtttctgggcgaggctggtgtcagccctgtgagtgtgaagatctccatccagtggagcctgccccagccgtgggaccagaaaaaccatccatctacaaccttacagcctcttctcatggtaacctttccatagctctcttgacatggaaaccaaagctcctgcctggctcacacacaggtacttttgcctagagggtcatacacaggataaccattccttctgcaagtttccatgtggcccacaagctctgaagtcctctgccctgctggtgtccaggctcctactgcatgtccacaccagtggctgctgactgactgcctgctctccagccacactctagaggttagctgttgcttacctagcaactggtagacccgccctggcctggccaaaccatctaacattgctgcttatccagtgggctgagacataccttctccaacgaggtctgaactcctcctttgagtactctctctgaaccctcgcatactgtataggatttccttttacctttttttttttttgaaatggagttttgctcttgttgcctaggctggagtgcaatggcgtgatctcggctcactgcaacctccacctcccaggttcaagcgattctcctgcctcagcctcctgagtagctgggattacaggcacctgccaccacgcctggctaattttttgtatttttagtagagatagggtttcaccatgttggtcaggctggtcctgacctcaggtgatccacccgcctcgacctcccaaagtgctgggattacaggcatgagccaccctgccaggccccttttatcttatagatactcctttatcatagttaatagttctttgtattaaacttcgattttatccactatgtgatttctatttcctgattggacccagctcactactgaagctgagcatgaagagctctgtacagccttctgaaaaggcacaaagacaagaggttgctgtttgatgctcaaaagattcatgcttaaaaaatgaaaaaagaccatttcttctcattctattatttaacaaattcatacaacatcattatttatgtgcaaggcactttgggagataagtgcataacttggaacaagatgggaagagatcagtgccctaagatggcactgataggggtgggattttagctggaagagacagcatttgagaaggactttcacagataggaagaaatagaacatacaggaggaaaatcagagggggaagtccagatggaagaaacctccatgccttttgctcagggcaaaagttgctgcagaggtggtaacgtggaatgtgtagaacgtgttcacctgtttgttccatttggctagaactttggatcatgttcttggcaccaaaagatggcatttgttttgccattgccaacctttatcatatttagcaagaaatggtaagacctataggaaaggaagggaccttaggaagttatctaattaacagtcaggctgtgaacaatcttgaatgtcac

SEQ ID NO: 2834 - DNA, 1771 bp, Homo sapiens
cactatttgccaatatctatttaattgtagcaataacaggaaaaactcccaaatccaaccagctagaaattctctggctctcttccactttagtggaatcaaatttttgcacttgcggtcatctttatatatgagaggagagtgaggctgggagaaacttggtgttaaaaataaagcaaagttacagactctcactctctagagctcatggaagattctggctttttattattaatgattagcattgacaccatcccccaacctcaagagcatgctgaggatcttcagggaactccagcttgatctgggcagctgccagggttgacatctatctgaagattctgttctcctcctgcccatcatgtcaaggtaccatgcagggtgagtcaaatgcaaacagaaaatatttagaacctggccagtagagcagaagtcaccgtgaagattggacttggttgtggtgttatgggatcctgaacagaagctaatggcagctgaaaagaaaaccacatgtggataaagtagaaagatcatcagagatgagctaccgatggtcttttgagttccatttgaaagtaatattatggagaggctgggggagaaaaaaagagtaaagtagtgacgaacttggcaggaaaatacaagaagctgagaccatgtgaattggagtatttgggggacactgaacatgccaggcatttctgcgtagaacagccaaaaatcacccaacttcatgattccacgttgtcttacctgttcggctcatcatgtctaggtgaccagaggcaatgtaaccagaagaatcaaatgggaatttttattaaggaaaggagccatggccttgacttggaaaacagactcaaacaccagcgctcaagggcaagatgaggctcaaagtggaagaatgagcatgaagatcggaagccagaagaagcagcgatgagtagagatgccgcacacatacatgatcagcacaggcagtgcaggacaaaatcatgaacaagatgaaagcatgaacacccagatgaatatggtgccagtcacagtacaggaatgacgcatgttctgcaacttcaatggcgcaaggaatactggacctggatggttgatataataacatagccataaagtataagaagcagatgggattgcctcaagatgataattttgattattcaacattgttatgttcataaatacatctttgtgcaacatcttcatcacagatggcagacacttgacacatgtgcggtcagtggcagggattactaattgatcacagttgttttttccccaaggcttggatacagcctcaaaattcttctcaatgtagtcatccagtatgttacagatagttcgctgtaattggtatataaagacaaacatatatgctatcctaatctatagattatagatattgatatggtttggctctttgtccccatccaaatctcatcttgaattgtaatccccacgtgtcaagggagggacctgctgggagttgattggatcatggaggcggttttccccatgctgttctcatgatagtgagtgagttctcatgagatctgatggtttaaaagtatttggcagttcctcgccacccgcctcctgccaccatgtgaagaaggtccttgcttccccttcgctttacaccatgattataagtttccggagacctccttagccatgcagaactgtgagtcaattaaaacttttttcttcataaattacccagtctcgggtagtcctttatagcagtgtgaaaaca

SEQ ID NO: 2835 - DNA, 6865 bp, Homo sapiens
agcctcggaatgtccagcaagggcggggccagcctgcgaggccaagacctcttttcactgcatcagaagtttaaatccagttgagccctctgacttgcacctctgtagtggtctggcctggggaagactggctggggtggacagaaggagggcgggaccctcagagcaatcacccctgacctccaaccctggccaagaagggccagcccctgcctcagcaccttctctctgtaggcggtttctctcccaagacatttgagacttttgccctctgcctggtcaccttctttcctagccaggatagggctggtggatggttttttccttaaagccaattccaaacaagggctgatatttagttggcctttctttttcttctctcatggttttgtgggttgctggcactttagggactctgttcagagtggagcctccttactctacagctcgctggtaagccctggtggcccatcagcccacagaagggggcactcactcaggtgagtatgaatattcacactccccaggataaatatagactcgaaataatagtttctagtcagtttgggtcagattttcccactcagtgacaaaaacaactttcattatccagagttttgtttgagttgagaattttgaataaagggtggtgggtctgcatcaaccacagttacaatatgcaagagctgggtcgtgacttcatccctttggtcttggtgggacatcaccctgaccggtcccattgccacctggcacatgatgcacctcagtcgtcagcgtgtgcccagcccagggccatgcagagtgagcactcagggaaggcgcatggaactggactgggtggctggtgtgtttggtgataggttagctctgctgtcaaagccaagcccaggtgggtcactgtcacatacccagcacggtgtgaggagctcctccagccactctcaggggcagctctcctgaccctgcctccttgattttggaccaggcgcttttgtttctgggccaagcacctgcctgtagcaatgggtgtggggacttgggttttgctttgctagtggagaatatggctgggatctgggttagggcagaaagctcaggtagatgacaggtgccagagcagtggttcaaacttgggagaatcacagcaggagcctattaacaatgcagattccagggccgtttgtgtgattgtgaggcaggtggccccaggattgtgctctggttgggtggaccaataggtaaagcacagtgtgatgagctttgggatgggggagaaggaaggggctgtaacccagggagagtctggggtcaaggaaggtcacccagaagaggtgagctgagtcttgaagaacaaagcaggaatggtaataatagctaatcttgattgaacgctttgtgccaggcacagttctaagccttttccatgaatttcagtcctccagacaacccctgaaataggtagtaaccccagactcacacaggaacagacaaaagcactcggggttaagttgctggcccgaggctagtgagtggtgagctaggtcttgcctgcttattgcacggcaccacgtggggtaaggtgtgccaggcagcgggagcagctcagcacagtgatgcaggtgtgctgttcagtggttcagatgatgcagaacctagtgtggggggactgcttcagttctgctttgttggtggagaatatgtctgtgatcttggttaggacagaaagctccgggtggatgacaggtgccagaatgtcagtttgagagggctgaggctggagctggcaatcgggatagcaggcacacttcctcacagtctgaactggaaggagcgtggagtgttggggagaagatgcagtgtcagtgcccagggtgcagcgaggcacgggctggcaccctgacccagcccccttcccagaggggaagaattcgctatggcccagcccctgcccttggggtctgaggggatccacttttgttaggagcctgctacacactttgctttctttcgatccttacattgcccttccaggtgggcttattattcctattacagataagagagctgaggctgggaagccgagtaatttacacagggtcaggtcatacagcaagttagcaggtagtggtgccagcagctggctgtcttttgtggggatgtgttttcaccacagcggtggcaacctgtgtcctgacaggccaggttcctgcatggacagtggggcccccaaagagcaggtgcagtgccaggctggacagattccagctgtgccggggccttgggcaaagtggcctggagacacgtttcctgttgctgggtgacattccacaggtgggaggccaggacctcattccctaggggccttcctggtctgggccctgatgccctgagttgaccctctactgccctggaggctcacctgggcctcgggacagaagggattgtcccattaaggagaatcctctacgagtctctgattctggaagctcttgttttttatcctcccatacaaaaaacaaattggccaccagtccttctttttggccactgtctcaccatctccttcacccaaccttggtttctttcagcctgtgcttcccagcagagcctgtgggcttgttgatttgaacccagaaaccacctaggacattccagaggtctgtctttgttgcccattgtaggccgttttcatagaagggtattgggaggacctgccttcccactcaggccaatgtgaagctgttgctcttttgctaagggcagggtgggatatggccgagaattggtgggcgggcctgagatccattcagcagcaccccagggcgtgctgtttctcacaggttgcagcctcttccagcccctttgctttctgtgacagagctgaaagtctcatttcctctttggctttctcctgtctgtgtgccgttctttaagatgggctggagagagtcggggcagctcttctcccgggttttcaggcctggctggtgtttttgcctgaatcaggcctggcctcaggcctggttacaagaaggttggaggctggctgtcttgtgttcatgtgtcacgccaggcctgagaccatcattgtctctctgagatggtccacgcccctcctgtgaacacaggggctacagactatagtccacgttcccgagttttgggggctgattccaccagctgggttctgagttggcggcccggcatcggagaaaattgtggtcagtgtcgggtgagggaacaccagcttcacctcggctcatctgggcgtggcagacgactgcttcctcacctggagagtgttcaaggacagcaagaaaaatgagggactttcaggggcagctgtgttttctgactcagtcataatgcccctaaaaatccttattgttcttgcagtgtgcatcgggcagcggccagcaacctgcctctcacccacctggcccttctgggaggaccgggacttcctggggtcagattggaatgtacgtccaaaataagagtgaatggggatttgctgattattaaaacaattttgtttgcgtgcatttttagcatcttctcttctgggagggtcgggatggagcccaggagggtggcagtgaaggggaaggtcatcttccgggtcagtgatgttagaggcaaggacaaggagtagaggaggctgtctgagacccagtagccattttgagagggtctttccccctctactgtgaccctggagcttgcttttcctccatccttatttcacttcatggatctcctccattctcagcccctacccctgccctatccagccccaccctgcagatattttgaccagccaaggcttttggaggtcctgggggattgtcgagaagcagaaatacctttttttaaatttaaatcaatttgtgatatgcctgccttccccaacaatgccagtccaccaaacccgaagcaacagaatcctgctctccaggggagactgggggcttgcagttggacaaagtgacaagcaggactcgccccagtgggtccactctatgtcttactgccctcatgggtcagcaggggaagtttacccttgggtctctaggtgcagctcaaaagctctcgtcacttgaccacgtgtgctcagcatttgcagaagtccaactgccacgatcttccctgcagcccagccctggctctgtggacagttttgaaggagctgggtttgctcaggagctttctgctgatggctttcttggtaaggacggacaggatccccgatcagcttccctgccatttgctcccctcaaccatcccctcccatggggcccctttctcctgcccttcattcccctgaacctccttgttcttacatgtgttcctcattctttaccacaaaacatttgcaaaagataatacagattactgttttttcccaattataaaataattgccttctactatagggcatttgaaaaatacaaagggcttccccacccagttagcaggattgggacttttaaaagggtcaggctcataactcatttgagcaatggccctgtgccctcaggccagaaagcctttattttctttttaccaagcaggatatgctgtgggccgctgctggcctctggccaggaagctcagtgatcttgctggagggtgtttgagcagcaccaggtctctctaaaccaggattgatgaaattgtcagtgaggatgccggacaagagggctttatcccgtctgatttataagtgggcggctgcattgcttcttgacctggctgcacagaagaatcacttgagagcattaaaaacatgccaatgcctggtcccatgcagattggatctgaattgctggggaatgaaagggtttttttttttcttatgttcctcagtaagcaatcagaggagaactgttgggttaaatgcccacaagctagagatggaagaggttccttcagaggatgtgaccatttgcagttggcaggctaaggggatcgggggacttatctgaagacacagaatatggcagagatgagatgtaaaatacacaacttctgaccctccagattagtgctgtttcagtagtactagtcattagtattcatgatgagcatatggatcataagaagcatattcttgtgcttaataataattggacacttggtcatcacagtatgctgaggcgtgggtaggggctgccccagcagggtgagtcatcatcccctagtttcccaatgctctgtgtcccctggcctggacccacagctgcccgcagcctgccctgttgcactaatcccagctgtgggcacggtgagatttggccccattttacacatgaggaacaggctaggcttggcccatgtcacccagctctccttgcctggacagaggcatctaggaaggaacacagccctgcatggggcttgcttgtctgagtcctcagggacagagctctactgggggtgcccaggtctctagcagactgtccctgcccctctctccttcctgcccagctcagctccagaggcctggcctgcgggcaggctgggcaggcagccagcgcagggagctaacgatgggtgcattgtcggctccaggaagtggtcagctgttccctggcaggtctgcagagccggaggaccagcctgccttgctcgtggagggtagagatagaatctgggagctcagaacaccattttcccggagcccagtggctctgggccagccctcgggcttcctttggaagggagggccccgtgtactcctccgctccttccttgcttggcattggccctctccctcctcagtctggctctcaccgtcccccggcccagcactttgcagcagagtgtacactcttggcagcgatgtccattaaacctgcttcccagaaagcagcatggctgtacaggcagattcagccagcaccttagtggggttggaagatagccctaagctgccttggccttcctggatcagaagtgccctccaaggctgagacaagcgctttgacctcctgagtacacttcagcagagaactcagtgatgcctggcatggggaagatgcccagtgaatggtggttgccccacacggctcaggaaatgaagtttgggtcacagcctgaggatggtgccttccatccttgaccctgcaaggacaacctttcctgacagtctcctccctgggtgaagtattgggacagtggctctggactggaaaactgaagctttacctctttgctctggattcccatcaggtctagattgctgaggcccagcgcccacagaggcatcttcccctctagggggtttgtcctataagcccggactccgtcagctccgaggcactcctgctgggcctgggccatgtggaactgctccctcccctgccagcttccttggggtgcagacagcccagcacaggcaggaagggctttctgtttggctggactggtggggaagcaattagtgcttactttctgttttgattcttgtagcaaaagcagccttgggtgggtttgaggtctgtccctgatagtctggccaatgtggaattgtctggaggtaggggtgtatgctgacagggtatgaggtggccatctgttggctttccatgcccccttctgataatacctcttttcttcaggagatcacttctcccctaccctgtatctctggggttctggtgtggccaaccccaaaccctggctttagacactggcatgtgttccaggcctggaggccaagtcctgagactctgccatgggacatctgcagcatttttctgagggagttgctgtattgataggatgtaggctgggaactgctggtggccatcctgtcctcaacttgacaaagccaacaaagaggaaagaaaatgaagag

SEQ ID NO: 2836 - DNA, 1963 bp, Homo sapiens
caggaagtaaatttctttccaagagaaaaaagctggaaaaataattgttcctcttgtttagaagatgacagcttttttttttcttcattaagcgcccttctcttcaaaagacaaaaaagggtgagagaaacttgaagacttcagtcctttttgtatctatgactccggaaaggaaagaaaaataaaccatgtagaacctgcttgctgtcctgtcctctgccagccgttggcctcagtaatcggattcaaggatatgtatgacctactttttgaatcactgcagcccaggctgcgcaatttcttatgttctcttgctgagaaaccaacatacaagcagagattgtgtatttttctgtaaaggtagaggtaggcgcttctggaaattctggaaacctttccaagtttacagcacaaacgaccggaatgttaagaagggcttttgttaacagctacccaacactgtcctggaggctttttaaagagcttatctcattgaagccaaggctggggctagcgagaggccaatgagagacccaggtaattttagagtcactctggagggaagattcgtatcttgaaaaattcttccaggtgatttggacatacctttctgcctcccagccacccccccccgccatggctcatagccacgtctccgggattcctcagctctatttctggatttggtcagaaaacagcctgctctgctggattagctcatctctccatggaaatgccaccctggagttatgaggtagtgttatgtccttggcttttagagagataatataagaaacagacagttgaaaggcatttctgaatcttttgcaaagcctgagatgagggcattgtccattatgtgaccaaatgtcacccaaataaagatttctcttcacaatcgcttataatattcagtgctagagaaaagttcaattctccaggaaaacctgaattctttctttttatagataagcagaattgcagtgcccatcatgctgtcatttattttttcattatcttccaggggattctgttcaatccagcaaatattgaatgctagctaccatgtaatatactggattataaagatcaatagggccagttctgggctctgagacacggtctagggaacacagaccaaaatacattatagctatgctttcctcagatgccttttgtaatgatatctctttgttcccagtagtttctgaaaagctttgttctctaaatttttatgtgctatgttgtatttatgtagttttccccagtggaagacagacttttggaggagttttttgttttatttgtttttggctagttgttgtcctatatttcctactgccctacatccccctttcagagcacggcctctttctaaggctttctggtgcaatgcaaccctcctcgatggccacagctgattgactggagtgaacctgtgacctgaactgggccagtcagatttttcatactggaaatttggcgtcggagccctgagaaacaagtcaggtggtctcgggggctgaagctacccctgtggggtgactagtggaactcctggtagtgagaaaaagtgagatgagactgatgatcttcagaaggaaaagtttggactaaacacccagaggaaagctgaaatgagagaccacatggaatgaaggagaacgtgagtatgagcaagcgaaggtgagaaaaacacacggaagcacatgaaagttctttttggcttgttcctattttctctgtgacataaaagggaaggtctttggtggagagtaggaatgggaagagggtgggcaatttgagaagagagagggtgtgaattactcatcatggagcaggggtgtgaattgactgagggaatgtggttggagggacaaacagcactacaggcacgctggaggtttttgtcatgagtttacatggagacaagtcgtcctagctgcatgctttttctctggac

SEQ ID NO: 2837 - DNA, 1538 bp, Homo sapiens
gaaagttttaagacttttgtgattcgatcagatccttctgcgctcccagagttcaagcaggagtaagcaattcctttgacgatatttgggaacctcgctattcacagtaaggaatccattccttcctccccttctgctaagacttggcatttttgtgattaattatatacgatatggcctcctcatatgctaggtttcagtgttttttccaagctccttcttgcttcccaggacttggtttttcctaaagctttatttttgctgacaatgaaatcttccccctcactgcccagaatctttcacagatgttccctctatcaacagagcagcagctgctgcctggacactgagagcccgaggaatccactggtgtcttttcatcttgacaaatattattgaaataagcaaataactttcaaaaaaaaatcccagaagagtctatgtatgtgatcctttccctgtcactttcttttcaaaacttgtcttcattttgatgcttttatcaccagggataaagatttagaagggttccataaattgcaagagaaagcagtaattgccttttgagttcagcataccacgcaaagccaatgtgaagcatggaatggctcagatctgtaagggatgctttctacctagagctcacatttaacactgagcagaacgatgcccttgcagctatgcctgcaagcagagtgcagcacatctgaatcttgaaatcgaggtccattttgctgaaatgaggctagaaaaccatctaagggaaagttatgttttccaaaaataaaaatggagtttgataccaatctattgtacatgctgtttaaataagatgtgaacacttccatgtgattgcaggttttggttttctgtttgtaatgccttcttgcaattttctcatacctgccggcctaaggttaagaaaggcagatgtctccgatgtgatgtcttttattacttacagacttgatatgtaattttgatagagctaagcccattattaaccttgaagagggtgttgtaaagtaagttaaacagtagcttaatatttttatttgcaggaaacacacacaaaattagatatagtaatatctatttatattaggtatatatataaaataagtaatgtataatgtatgttttttatatatacgcatatatatatatatgcacacacatctataaacaaaagtggaggatgaaatggcctacattaggtgcaaagaaacctgtattctagtcctgtctcaaagataattttagaatgtcatttccattctctctgtttccttgtcaatgtaaaatagtgatgatatcatctgacctacttcctttatagcctcaaatgagaaaatgctgtaggaagacaaatttaaatgtaaagtctgggtggctcctgtgcgatacacatgcaggaagaaatgcatgctcgtcctgcagcagacctcctcactctgtaaacattcacatgattggaggcaagcacgatgtataacaattcagattcatgtcctcccaagaggaagggtggctttctt

SEQ ID NO: 2838 - DNA, 577 bp, Homo sapiens
gtgtgtcccttggcgcggtagccaatttaagaggttaggagcaggactctggggcccaccaatctggatttgaaacctagctcctcctggtctagctgtttgctgaagggtaagttattttatctttctgagcctgagatgcctcatgtgtagagcggggagaatagtgactacctcacagtctgttgcgaggaccaaatgaggtaataaacatccggggctgagaacagtgactgtcaagtagttagcatgcctcgaaggccagccattgccatcattgtgatttctaacatcggctttttcatgatcatcctacagagctctgcgcagccagaaatctggaggcagcaatcttgtctcccctttcaaatccagcacataacacaccacttgctccccacaccaacccacaagtgttgactgaattgcactgactttacttgcaaatgcatttcctgacttcagtgtcaccagacctcatcagtctgtggctatcaaatacattctgttgacttcagtaactcaaaagtccatgtccttgtgatcaccaccttgtgcgttgtctctacccgctccc

SEQ ID NO: 2839 - DNA, 1818 bp, Homo sapiens
cctattttgcactgccaaagatacacctttctttaaaatcttgctatttctcgaactatcacagtatttgctcctccttccacttttgactgtttccatactaatcatttctaaataaaattaacacatcaatttccctataagaacaactcttaccatactatttctgttaaaccataaatactctggaattgcttcttgaattaaaataaataaaattttctttccttgaacttcaaagtttttcacttgatactcaaaacctactttgttcatttcatcatgccaatgacatcttccctgacaaatgtgttattagctggtctcaaatacttccagtctttttctgcttccaggtctctatgtcagaaatactcttctttctctatctttcaatgttaaaatccatcttccataatctttaagatccttctcaaatagtgtctcccctgtaaagcaattccagtagatgtaatctctacaaacttttcacagttgcaatggttatcttcagtattatgtaaaagctattttgaggcttgtcttcttccttttgttagaatcttgcaaattctctgaagcccagactttaagttattcatctttgcatcctccattatacctatcacagaacttaagtacaataggacctcagccagtgttccaggaaataaattaaattgaatgaaatttccatacagtgataagaaggagattactgctgcccacggggaaaaaggagaacagaaatgggaaagccgtattgagaggatgtttgagaactgtgaaagacagaaagcagaccagattgccatgcctaaaccactttctttgaagtttatggaagcaccactgcatttatgccagaaggtgaaagtccagaacaggtgctttttggtttgagaatgagtgttctacatactggcctgtaaggcagtgctactccaagtgtggtccacaggctggcagcaacatcataggggagtatgttaacaatgctgattctccagccccagctccggactctgttttaacggtctatccaggcatgaattctactcaagtggcctgcccctcagcagaagttggacaggtgcttatgttgcaattaacaaaaaggatacatgctgggtcctgcagtaaatgtctcccttggatcatgaagtctttttaccatgttactggaacacagaagatgaacaaactgaagctaaagagaagtattatgtgtgcaatggcatacaaccatctgaaatggaaaaatagattgtgttcctatgagcttccataataccatgtgacttctctgacatatggagggttttgagcctgggaatgaggcattgtctggtactattgagaaccaactaacttggagccgtgtatgagccactgggaatagactaaatgagataatcaacgtcttgatctcatattctttcattctacagaaggaagcaggcaacaggttgcaatacgaagtggagttaaagcaactagaaggaagtgtcagtaaccaagctgagagaggctggaaggaaaacaattcatgcagcagaaaagaaagccttttgagcactgtgatgtcagaaggtgacttggaagatgatctaaatgttaaactggcagtgaagaattaaggtggagacagcaggagtcacccgaagaatggaaggatggtgccaatgacttgaaaaggagtttagaagacaccagtttggcttaggttcctgtaatgtgtaccctctacttgttctggctctgcgaggctcagctaacttaaaacttcagagttcttcaaatcttggaccaataacc

SEQ ID NO: 2840 - DNA, 3034 bp, Homo sapiens
agcatgatagcatacaggataaacatataagagtttcctattataggaacaatagcaataaaacttgagttttatggcaatattttgatgcatagtccagacttcctgccagggtatctcctgaaggggctttctgaaatgagtttcgaggactgtgaaaaccctggaacaccctgactatcaaagaggtggaataaagccagcacggaaattactgaggtttgggaagaaaagcaacaactgcctcttttcttggaagttgaaggctgcatgggggtccacagtggctagaccaagactaaaattataactacaaaccaggacaagacagcagcaaggcatcgtttttcaaattagcatgtctgtcttgtttgtttggtgcaatgccagggatcatgaccatttcccaatttggttgatggcatgtgctctccacgcagtgaaactgacttgcaatgaatctcagtgcttcagtgaagaaactgcatggcgagaaaaggggagatcaataagagaaatgcctggtagtgtctgaggaaatggagcctccatgaaaagaaaggaccatacacaatgaagagaaccatgaatgccaacggctcacctcagagtccccaaggtacttctgtctggtaagtatctcattactggggcatcgtttgtaagagctgagacctgggccagtaacagcaattatcaaagtaggcggtcaaatcacccttggatattttagaagccacacttaaggcttcctttctcctcattctgttgtggatttctaaggagagaggcagaacattttagcaaccacccttgtagtgaattgtgtcacttatctggagaatctggtgcattgaatttatttgctgtgttgggacacagaacacacacacacacacacacacacacacacatatatcttattctcttcaggacacatttagggtgtctccatatcgatttcctacaatgtaagggcacgaaagctgggctgtgttatccagccacagggctcacagcggaccatcataacaaggggtgacatctgaagccaccagtcacatcccactcctttgtcctctcacagcctcttagaggcctgcctcagttactgtgttagctgagtggaattgactgtttcagggaaggaagtgaattgtcatggggaaaaaggctagagagcaggatgccagcaatgtctctgctggtatccttgaaatccacagaatctagagttgccaaagaaatattatagcatgcattaaaatactatatgtctttttttcctgatggccaggaatctctctttggtaagaagatggagaatgagattatactctcaactaatatgtcatcgattccttatattttatccttccagtttcacctttcataggaagtaggacacagtttcaggtgggaaagctcctctcaaatgtaaatacatgaaattttattcaagcaacagtcagttcttggagcccacagctgaatgagctcagccttctctgacctcccagccctggactattgattctagagacatggtttacagtttctaatttgggcagtgccatttagtagctgagactataagcccatttcctaacatttcatagatatggttgcactatacacaaaatggaaaaagtaattatacttcctcgtagattttgtcattattaaataaaaataaaatgtagaaacatttagcacaatatctgacacataatgagtgctcaataaaccaaaaaaggttagctgttgtaagcattactctcaagccaatgcctctctccaccctcctctaacataccaatattctacttgcctttactctcttccatggggttcaaatgcccctatgttcttacttcttttctctcactttggttttcttctatgattccaatctcagcccagttaactcttagcattttctggctcttgactcagtaatcactttatgtcaaaatgtttcctagtctccttaaacttgatcatattccttggttatttgttttctaaggaccatattgctttactttagcgtcaaaatctcagtgtgtttcttcattttatgtttgtttcactcatatgacattaaactccatgaaaacaagaaacaatttcttgctcaccattttcttcccaatgcctggaaagctgcttgactcacgggaggaggtcataaaatatatttggaagaaaatgaatgaacaaataaatgctgtcacctgcaggccattctttattattttcaagaaattctgtaatgacccattacactattttgtctgcatcattcagatcacttttataaatatatttaagatagtataacagcttcttccataatagcagcctctgactgaggtattttcttttaattccatcccttccactatccttgatgtacagttcctattggcaagcttgatcattccttcagtcactccttcaattcaaaatgtgtcagaaatggtactaaaagactgagggtaaaatgtcatcattttgttgttgttgcttgcttatgtgtttttatttgtttatttagttgaggggtggtagcagacataatgcatataataaagatagtaaaacaagtataatctaaataggcaaattcaataataattctcagcacaaagaattgcaagagaataatagagagattctcaacatagtctgggagaatagtgtcagggaaccttccagaaggggatagaggaggaaaagcaaagcaaagtgggactagaggcattgagggcatgaacataatgggactccaagatgattgttgtaactctagtgtaaagtaaggggcagggagactgagtcctgagtccagaacattgccgaagtgagagcctggtggactgtgactattcctctgaggagtctctgctccctcctgagtaacaggcattgccagatttcaagaggagaggtactgtaagattcattttctgttgagcgctgaaggctgtgtggaggatgtgaaggagccagaactgtaggaacaagaggc

SEQ ID NO: 2841 - DNA, 5439 bp, Homo sapiens
cggcttgtgccgcagcggaacttggagaaaggccagctgccttttactgaggccttccgaggtggggctgggatgccacatttttcaaacacaccaccgcaaggcagcacccctcccccttagagatccaggtgactccactgagaattactgcgccacaccgtggcttctagacccacactgtcaagtatgtagtccttgccacctgggctgttgaacctggaaatgaggcttgtacgaactgactaaaagtgcaaaatacacattggattttgaagccttattacaaaaagaaaaaaaagaatgtgaagtatctcattaatgattattttattttggttactgtggaaacaaatattttagatatcttggtttgtgtcaactatgttataattaatgacacctgctttttaattactctttaaatgtgactactagaaaattttaaactgtgtatgtggctcagtttccatttctatgggacagtaccgctagtctgtgctgtgagttcagctgccagttgtggctttgaaaccagtacattcccagaggctcctctccttagtggtctggctgagggggggttacccagccctaaccctagactgcctagggtagtgtgtgggacagcctgcttccaggcaaaaagttaataatttaataagcagcagcaagaatttctaaaaatcctttccaaagcaccccccctggcttttttttcttcttcttcttcgtagccttcttcctggaccagccttcttcctggaaatctttttttaaatgcagaactcttcccttctgtcccacatgggacctgtggaggtgatggtgtccagaggggctattgttttattttattttcttgtttaaattgttcttttgcccacaggtcaggctgctccagtagctgccttttaacccttcctctgcaggaccatctcagaaaccacccagcaaagactgggaagccactcttttagaccagttccccctcccttctccctttggagtggttactcaagcgcagacatatattgggaaaacacaaggtggatgtgaaaccaaggaaactcctgctttgagaagtacagaagtgcagacccacaaccaacctcctaatgtcaagctggcattttaggaaaaaggcaaacacttcagagcatgtacctttgcatctgaacacatacgtctgtatttgaatgttatatctttcaaagccatgacctcacctcaggagactcctctctcaacttgatctcacagccatttactggaaacattttcagaagcctttgtggaactcttttcagaagaaaaaaagagagaaagtgggggccatacttggcactagtaagtatttatcttgtaaaggtagatttttaagtttattagagctaagtttggtaaataagtccagaacaagctttgagccactgaaattttaaaaatggtgtttaactaacagtaaggatggaattttttttaatggctgactcattcatgattgactagcctcgaaggcagttccataagaaaggttccagacagcttttgacttctgacagcgtctctggaacgccagtagagtctcctggggcaaaagctttaatgacaggggtttggggatgagtacgcagccttgactaagatctataaggttgagtctagagagaaaaaattagtcttatttacacctacggtattaagtgatactggcacctgagtcgaccttgtctttggggcttgcatagctacaaatgggaccagtaacagagaaggttctctgcatccaaggagtagagtccaaaacgtgacttttgacttaggttgacttgcacaccaggtttctctataccttatgatatacagaattcaaacctgaatatgtgagtgcaggtcaagggaaggaccctcaggttggtatcctcagcaaggactttagagttgggtgtgtaagaagcactcaacctccttgtatagtgccacggacagagcagccagggcagctggaaagcaacacccagctggggtgggtggaggaagaatgcatgtccccatggaacacgataaagcaaagttcaaggctcatgatgactaataggttcatctaggaggatgtgtgaccaagcaacctttgtattatttcctacaggtggaaatgagaggtgccatgttcattctatcctaaagtatctcttagaggactttgctgtggagaaagtgtagtgccttggagtttggctgggtcagattccagccctgctctctattgcagtgtcgactcaagcatagtaactaaggtttcatgagcctcattacgctcatctataaaatggaaacatgattacacttcagggttgtcataggagggaaggtcataggagttacacagatgaggggactcaacagagcaagtgttccacctctcccaggctctgagaatgacaccagaatctatctttttgccacaagaaagtaggcagaggctcatcgttgctcgtcagagtatgccacctgccacaggaaaatggccccagtctctttgtgaggagaggcttgccctcctaagagaattctccttcctctttgcttgaataagaccagctgttagggccccagtactcagcagctatgacaaatttcactgcttaagacccctcagcctcttaaaacaggagtttttctgtagctaacataagctgctctcagcaagatgcacattagcacttaatgctcaggtgggtgagggggaacactcaatggaacacttggtgtatccactgcaatcctgatattggtaaaaagtcacttctcatctggctttaaagtaggtccagcttctcattttaacctgtttgccaagtccctagtttttactatagctctcgtgtcatctttgattgcaccggtaatgtagggatgctcagcctggaccccagacttggaggccctagagagacagataatcaggccaagggggtcccaggaaaggcttgagcagagagcatccagctgcccctgtcctttctcattcgcttacccttgatatcttcctgaactggtatgttaggttctcagagtactaactctcaaacttcactgtacattagaattactggggaactttttaaaatccagaaattcaggctgtaccccaaacaattaaattaggcatgaattaaaacaacaaaagtaacccctccaggtgattccagtgtgcagccacatttgagaaccaatgtgttagttgatggaatgaaaaatcgagtgcagttacttactgggttgacttttgtgcggtcaccaactcttatcatctgaggatcacacaggacacaatgtcacccctatggggccacactgcctgttctggtcactagtgaggtctcagtggcatatagccattttaacagctctttttcctttttaccgtgaaacattgacagagatagagtagtatatgcccccaccccatgtactcatcacccagctgtcattcatgtctcctccgccccacacacacactttttcttgtatggagggggtggactgcagtattttaaagcaaatccctgacatataatttcatctataaatacttcagtatgtatttctgagagataaggactttaaaacaagaaccgcaataccatgatcacacctaagaaaattaacagtagttctttaatctcatctaataccaaatccatgttctattttctccaatttgtctgaaaaatacctttatacatttggtttattccaattaaagcccaaacaagtgttactcacttttagtagtttgactttaaccccagggtaattaaactgtcattgtgtacacaggtaacgatgcatatgcacttctgaaaagaggtgtcaatggaatttggctcagctgatgtttactggatgggctctctcctccttccttccttagcccttctggtgggatcttgacatgttacagaggaaatgctaattgaagccccagccacaaccacttctgtgctctgcttctgcctgaaggcatgttccctttggtaaacttagaatagaaccttcaggatgcatgtggaaagagagtatgagtcagctccgtggacagcttagaatttcctgcccctttgctggaggctgtgtctgagaagtgctgggactgcccccgggctcctctttggtctctgctgaggactgccgctttgacagttacctagggagttgcccaggacttgtgttctgatggaaggaccagccaacacccacacagccttcctttccttggtgtgcagatggctctatgcagtcttatctccagctgggcatctgggttcaggtcagacgatgaccaggaaaggagggggtgagtttctgccctctgaggtaacacctaccacctcatcagtcattgctttgccacagtgttccccctctatgagaccgaacactgttagaatttcttagagtcagacgctgcagctttaatgggtgatgaggctttggggggtcggcaagaggaggataaggatggagaatgggcagcctaaataatcaaactgtatcactcctttcacaaataccaatccagtgctaccacgtatgcatcattcattatcctgacccaacaaatctaaatttggttttatttttctgtagcttttttcttctttagaagggctttgtcttgatttcagatgggtttacagttgcaagattttcttctgtctttgtatcatggttagatggttacagagcagtaaacaagcatcttaatatgtaaaggcaactctaatgtataaggttatttatcacaggattatttttaacagcaaaaagtttggaaaacactaaatgttcattaataagaaactagttaaataaatcatggtacatccctatagtggaatattgtgcagatataaaaggaaatgaattagttgtgtttcaatatggaaagattgtggccaggcatggtggctcacgcctgtaatctcagcactttgggaggccgaggcaggcggatcatgaggtcaggagatcgagaccatcctggctaacacggtgaaaccccgtctctactaaaaatacaaaaaattagccgggcatggtggcgggcgtctgtagtcccagctactcaggaggctgaggcaggagaatggcgtaaacccgggaggcagagcttgcagtgagccgagattgcgccactgcactccagactgggcaacagagtgagactccatctcaaaaaaaaaatatggaaagactgtgaagagataaacagcaaggtctagaacatgtgaataacgtgcttgctaccttttttgtgagatgagtttgggagagaatacatattaatatttgcataaaccctagaaggatacacaaagcaacctttaagaaatgggtaccactggcatgttgggtaggagaaggaatggg

SEQ ID NO: 2842 - DNA, 715 bp, Homo sapiens
gtggttatggccctgagtccttaaattataggctctcctgcagtttcaaaaagctaattcacactactgtgtgcattagaaaggtggtatatatgatattccactaagggaaaccctaggaacattaaactcctactagtaactggtcacgagtcagggctagaactgacactagtcatttttcttcactgacaagttttcattatgtggctttcccagaacaatttagaaattgatctgcaactgatggaagctgggatgaattgggcgcataagtgaacccaaagcatcagagcaaagtcaaagcgaacatctggctccagctttgagtacaagagacttgtgtttccatggaataatcttgggatccatgtggagtgcaagagattggaacagaaggagttctcaaaaaataaaaacttcgggcgggtgcggtggctcacgcctgtaatcccaggactttgggaggccgaggtgggcggatcacgaggtcaggagatcgagaccatcctggctaacatggtgaaaccccatctctactaaaaatacaaaaaaaaaaaaaaaaaaaaatagctgggcgtggtggcaggtgcctgtagttccagctacttgggaggctgaggcaggagaatggcgtgaacatgggaggtggagcttgcagtgagcctagattgcgccactgcactccagcctggacgacagagtgagactccat

SEQ ID NO: 2843 - DNA, 2580 bp, Homo sapiens
gttctgagacagttctgttggcctttcctggaggtgacgttgacccaaccactttaatttggatctatgaatggtggagtcatttaagaaagtgacacatccagccacagagagcagtgtttatggagtgatgtgtattaacatgaatcaagcttcttttttattgtgaagctgtcatgtccctatacgatctcgtctttaaactcagaagtgtattgaggctgttttcaaagaggttttcttctccaggaggaatgtttggtgatggttatacagtcaaagtttggctctgtaaggaagcaaatcaacattgcactgtttctgaccacttgaagctttattttccaggaattcagttcaagggacagcacctgaatttattagaatatcatgtgccaaaaagatggggatgcctagctgacttgttcaaagttatagagaacaataaaaccttcttgaatattaagcattattccattaaccaaaccactttggagcaggtatttattaattttgcttctgagcagcagcaaactctacaatctactcttgatccatccactgacagtcaccacacacatcacttgcccatctgagcactaaagaagtttccataaggaataaaaccttgtcttccattacaattaacagtcaaggataaaacaagcacgcgcacaatcaaggagctggaacacactctccaggccgtcaaattattctcttgttcattttctattttgaatctccttgttagttaataaccaccaaatggaaaggtcattctttctgcagacttttggggagctcctccaaaacatttgttctctttaccatgccagatggacaccagcttctttgtgacaaaggcatgaatgatttgacagtgtccaaactgagacattctggagctggaaagcctgtcacactagagtgtgtgtgacatgtccactctaaacatgtcacttttctgttaagaaaactgagccccctccccacaggttaaaaaactttagtaacttgtttgtatagaaaatagtaacaaggactattttctattgttgtcatctatttactagatacatgtttttaatgattttaatgtaagcttttattaatactgatgacattatatggtatgatatgaaaaaatcaccaattttttacatataaaagatacctttttaaaaaaataggttttaagagctcttttagtatacactttagcaaaattaattaaattgaactagttactctgtatcaattacagtagttctaccagaatctcccaggttataatttatgagggtagagaaataaaatgtagatgcattttctttttcttcatttggatgaataattactgttttttgttattctaagtcagtgtttttcaaagcgtagtggtccccatattagctgcattgccatcttctgggagcttgcaagaaatgtacattctcaggatccactccagacctattgaatctcaaattctggggcttaaacaagcacattccaagttaagaaccaatgacctaagggaatgtctggttacctcctagttatacaagcaaaatctgcatagtatgtagtcttttttatttatttattttttttttttgaggcggagtctcgctctgtcacccaggctggagtgcagtggcgcgatgtcggctcactgcaagctccgcctcctgggttcacgccattctcctgcctcagcctccccagcagctgggactacaggcacacatcgccacacccggctaatttttagtatttttagtagagacggggtttcaccgtgttagccaggatggtctctatctcctgaccttgtgatccgcccccctccacctcccaaagtgctgggattacaggcgtgagccaccgtgtccggccgtagtttattttaaaatatatttttaaaagctttgtaaaaattatgtcattctcagaattgttgtcttcaaagcattgtcagatgtagagtgctcagatgtggctcttaaagactatatacatctgaatttttcatcctatagttagtaagatgcataaaatcaatccactactgaaatagtttccagtcagacatttctgagttcagacatttctcaacattcttttaacaacatttttctgaatcctcaatagaaaatcacattaatcttattttaaaatttggcctttttcaacactaacgttgagtaccggtagcttgtgatcaaaggcatatacttccttatgagatttctttactaaagcaagatttcattaaatctctatttcctaaatatcattctatacaaaagatattttttaaacggtaaggattaagacaatcactgatagctttgttgtgagcaattttgattcccatgtatcacatgaattacacttccttaaataaattacagtttatggctgtatgatttattctctaattctaacatagtctagttgtcaaaaggaaatatgtaatctttttatgattgttgaatcaataaataccaatttgtgaaacatgaatgtgtttaaactgcagtgaataaatgagatgtgctttaatttaacccg

SEQ ID NO: 2844 - DNA, 2049 bp, Homo sapiens
tgttattgcttttcttttcatggatattactcttacagttctagccaagagatagaaatagtaaattttacttttcactttctaaatgccaaagtcatctctcagtcatttatcagaatttggaggctcatttcttagtgatcatatatcttagaatccaaaagatgagaggatttaagaaaaaaaaattaaacttaccatgctttcaagtttgtcattttctttctggcttgaagcccagccctggaaccagtaagagtgattcatccacttttaggagatggacgactccaagtgatgaattagagtaaatgtgtgctagaagaaatggtgcatgcaaataaaagatggcatgccaagcttttagtggggatttttttgcataagatcatttgaaggtacatgaatgaatggtacattcatgatgctacttagagggccactttttaaaaaatattttttatctggcaattagttttaggaatctgccacatgtaccatagagataatctctcagaaaacaaaaaaaaaatgtgatacctttaagtttatcccttgattttatacactgtgttttccattggttgggaagcttgcattggtatttattgtaatatgcctctcttcttcctttgggcttcttccaatatattccctctttggtccacgaagcttataccaaagcacttggattagcaatcatctgaggcctagtctgctcagaggtgagcagaaatccctagcagaggggattttacaagtgttttttatttttcttttttatagcattggaggtaaatggccacattttatgatgttctatgcatgtccgtctcttgtcatggctacatcagatcttgtatcagagccacttatttcaagccactggctttcccctctgtagacaatgacatgctaccttccaaaacccctcctttgatttgtcaccacagaaatgataggtgacaaagaagacagcacagatgatgaatttaggaattaaaaactaaagctagcgagtcatttttaggtagcagaaatgtgctttagtgaaacactgacaggatgtttggagttggtggaagcagataaatatgaatatcatttttagggataaatgttcatgctttgtaccagctctggacttattttaataattcttttcactgtattgttggctctgtaaatcttattgaataaaatgagcaaaaatgagtttctgaatatgactattttaagcagagtggtttttcttgtgtaagtgtaggtgatgtgaagaggatgaatttatctgtaagtcatgggtgagaagggagtcctgcacagcctgagtacttgagaggtggcctacattaggctataacttttctttggatccgtgccatgtgaacactagaaaccaacacaggaagtgttagctgtgaaaaccatgtgaactataagaatctgctccaccggttttgaaagaaaggctaaagaagaaaaaagtgtcaatgttaaagagctaaccaaaacctatcctgctagaatatgaaaaaaattagacctttgccttgcaacctgatgccctgcttctgtgccaaggttggtgtaaaaataaaactagtcaccactagttcagatccaagaagttcaatatagttcagtaaacccttccttgtcttcataaaactggagcttgggggaagggaaaaggaacacatcattaatttcttttttgttacaaattttatttgtttttaatattgtggataatatacaaatatctttttatctgtaaaatagtaaagcaatgtaactatctttaaactgcactctcccattgactccaatcctagttctctattcagagtcaactaatagtaatagcttcatggtttcttcctaggtctcttttaaataaatttgtgcatgtgtaactatggaaatatttcattttgttttgcttatgtccatttttatactaagtcacatcatattaaccattctacaatttcctttttaccatatagtgtgtctcagagaacttttcaagttagtacatgtgtg

SEQ ID NO: 2845 - DNA, 9310 bp, Homo sapiens
gggaacatgagtccctgcagtggcctcagcccctggtttcccagaattggagggggtctttgaccgggaggggttggtctttactggcctggagccctcctctgccgcccctgcaggcagtgggatggtccccaggtcttagagtcctcaggatgttcccaggcccctgggactcctaagctggaactggagcctctttgccagccctgatctgcctgagaccctctcaccacctcccaaggagtttggcccagggtctcactgcctgatccctgcctgtgccactgcctgtgaggcggtgaagtgaaaaggtggacttgtcctgtcttggggacaggtccctgtgtggagcctcctttctgcactgacaggtaggtcagggtggagggtgaaggactccgctggaacggtctcaggcttgcaaacggagccttgctagtgggtgtcccagagcaggcggctgcaacgagacaggcatgttggagaggctgcccctgtgtgggaaggctttcgcagacatgatgggcaaggtggacgtctggaagtggtgcaacctgtccgagttcatcgtgtactatgagagtttcaccaactgcaccgagatggaggccaatgtcgtgggctgctactggcccaaccccctggcccagggcttcatcaccggcatccacaggcagttcttctccaactgcaccgtggacagggtccacttggaggaccccccagacgaggttctcatcccgctgatcgttatacccgtcgttctgactgtcgccatggctggcctggtggtgtggcgcagcaaacgcaccgacacgctgctgtgagggtcccggtgagatggagtgggtcacacctggcaagctggaagaaagttccctggggatgggagagcgggtgggtgctgccaatctccagctactgtggccacaccccacctggtcatgggcagacccctcccttcctgggctgacctgctccctcgaggccagcctgctccctggctgaggctcaggctatccgcccaagctctttgctcattctagggccagtggaggaaaatgtgataaggccagagcttgtgtgctgggcacagaaatcacctgctgcatcctgtgctccgcaggctgggccggagcctctgcccgcaggtttctatgctgtttcttagcacagaatccagcctagccttagccgcagtctaggccctgcttggactaggactccttgcttgaccccatctctggttcctgccctggctcctgcaccagccccagctcctgcctacatccaggcagaaagataggcaggggctcttggaagacgttccgtgctgtgacctccgagccctcctggtgggaagacagctggaaaggctgggaggagaagggaggggctgggggttcccaggagccatgcgtggcctgcagagtccattccatcatgatgctgtgcccgctatgggctgtgtccatgaccagaggctggagtgggggtgtgttagagcccctcaccgggacttgctgtgcggatggggcctgggcctccttcctacaggggctcctctgtgggtgaggggccctctggaatggcatcccatgagcttgtggcctctatctgctaccatctgtgttttatctgagtaaagttaccttacttctggaatttcctgttttgtttcatgttattcagagagacggtgcatctcttgggactgatgagtcccctgtacatattgtacagatagggaacaactgaggttctggaatcccagaatgtcagcgcttagggggctcagagagtgttacaataggagaggggcctgacaggaggagggacttgcctagctactcgcagccccttgggcacttcccatccctgacccattggtttgaggatgacagggaagatttctctctcttctgttttccctttgcagctgccttgggcttgctaggacccctgcctgggttttctggggaccgagaggccctggtcaggtctggctggaggcagatgctggtcctggggggtccctagagcaggtggaggggctttatctccaggcctctggccaggcccttgtccaggctccagttctgtggacctgtgtcttttgcatgtgggctgttggatccaggatcttcttgctggatcccaggacccctgtgagtggaggcaggcacgaccctggtagttcctctgcctttagaggcccagctccccttcaatgcccaggcaggcaggttctggcactggggatctgcatggtggatgccactggaccggaggtctgggtgggtggcctgagcctgaccccattgggggcacagtgtaggggacagaatctgagtctactccatgttcttggggcagccttggccgggcatgaaaggttgcgatccccatcacctgagccttggccagctatctctgagatgggacaccatctgcccgatgaggtgactgtgtggagacagggaggtcagcgtgcccacaggtgtcaggccatctggcctgcagtggtggctctgtgttcagtggatcctggggtctctcatggggcctctgtgtaacttgctccctccagcccattccgattccagaaccactctgcactgggttcctggctgctatggtagaggtgcagccctgccccttggctagtgttaggcaccccctggttgtgcatccctgaagaaatgcttgaaatgtgctgagggaaccccccaacaaggggctgggacacctgcagctacctcctgggtcccctggaacccaagccctggaagctgctctgagtagggagtgagcctggagtcatgctctggcctcctcccaagctcttgggcactgtcttctgatctgctacctcctccctgaggacagaggtcctggggggcctggtgagatttccgtgagggtttggattcctggggatggggtccaatgaggggtgttctggaggcttggaggtcccagggcagggccctcaatcactgtttccaggctaggtaaagcatcaggctctaattcagtcagatgctgctcttgctgagtgcactctggagacagcttgagtttttctgcgatgcaaactccaaactcggcaggagtttcaagctccctcaccagggacagggccggtgggtgcagctacactgctgtgtgggcagattgaggagttgggtagggagccaggaggcctgtccacataaccctgcagaggctcacaaggcaggaagggacatcaacatttactcagccttgatcaggtgaaagagaagtaattattcaggcagtaagaggatatctattcatgtttcctattggaatcttctttcaatttttacttctccatgtgttttctccagggcaccaagggtctaaggtgccaggcccacaaagggaatgtgcttgtgtgggtgtatgtgtgtatgtgtgtatgtgtgtatgtgtgtgagcgtgtgtgtgagggtgtatgtgtgttggtgtgtacatgtgagtgtgcgttggaggcagcaatagtgtgtgtattctaggagcttccttatctaaaagtctcttacatttcatcagtttacgcaatcattattaatgtctcattttgcagatgtggaaattgaggctcagaaatgtaaggggacttgctgaagagtggtcttttatattttcctggcctgctgccctactgaatccagccctgagaggtgacaactgccttgaggagcccctctggaccctggacctgcatgggtttcctctggccagagcgggtcccttcctgactgtggcaagtttcgggcatgcagaaggctgccggggtcctctaatagggtgactggcccaggcggtcagtctggtgcagccttagtactcgggtcaccatggtggttgtggtggagtgcagccacagccctgcctcatgggggtggaggactcatccccgagtctgttctctgggcaaacccagctgtggtccacaggtcttcctttctggacacacccagaagaccccacctgcttcactccttgaagaaggaatcaacccttagccctgaaaggccccctgtggctcagcttcaggactggactggcgtcacaggtgattagaattaacgtgggaatgaccgctcataggaagcagccgccatgagtatgcgtgtgtgtataagtgtgtgtggatgtgtatatttgtgtgtatatgtgtgagcatatgttcatgagcgtgcatgtgggtacatgtgagtgtatattcctgagtgtgtgtgtgactgtgtgtacaaagtgttggcaactacagcaagatgatggctgaaccctgtgtgggttgtacacatttgccacagtccatgccctttgtcacgtgaaaatactactactcgtaagtgagaagagtgaatgccagcaactcttggggactgttgtggctgggttgtgtctttaatcatttcatctgccaaggtttttgcaccactgtgttgagagctgtggggatcacagagacatacaaggcacagcctgacccccaagggttccccgacttgttggagaggcagatatgcaaggcccaaatgcagtgtgcacagtgagtgaggcagctgagaggtaggttcctccggggattttgaggaaggttgatggttgatggagagggtttttaagctggatctttaagggtgagtaggagttttccactgcaggagaagagtgtcatgaacagaagctcagagatgtgcaagaacatggtgtgggtggagcccaggctgtgtgggtcaggtgggactgaaagtgtgagcagggcccaatttgaggaggcaggaggggacggtttggggatgaaggtctctgcaaatgcacattatttaagtcattgatggcttctctcatggggcctctgtgtaacttgctccctccagcccattctgattccagaaccgctctgcactgggcgccatgcaaggctctgggagacagtgggaagggagccgctgtttctgccctgtagggaaagggagagactctccatatcaaaacacaacacggaacaagacagctactctttgtacagtggccttagcagaggcacttcagtgggttgcaacggctcatcaatggaagtgtgaattctttttgtccacctcacccctgactactcagcaaacaaaacctgggagtacacagggtttgtagtgagggcagctattagagggtagccatctttatccttggcagaggatatcctgcaccggtctatgggacctgccactgaggtcactgtggtggcagctgttgacctcattcactggaggctgagcctatgggagcatcttgttaaggagcaggtgacctttattccctgaaattgccccatgtgtggtctgcaagccagttctcatgactgaggagtggacttgccagactgcagaaatccaggcctgaagaagttatgttgccaaaaggggagatctctagaacacagacctgcctctccatcaggcctggcaattactgatggtacctggggcagtccaggcaacgtgggggccgagcagctgcatcatgaacggggtccttgaggactctgacttccatctgaagagtggttgtgcggaattaagaaggaaatttcctgaccctctctggcaggtttctgaaggcctgagtacagcgtgctctaaaacaggcttcaagtccacgccgagactcagccccgaggatgtggccagtgatgctcactcagggtgctcctgtccttactcactgggggaggcatttattgatgaaatagatttgaatttttcaactgatgggattttgttcacttttaagaccccagtgggttggaaaggctttaagagcccatggaatttcttctgatatatataaagtgaaaaagtagaatataaaacaatgtagaggaactgcttccgaaatgacatgagaacttcatggaccaaacaaccataactagtgcaaatcataaaaaaaccccagacaaccgtttaaagtctctggaaattgtcttaaggctacacagcaaatgaaacatttattaaagaaaatgtgtcaaatctgggtaagaacaggagcatctgtagcactggagctgtgactggttcacctgccccacccccccgcccccaacccagagtccaagaagacagggttctctctctctagctcccaatcaaggcatcttgacatgatgccccttggaggagcaggttgccagcactgctcacccccacgcagctctgcgctgcaggggccgagctccaggcaggagcgaggggttggcttccaacatggtccttgagaaggcgaggcactacttgtccacagcctcatccctgcctgctgagagccacgcactgggcagctcctggccctctcgatgcccactggcacagcagaccatgagctccagggcacactcaaatcccccacctccgtgagactactggataaggttccaggaagcgagagagtccacgggtgagaggagtgggctggagggtgggggcctggattttcctgaggggtgctgaggagtgaagtggactggccagaggctgctggcccaggctgttttacagagagcaatgggagatatgggaagggtgtgttagaggtgcaggtcacatgatgggagcagcacatggcagaagcgagggatcttgaggggtcttgggcaggaggaccagccccacctcaccccatgggtggggacagtggaggggagctgggggcatccacttcaactctggcttcctgttgacagggaaggacggtctgtcaggggacggagggcccctccctcacacaggcatctctatttccttcaggccctgggccagcctccgcttccctcagggtggtttctgctctattggccgttgaggcagcgtgacccttcctccctgagcgggagaatgttccgtcctgaccccttgctgccagggctgtgagctctgtgtccatctctgttcacacagagaggccggctggcatttcaaggcactgtcttaataccctggtgcccccttccctgcaagcccctacagcccttccctcagtgtccttgctcggactggcctgggctcgtgcatcacaggcattgcggccagggggcctgtgatgcatgtgtcagctttggttacacgcctggcatatgtgtagacacagcgatggagcagccacccgggagggcgcacaagacctggcaccagggagcagaagtgggggccgaatatgtagagcctgctttggggtaactgaagggaagaaggaaagcaggaccgcaggagcatggggcctgcactgttacccaccagaaaaccgcctgacgtccaggaggcccactcctggccatggttaccaaggaagcaaggtcgaggagagagctggttgaaaataacttccaggtgggcgtggtggctcacgcctataatcccagcactttgggaggccgaggcaggcggatcatgaggtcaggagattgagcccatcctgactaacagggtaaaaccccgtctctactaaaaatacaaaaaaattagccaggcatggtggtgagcacctgtagtcccagctactcgggaggctgaggcaggagaactgcttgaacccaggaggcagaggttgcagtgagccaagatcacactactgcactccagcctggttgacacatagtgagactccttctcaaagaaaacaaaaaacaaaaacaaaccaaaaaaaaccttcctgtccttttttttttttttaaatcaaattcagttaaaattggattaactcaacttcaaatatagttgaaatgattccggcaaatggagggtgatcagtcagcaccaagcggcgaggacaggccactgggaggaagaagcctcctgaaggtgcaggccttagtcaaggagctgaccaggaaagtggaagagatgaccggaaaagaccagtttcggcacctctgacctacctgtaccaagcatgtcgttggccacatgtggaccccaccggcctgaacctcctgacaggagcctgccttaggccaccagccattcgcaggactgggaggccgtgcactgggctggcttcagcactggggcctggctcctttcctgatttgctgaggagctgcaggaaatccccccacacccctatcccatctcagtttcctctgtcagtcatgcagtggatctgcgagggggcctcagtgcatcctgggaccccacccttcttgtccttccctgagtcaccctcattctgtctggaatcctctgtggctgcttttccacaaactacactcactggcagagtgacccctggggctttggacctctgggtattatcaacatggtaatgagccggcaggcctatcatggacacctggggggcgatcatgcttgtccacagttaggttttctaatgtatttctctgtccctggctgtgacagcctgtggaactcagaatggaagacagtaaggggcctggacgctttgttcccaccttgaccggaggcaacaatcttcctcttgcatgccaatgtcattgtataccttgcttctggcgctgctgaccccaagtggcccagaacattcctttgggtctcctcagtgaatcaaacatgtccctattccagtacatttctattaaaatctgctgagccccacaaagaaccaggcactgctaggagcttcctgtaggtgtgtaaacttccatgcactcaagccgcttgcccccaggcactgtgttggattcagcctgcagccactcatcctcactcaaccctcctgctctacccaccaatgccttccatgggtttgcctaaaattaaacattagtaaatgttgaatggatccaactggagagaaagatgttcctttgccttaagcatctatgctccatatgttttgtttccaagcagtttcattcagaaggatgtgaaagggactctgttccacagctgcactggttcatggtggtggaataatcacaagatgaaacaatcgtatcattgcttttccagcaaagtcaggcactgtgctcacaatacactacattcatggaagcctctttgttataggaatttgctttgctctaggggcgttcttttaattttacggttggaggattgagttctcaattaagggatcagcaacaaatagatattaggtatgatcaattagctatctgggaagtatgaatgttctttcagttacctagcactaattaaacaagtgtcttgccttgtgagggggagaggctcataaagacaccctcttttctctcaagggctatctgtcttgg

SEQ ID NO: 2846 - DNA, 1683 bp, Homo sapiens
cccgcaactacattggagaggcgctcccctgccctcttccagggaacttccttctccatcagggccaagtctgagactgagctagccttccaagagtagagctgcagtatgcttcaacctgtgatctccgttaacaaggccactggcttgactattgcaggagagcctgataagatgtgaccccacctctttgctgtgagagctcctctccaccacttcgtcccaggtgacctgggtacagtgtacaccaagagatcatgagacatgcatgccaagtgggggagctgatgtcaatccacacataaaaggttagtacatttttctttttcttttattggtaacaagtaaatatatatgtgtatgtatatatacatatggacatacatatgtatacatgtatatttgtgtgtgtatatatacagacatgccttttttaatgatggctatacgttttgagaaatgattaggtaattttgtcattatgtgaacatcatggagtgtacttacacaagcttagatgatacacctagtaaacctaccatacacctaggctatttggtatagccctgatatgatttggctctgtgtccccacccaaatctcatcttgaattgtactctcataattcccgcgtgttgtgggagggaccttgtgggagaaaatttgaatcatgggggcagttttgcccatactgttctcatggtagtgaataagtctcatgagatctgatggttttatcaggggtttctgcttttgcatcttcctcattttctcttgctgccaccatgtacgaagtgccttttgcctcccgccatgattctgaggcctccccagccatatggaactgtaagtccaattaaacctctttttcttccaagtctcgggtatgtttttatcagcaatgtgaaaactaatacagtaaattggtaccgggaagagggcgttgctgaaaagatacctgaaaatgtggaagcgactttaaaactggattacgggcagagggtggaagagtttggagggctcagaagaagacagaaaaatatgggaaagtctggaacttcctagagacttgttgaatggctttgataaaaatattgataatgatatggacaatgaaatctaggctgaggtgatctgagatagagaagaagaacttgttgggaatgggagcaaaggtggctcttgttatgttttagcaaagaggttggtggcattttgcccctgtcctagagatttgtggaaccttgaatttgagagagatgatttagggtatctggtgggagaaatttctaagcagcaaagcattcaagaggtgacatgggtactgttaaaggcttcagttttaaaagggaagcagagcataaaagttgggaaaatttgcaggctgacaatgcgaaagaaaagaacgtcttattttctgaggagaaattcaagctgctgcagatatttgcataagtaatgaggagctgaatgttattcccgaagacaatggggaaaatatctccagggcatgttagagacctttgtgacagcctctcccatcacagacccagaggtctaggaggaaaaatggtttcatgggcagggcccagggtccccgtgctgtgtgcagcatagggacttggtgccctgcgtcccagccactccagctgtggctaaaaggggccaacatagagcttgggc

SEQ ID NO: 2847 - DNA, 2926 bp, Homo sapiens
cgagctgctgtagcccctacgtgcaggtaaaagagagaagccagattcatggaggcgtgaaggatcccagcaagaaaacacagacttgatcttgagacgagatttttgaaattggttgcggcctcaaggcaggctctgagaagactcgataaagagttctcaggaataggcatccctcctggatatttcccccttggaagcgccgaggagccagctctatgtttgtaaccatagcatttctaaagctccagccccaggaacctgctgtgaattagagacagattccaccctaggcatcactgatcttggcctctcttgtattgggaaggtcaacactgttccagtttctctcctactcccatctggttgtgctcggtgaagtaggtgagcagtgctacccttctgttaaaaaaaaaaaaaaaaaaaagatcctgaaagaggaaagaatttttgctacacatctgaaagctaaagtccaggtgatgccttgattacctagctttggcttctctgaactctgcttctctgatagaggaaacctgaagagaactagcatttctgaaaccatggcccgggtgagttgatgtctcttttgcttttctgacttattgtgattttttaattcatgtaatattttcatttttttaatcctgaaacctcctatctcagaaagctctctcttggaacctatttcacattcctcccattccagtgatggatgatgtcctcctcatttgccctccttttttgaactgattttcacttattttcaaataattcatccatcttctgtgtgttcagtcttctctcaagagcagtgttagagcagtgaaagagtgaagtaccttgaaatagttgagctgccgttgtcaggttcatggtttcgtggcataggaacaatggtcctatttgactacaggagtggaaactttctccacagctcccttatctccacagttagataagggaaaacttggttatgagtggtctcagtctgtttgagatgagatctcaactttgaaacgcatttaggtttgagtgaagatgggattatcacttacctagagagagattagggatctagctaagggatcactgagaaatgaaaacaattccagggtcccattttgtagtggaagagaaattgacagtcctgagggaatcaaggttgttctggatcattctgcattactgtgttccaactcaggaacagatctataaagagttgtagaaaggaaaatcaactagaatgatatgtggtagatgatattgaactatggggaagaggttggaatttgtgtccaacatacatgccatattagtataattctttatacaataatattatttttaataatagtgccttaataccttaagaaagatgaatctaataagagggtgcttgtcacttgattcttttttttttctttgagatggagtctcactctgtcacccaggatagagtacagtggcgttatcttggctcactgcaacctctgctgcccaggttcaagcgattctcctgcctcagcctcccaagtagccaggattacaggcacctgccaccatgcccagcaaatttttgtatgtttagtagagatggggtttcaccatgttggccaggctggtcttgaattcctaacttcaagtgatctgcccacctcagcctttcaaagtgctgggattacagtcatgagccacaatgcccagcctctttttaattttttttttttttttttagagatggggtcttgctctcttgcccaagctggagtgcagttttgttatcaaggtttaccgcagcctcaaactcctgggctcaagtgatcctcccacctcagcctcccaaagtgctgagattacaggcataagccaccatacttggccattttttcattcttttaactgaattttgaagagcagaagtttttaatttttcaaagtgataataccattttacattcccaccaacagtgtatgagagttccatttctggatgaaatccagtttatcagctttttcttttctttacagattgtactttttctttagggattgtactgttggtgttgtatctaagaaatctttgcctcaccccaagcttatgtagatttttatactgtgttttctcatagaagctctatagttttatgttttatgtttatctccatgtgccattttaagttaatcttggcatatggtacaaggtatggataatttattttgcatatagatatccagttgttcctacaccatttttttaaaagacggtcctttatccactgaattgcctttagtcacttgtttaaagccagttgtctagatacgtgtaggtctatttctcaactctgttccattgacttatttgtctacgtttatgcaaacaccacatactctttattattgtagtattacgttaagctttccaattagtagggttgatcctccaactgtgctcttcttcaatgttgtctaggttattctagatcctttgtgttttcatctgaattttagaatcaccttgtctatttttacaaaagctctgctgggattttttttttttttttttttttgagacagagtttcactcttgttgcccaggctggagtgcaatgatgtgatcttggctcactgcaacctccacctcccaggttcaagcaattctcttgcctcagcctcctgagaagctgggattacaggcatgcgctaccacacctggctaattttgtatgttttagtagagacagggtttctccatgttggtcaggctggtctcgaactcccaacctcaggtgatccgcctgcctcaccctccgaaagtgctgggattacaggggtgagccatcgcacctggcctctgctgggattttgactgagattttgttgaatctgtggatctgtttgcaaaggtaagagtcatctgact

SEQ ID NO: 2848 - DNA, 2036 bp, Homo sapiens
cactgcctaggcagcctttacctctccgatctgctggagaatctcattatcccatcggcgctctgcctgctcctggcctccaagcctctgaagcccctcgggtttcagctgccggctaccctcgagcccgtggtgcccacgagagaggcgactttacgtcagcggccctgggctgagatttgagaacgcgaccaagtggagaatgttggagccagattttaaaatccttgtcttccttctgcgtgctacttgatctaaatgagatacggcaaagtcacagaacctgtttttatgtttttgcctgattcatacgggcttctccggtgaagatgggcctgaagtaacgcttgggttgcttctgacgttataactcatcctgtagctgcagcaaccgtggtccttgcaacctcataaaaatgttgccagcattgtttcgatagtgctgcttaattcttggaaggttcttcggacttcacacattccagcagtagctctctcagctcctgtcctgcacagctttgaagtgctggtgatgtcattgaactcttaagtgcaagatgaaacaagtctttctggggttctaagtaggtaagtgatctgtccatttcttaactagctaaatgaattgctttattaagatactgaaggtatgtcaggcctatcaagatccagtatctggaatcactaatcaactctctatgaacattatttttttgaagacttttctttcggcacactaaacaaaaataaactcaacctgggggaagatgcttggagctaatgtgaggaggaaggaatgatatcaaagaccttgctttctcaaagttccctaagatgcgaaagaatcagtactgcagttttaaaataggctggggttggacagaggagcaacaaattgtaatttaggagtgccattgctttctcagacataacggcattattgtctgggggaaagagttctattgtataaatactgttgagaggatagtggaatttagatctccagcctcttccttgattttggcaaggttgaatgtagaggaaaccacagtcgttcaggaagaacgttatgtgaacaatgtcatgttttattggtggaatgagtaaaccaggcagtacaggctgtaaaaacgtatcagttggtgttatggcaggaaacagatggctcattccaatagagtaattcaaagaatatccaataaaggggctacttacaaaggtgtagatgggaaacaggtgagccatgagatagagtgtatccaaggctagtaacacagggtctatttctaaccctatgcttgaaggggtgaattaccgggaaagagaggctcctaaggaggggccaccttgagaagagccacagtcgtcgcggagggaaatgggaacttgtgagctaagggaatataaatactccttccttattcacctccttccctctgatattctgccagatctctctaataatataatccaatctggagccagtgggcaagaaatctaatggactgactctttagactggcctcctgcagctgactagggtgaaaagtgtgatctggaggaacaaacaactccccacattaagtggtttacagtcccaaaggcctacttctcactcatgctgaatttccggcatggatcagtagggagtgtttccatgtgtcctcactctagaacttcagaaatggagcagacatttcttcagaatataaccaattgttttgatagagggaaatagaatttgggatagtctcaagccagcaattatgtattttggtcttaaataatttatgtcatttgtacttacccagaactagttcagggccctgtgcaagcttcagggagccagaaagttgaactctaccaggtgcctgaacgagaaggggatgtgataaaactgagcagtgtgaataaccaccacgggtaacttttctgttcaaagcatgctggtccctaaattaaattgaagctgggatatgggttggcagaataattcaggcagaatttagtttacagacaacttctgaacaacttgc

SEQ ID NO: 2849 - DNA, 8149 bp, Homo sapiens
ctcagagaaagagagagtctttggagagttgtgaggagataagtgacataaactggcatgttctgaaagaatcactctggatgctgtgtggagaaaacactgaaaagcacctgttgtttcctgactttttaatgatcgccattctaactggtgtgagatgatatctcattgtggttttgatttgcatttctctgatggccagtgatgatgagcattttttcatgtgtctgttggctgcataaatgaatagactaagatttcagtgattgagtctcatggcatgtgataaagagttagtgataaagatttaaatggcacataacatcatcccaattgaatgcatcggggggtcatgatgctgtgtgggtttgaaatggaaattacaagcgcaatattacagaagtgtggattttagttacaatgtctctatgagaaagtctaaaagttaaacataagcaaaacaacaaaaacatctaaataccagacactatcctcagaaattagatttgaaaaatgagcttcattttcgaagaacatattgaatttgttatctcgattatggagggcgacaagtcccacagtctgccatctgcaggatggagaaccagtctttatagggggagaataattgactccattcaagtgttcgctcctgtttcaatcaactatggctgaagagtgaggagacatttggaataaatatggcttctgggggcccattcctatggatcagcagctggcttctggaggcccattcctgtgaatcgtcgatctcatagaagataatattgttagaaggcttacctcattgatgctgaacatcctaaaaagcttctgctgctttgagtcactgaaaaagaccaagaaacatgaatttaaaaaaaaatttcaaatgttataaaataaataatatgaactcattatacctacaatgaataatttaaattcttctttggtagtccaggtaaataacttctcaaatagatttttttaagcatctgtataagttcaagatgtacatcacttcatgtagaataacatctcctaaaaagaactgaaatgcctcagtatacaaccagctgacctggctatcaaacacttatttagcacatattacatgatggacactttgatgtagatacggaccttgggttgtgtcctcaaggatcatacagtgggttgaggaaataggatatgctatccataggaaagtaaataataatatgacagcttattttcaatgagaagtgaatagtacaaagaataggagttgccagatttcaaaaggaaagagctatcacacagaggcggaacaattagaaatttttcatgaaggaagtgttctttgtgctggacctttgagaaagtatagaatgtagattagcaaaaaggcatggaaaaggcatgataggtaggagaggcaagttaggcaaaggtccattagaattgctcaagatataatagaccaacttggcctgaaaaaggcctggaagtatcctcttttgtgctctgtgagaagtttgccaccatgtaaaaagtctaactaccctaaggcaaccatgctctgagaagcccaacctatccaggtggagaggtcctgtagagaattgaggccactggccctgagctcccagttgaaatagacaatatcaacatgtcagcagggtgaatgagaccatcttggaagtgggtcctccaagagtagttgagccatcctgcctaaatttcagcattttgagcaaataaatgatttataccattttaaatcactatatttttgagtgaatcactgacttttttctcaattaagcataggtttagaaactatgaaaaccctagaagaaaacctaggcaatgccattcaggacataggcacggacaaagatttcatgacgaagacgccaaaaacaactgcaacaaaagcaaaaattgacagatgggatctcattaaactaaagagcttccatacagcaaaagaagctaccatgagagtgaacagacaacctatagaaagggagaaaaattttgcaatctgttcatctgacaaaggtctaatatccagcatctacaaggaacttaaataaatttacaagaaaaaaacaaacccattagaaaatgggcaaaggacatgaaaagatacttctcaaaagacatacatgtggccaacaatcatacaaaaaaaacctcaacatcactgatgattagaaaaatgctaatcaaaaccacaacgagataccatctcatacctgtcagaatggctattaataaaaagttaaaaaacaacagatgctggtgaggttgttgagaaaaaggaatactgttatactgttggtgggaatgtaaattagttcaaccattgtgggagacagtgtggcatttcctcaaagacctagaggcagaaataccatttgactcagcaatcacgttactggatatatacccaaaggaatataaatcattctattataaagatacatgcatgcgcatgttcactgcagcattattcacaatagcaaagacatggaatcaacccaaatgcccatcaataacacactagataaagaaaatgtggtatatatacaccatggaatactattcagccataaaaaggaatgaaatcaagtcctttgcaggaacatgaatgaagctgaaggccatcatcttcagcaaactaacacaggaacagaaaataaaataccacatattctcacttacaactgggagctgaatgatgagaacatatggacacatataggggcacaacacacactggggcctgttggagggtgctggggggaggaggcagagcatcaggaagaatagctaatggattctgggcttaatacctaagtgatgagatgatctgtgcagcaaactaccatagtacatgtttacctatgtaacaaacctgtacgtcctgcacatgtacccctgaacattaaaaaagtgtgtttaaattgtgagataaggattcaagagggcctcttgcttcactattgttcactttcctagctttaagttttctcttctatttatcataagtatttatccttaaatgccatgtcaaatgatgactggttaattaattattattattttttagttcaaagggtcccttctaatgttatttatcttttaacaagggaagacaggaatattttcaagatccaagtatttaaaaaggtggaagtgagataggatcggggtttggaatgaagtagaaagaaaaggaaacatgtaaaaatgtaaaatcaccatgtaggagcccaacatatccaatataagctatactgctttgggttatctagctcataatttttctttgcctaatttctctacttagaaataccatgtcacttacggtgtgtttttaattgaggaaagttaattactaactattgttttgtaaaactcatatgccaatttattctaggctaaaatcaacttggcagataattatttttaaataacaaacaaaagacctttcctttctgatgcttttcccaaaacatgcaatataaaccaaagagtaaaacaaaataatgtgttacacttctcttcaactagtctaccatcacttctgtttaactggtttgatacattcatgaaaaatttcctttaaaagacatattcttctaaaactaatttaaaataaaactcttattaatattttcaattcctaccactatcaattatttggaattagaccaggttaagaatttaaaactttgcctatcattttgtattttaaagtcatgggtattgataagggactaatatttaggaattattttatgtctttcatttccttatcttctcagttaacaggtatgctgagcctttgctattttcacaataaactgattacttggttgatttaggtagcaaaaaagataatgaacctgtatcaaatttctacttacattattttatgcatagtaaataaaaatttcattgctgtgcatcctcttactagtaactacaaattttataaaaatacaattttttaattattttgccactgaagctgcaatgactagcagaatgtctggcatataacaagtgcagaattatttttaatagatttattgaggtatattaatatacaataaaatgcccacatttaaattgttttgacattttgacaattgttttgacacacaaaataagttttgacacatgtacagactcataaagccctcaccaaaatcaaggtaatcaacatattcattactcccaaaagtttcctcatgctttctttgtaatctcgcccagcaatcaccccgcaccccatccccatgcaaccagtgatctgttttctgtcaccatagattagtttgcagtttctagaatttgatataagtgaaatcgaacagtatatattgttttctgcctggcttctttcactcagcttaattattttgagattcatttgtcatgtgcgaaaccatagcttatttatttttattccttttgttgactagtattctattgtatggctgtactacagtttgtttatccattcatctgttgatgaacatttgagtcgttcccagttttcggcttttacagattaagctactgtgatgatgggtacataagtctttatatagacatactttcatttttctggggtgacacttcagagtaggatggctggatcatacagtaggtgtatgtttgactttttaacagactgccaaactgttctccaaagtgattctactatttaacatttttatctgcattgtatagcattctcccttcctctcactgttggtatggtcagtcttttgaattttagccactctcataggtatacagtggtatctcattgtggttttgtttttccctaatgtttaatgatgtttagcattcatacattttttttttttgccatctgttcatcatttttagtgaagtgtcttcatgtctttttcccatttggtataggaagggagttggttgttttcttattagttagctttaagagctctttgtatattctggatattagtcctttatgagacatacgatttcaaatattttctcccattcagtggcttatcttttcagtcctttaacagtgtctttcaaagagcagaagtttatgattttgctgaagtccaagttatcagttttatatggattgtattttgagtcaaccctaaaaaaaaaaaattgcctgactgaaggtcataaagattttctcctatattttcttctagaagttttatagttttaggttttatatttaggtctgtgttccattttgagttaatttgaagggtttttttgtatatggatgtccgattgtttcagcattatttgttgaaaatatgactctttctccaccgaattgcttttgcgtctttgtggaaaattcagttatttatacacaagtgggtctgtttctgaactctgtctcctgttccattgatctatctgttatttatgccaataccacactgtcttgattactgtggttatatactactcttaaaatattcaactttcttctgtgttttcaaaattgtttcagatcttctagtttctttgtttttccatatgaactttagaatcagcttatctctttttgtttgtttgttttttgagagagagcctcactctgtcacccaggctggaatgcagtgccaatgatcacggctcaccacagcctcaacctcctgggctcaggtgatcctcccacctcagcctcccgaatagctgggactataggcacacaccaccatgcccaactaatttttgtagtttttgtagagacagggctttgccatgttgcccaggctggtctcagactcctgggctcaagcaatcctcccacgtccacctcgcaaagtgccaggattacaggcataagccaccatgcctgtcccagcttatcaatttctaccaaaaaaaaaaaattgccagaattttgcttgacactttttttattctttaggtcaatccaaggaaaattgacttattataaccatattgagacttctgactcatggctcaatatatttttattaaataaaagaagaatttttgaaacgggttttggaataattttcagaagttctaggaaaattagaaatatcatgtttaactgctgaaagaaatcatagatgacacaaacaaatgaaaacacatctcatgcttggggtggggggaggaaatcaatattgttaaaattaccatactgcccaaagcaatctacagattcaatgcaattcctatgaaaataccatcatcattcttcacagaactagaaaaaaaatcctaaaattcatatggaacctgcatagccaaagcaatacaaagcaaaaagaacaaatctggaggcatcacatcacccaacttcgaactatactacaaggttattgttaccaaaacagcatggtacttgtataaaaataggcacatagaccaatggaacagaatagagaactcagaaataaagccaaatacttatagccaactgatctttgacacagcaaacaaaaacataaaatggagaaaggacaccctattcaacaaatggtgctgggataattggcaagccacatgtaggatgatgaaactggatcctcatctcttaccttatacaaaagccaactcaagatgaatcaacgacttaaatctaagggctgaaaccataaaaattctagaagacaacatcagaaaagcccttctagacattggcttaggcaaagaattcgtgaccaggaacccaaagcaaatgcaacaaaaacaaaaataggtaaatgggacataattaaaccaaaaagcttctgtacagcaaaagaaagaatcagcagagtaaacacataacccacagactaggagaaaatattcacaaagcatgaatctgagagaggactaatatccagaatctataaggaactcaaacaaatcagcaagaaaagaaataaataatcccatcaaaacgtgggcaaagaacatgaataaataattctcaaaaaagatatataaacagtcaacaaatatatgaaaacatgctcaacatcactaattatcaggtaaatgcaaattaaaattgcaatgagatacccccttacttctgcaagaatggccataatatgaaaaagacacttgcacatgcatgtttatagcagcaaaattcataattgcaaaaatatggagccaacatacctgcccatcaatcaatgagtggataaagaaaatgtggtatatatacaccatcgaatgtggtatatatgcactcagtcataaaaagaaatgagataatgtatgttgcaccaacttggatggagctggaggccattattctacatgaagtaaccctcaggaatgaaaaaccaaataatgtatgttctcacttataagtaggagctaagctgtgagaatgcaaaggcttaagaatgatatcatgggctttggagacttgtggggaaggatgggaggggggtgagagataaaagactacacattgggtacagtgtacactgctcaggtgacaggtgcaccaaaatctcagaaatcaccactaaagagtttatcactgtaaccaaaaaccacctgttcaccaaaagctattgaaattttaaaaagagataaaataaaaatgcatagtttaaaaatgtagatagtattcatatggttcaaaactccaaaattatagaagaatacagagcatccctcccactcttgcctcccaggaacccaattctcatcctccatgatctgcacattaaaagtttccccattcatttttatggccctggatgtagggccataaaatggcttgtaaggatgttccataatttatttaatcagtgtcttagtgagggacatttagattatttccaattctttgccactacaaaaattccacaataaataaccttgtacaatcataatttcctacatgtatgtacatagctgaagaataaattctttaaaatgagattgacacctcaaagggtatagatatttatacttttgatagttactgccaaattgccatccaaaggcaatagaaaatgtatattctcaatttttagatctttgtaaatctcatagatgaaaaatgtcatcagagcacagttttttatttcttttactatgaatgaggtgagtatattttgatatatttaag

SEQ ID NO: 2850 - DNA, 7809 bp, Homo sapiens
aattggtaaaggtacatgccttgctcagtgcagaagggcagggagagaaaatattgcccagtcttgtagccaggattgtagctccttcctacagggaacccaattttagtcagagccatcctaacatattcagcattttagaaccacccttgatgagtctggcatccctgcaggtaattcagaatcagaccatcctaggtgtgatttttgaaagaaaaatgtcatcaatcccaacatgtacccaccatctgaagcttgaagtccctctacagcatcacccagcataatcattgagctaaaatgcaaatacctccaggaatgaggaattcataccccacaaagccactccattcacctttggccagagatgttagaacattctttctctctttgagttgaaatatgcctccctgttacaccttccctgtggttctgcttctgcaccttaacattcaggttgacttccttaggatatatagaaattctgtcaatatctagggtgcccatataacttactgtgtaagctatggcttttgagagtggaaggagatggtaactgggtgcagtgctaggacatggggcatgaactggggcaatctgagcaaaccaggacatgcagtgaccccatcagtatacctcagaaaatctgacagctggtggttccatgtccaggcaatgaggcccttgcctggcacctctaacctctgacgacctgagggtgctcctcacagcacctgggagagtcaagggttccagtggggcttagcatgctatagtcacctgttcaagaggatcttctttctctcccagggactttgtgaaggcctttatccagtttaagaagcctatcgtggtggccatcaatgggccggccctgggcctgggtgcctccatcctgcccctctgtgacatcgtgtgggccagtgagaaggcctggttccagacgccctacgccaccatccgcctcacgcctgctggctgctcctcctacaccttcccccagatcctgggcgtcgcgctggccaatgagatgctgttctgtgggcggaagctcaccgcccaggaggcctgcagcagggggctggtgtcgcaggtcttctggcccaccacgttcagccaggaggtcatgctgcgggtcaaggagatggcatcctgcagtgccgtggtgttagaggagtccaaatgcctcgtgcggagcttcctgaaatcagtgctggaagacgtgaacgagaaggaatgcctcatgctcaagcagctctggagctcctccaaaggccttgactcccttttcagctacctgcaggacaaaatttatgaagtctgaggggccccagctcacgggcccccaacttccagctctgccctgtgtttcggaaaccagagcacagtgtctgccccggccaaggagtttgtcaaggtgtctctttatacgtagggttgtgtccatttcctcgtgtcctttggttgctcctccttggtttgattttgtgtaatggatggaaaacgcagcatacttggcctcccccacctccctgcccttcctggccagagagctgtccaaggctgtatcttcccagggctccgccaagcaccgctgtcctttccccacttgctgaaatgcaccatgacggtccaggaaggggaagaccactttcacattcttctgactcaggctgtgtctacacagtgcctctgacttggagacttggccatcatggctctctctggttgtatttagatcgggtgtcagaggacgaccaatcttagggaatttccagaccaatgagcaaaatgattgtgcacacctggcctcagtctcctttccgacgcaaatctgtgtgactattagggcttggtcttaaaacccaattgagtgatttgcaaacccagatattgtacatttagaaatgttttgttaaatatatatttttaaaacaatgtaagtggaaattctgataatttatgtgtattatatgtaaagctagttttgcaaaaacaaactactagggaaatgttttttctttccttggacttgttttatttatttatttttgtttatatattgtgatgtctgttgttcacacagatactattttcatactaccctggaccaaatcccacacaaggttcatgccgtttggtgcattctagcaatgaaccatgtagaaataaagtttagagagatgaaaacagaaggatttctgtggacaaaaggaatagcgctgcacctctgtgtaaaacggttctcagctgtaataatagaatactagttccttaggtttgtccttaggagacatcttgggagagttttttcttccctctgctgtctttaaggagttaaagggccctcttagcctgaatgatcctgaaacagacccagtcccaaattgcgtgatgttgggcaggagtggggataggccctacctgagaatagcatactgtctagaataagacttctttctttggggcaaatgactgaacttggatcctgcagtctgttgcttccatgtgatcagtgatttctggtattggccagggggatggggaagagttcccactctgctgagctgtctggaggtctgaatcttttccctccagaagctgaaatgactcatctgttttctagtttttttatgtacatagggagcaatgaccaggaatgagatctccttgcccctgtgcccctgggctgcaaggggactccagcagctgtgttagaccatcagattcaagtccctggattaactacagagaaggagggattgggggttgtggttttgagtggtgaggagaaagttcaggaaaacctgaagttgagagcagacaaatggaagggatgtgttctgcgtgaggtttaaaccatgggtcaagcacccagaaaaagctagattctcagattctcaggatggagggatttttttccgtttctatcacagcccctgcgtattcctggaggcccttggccctccccttcttcccctttcctgttgggcaccagcctttcttggcccttctttgaagagagtggaataaggcagcaagaagtgggcacagcttatggaggtgaggcaggcttagaagagagagttctggtgacagttctctaactctctgtggtcctttatcttttcctggcaatcaggtgcactgggcagggcaggtggaatgtattcgtggccctgagctttgagtttcaaagaacacgttgatagtctacaccagatctagagacatggtcctttaagcagtgaccctcaagttaatctggactgctggtccttctgatgaccttggttccctccctggaaagcgtgtctcctttaagagttcatgagggtcaggaaggaggggaaacctctccttcagccagaggaggatggaattaaagtcctgtgcaccctcccctttgtccatgtaggatcctgtaaggacttcggacctgtcctacagggagttactatagggagacacctgcttttgcccaaatgcctgttgtcacagctctatctggatcttatctcctcctttgagaaagcaaatgtgagctttccaaaacccttagatgaccctggttcttacatattgtggcagacagtgtcttcactactgctaaattttcattagaaagagccccctcttttctgttgaacttctgattgggcgcagttatattcagcatcggttgaagtggggtcaggattctccttggacatggaaggggatgtttagaaattcctttagatcagtgtccaccttcattccctgcttgaaagaactagaaatgcttcagctttggatgtactatcaaatccaaacttctaaacatttcaaggatctctgaagattaaggtaggaatgtgaaaccatttctaaggtggaaatcttgctgttaagtcacaggtcctgggtgtaacgggggtggtgaaagtctgtattttggttgtttccatacagtcagttccaccaattgggtgaaagcaggtgaaatctttttgctgcagggtggactgaatttttcactttctgggtagttgttttgatcatgtgtaggcgaattccaggtaacttacagcaaatagatttgggatggaaaataccagacctctggttgtgtcagggtttatcctaatagctttcctgagacagagctcagactttcatttttgatcttccaccccagggccccctctctgtctatgggatcctttctcccctctctctaccattttcccgtaccttcccccataagtcactcccaagagcctgggcaggtctttgaggaattgcggctcattttggcagccccgtcctgcaattacctttgggtttgaaagaatagctgtgggtgggcaattgaggacacctctttagtcagggacctttctagcaatccactccctcccatcctgttagccatgcagtggaactctccttccctctctgccccaaccccggtgatggctcactctcagcatcttatgggaccatctgagttaacaaccctgttccaagaagactttgtgcagaacttttgttagggtggtcataccttctcaccaccatttggaagacacagcctaatgctgatgtacttaatgtgccccttccggcatagaaataatgtctgggtaacagccatcaaaatcactaagaatgacattggatagctatgagaaagtagtagagaattgatttaaaatatcattcttgtttggtatagattaaactaggaaatgttctctctgaagcatgaaaatgtttttcccatgtgaagtttagtacaaggatggaaaaataataatcacagtagactttgaacaatgcaactgtatctctgaatatccacatttaaaaatagccttcactgaatgctgaattgcatttcccattaatttttggttttaaaaattttgtaaactttttttttatttggaatttagtcacatccattaaattttccaatctagtttctgtggaaattttttaacagagagaaacaaatagaaacatcttcaaatcttcctaagtgaatatttaaaatgcagaattgcttatcttctgtttttctgtattcagacacttatatctgttgtatatattagtttagacactctcactaatatacacagtatttaagactctaaatgagatttcttaagtattttattttattctctgtaaatggttttgtataatctttaaacatctacactttgcctttgtagatatttaagggaaaccatttggggttgtcttgcatgtatatttttgttgtagataagtgttgcttagttatttctgcaaattttggttgaaatgcttacagactttaatacagtatatattttcaaaatataaacttttatatttctgtgataagttaggatatgcgttttaggcaatatttttcattaatatcacttgttcttttgaaaaatagcatactggtttggtgccaattttttcattagaatataatgctcttatattgttggagagcaggttaatcttttttcgaagtaattgcgtttgaagtataatttcaaaatgtattgaatttgtgaataagccttaccattaggatcagtaaatttttcaactttgcaactacataagtagtttaagatctccccgtaaattctcactgtgtggcagttgatggagtttgtgaacagagccttaagcttgttgcaaaaaaatttaaaaagggtaatacgggttgtttcctccatgcaacgtaagccatgctgatggactgaatgcagtctgtaattcatggctaatccgaagagtttgattgagttgatggcggcagggaccagatagacaccttggtgattgtctttggccataagaatagaccaaggataggttttccagagacaccttcatactgtaaacatggtttagacacggtcatagggaaggctgctggtccatcatttgttctgaacaaatggcatttcctgctcctgaccctggcagttggccccagattccttgtcgatgacttggaaacgtccattctgggtaaggtcagcactccctgagagatgttaacaaagtttacctatgagtcttactgtgtagacaatctgaagtcaattttagttacacaatcagcattcccatgtgtcctcagtgtcttatcaatgaactatgtgtatcaagccatactaaactggagtttagcaggacaaaggcaaactaaatgtagaacataacatatcagctgaatatgtctatccaggactgtttttctagaacataaatcatggagctccttgacagtgtatccactgtttttggggtttaataaaaccaactagaatttagacttaaaaagaaattattattccttttggttgtccacataaagtagtccagggctatcatatggctaaaatcaagttatttggttcatctctggtatgtatttataaagtcaacttatcagccattaagatggagatttgctttaaatttttgcagtgtgtgtggcagtcagaaaaacccatatctagttttcaacttcacctctggtgtttttatggcttaaccttatatcattgatccaacatctagcctgatgctggagctcttatttctagcctgatgctggagctcttatatctagcctgatgctggagctcttgaagctgactcttggaagtttggagggtgtagagtttcccatctagtatttaatttgtccctgtgccattagtcccagcttgaagtcatttgccagtgtcgatgttgacaggattgtgacaatattgcctttcataaaaccgagaaccaaagaattccattattctaacaaagcctgagtttcatagattgtgggcacatctagacagatatgtgcatgcttgatggtgcagagaaactgctgacttccaccaacctcatgctccccctggctggccatacagagggattcgttgtcatattgaaaaggctctgaaagatgagtttctaattgaagctcactatctcaggttggtgtttctactgtgtagtcccaagcctgtatccatatcataaaagtggaggcctggtactcctccaggttatctggccagtgtagactcctccatctgaatatgaacctccagggtaagaatttttcagacatgtctatactgaacagtaggatcctgcactttccaaatgtctgcctccttttgttcttcattgacccattctaattcctgttaggtgtgagaagaattgtcttcagttctctctccattctcattcatgatggaatcattgatccattgaccagttgagaaatgattgatgctgaagaagtggtattctattggtaaggcttattaccaaacttccgataatgaagcaggctaccaaaaacttatccagcccaccctaggagtgtttggatttgatcatggatgtagcatacaccaaaatccaccgagacctttgcaaaattaggctacttgttttattttgccagattatcatgggagagtctttaactagttctgaatatttgtaagtctgagtacttcatagaattataaagaaggtacagctgaccccttctcaccatgttgtaaatatttactgagactgggtgcagtactgagggataataatcttctgatttatcaaatcctgactgtctagagcaaattgtacactctctttgtgaatggtcctgtaacgtgtatgaacacatttctgggtgccttagaagttgtatttttcatgtgtgctaatatgcagtatttatacattgtgagaagctgctttgaataaaaaggttgaaacttcgtc

SEQ ID NO: 2851 - DNA, 11545 bp, Homo sapiens
caaatgaactggttgcgtgaggagtgaagagaccgtgtttacagtcaccagcaggctgcgtaaagaagtggcccagtgagacagggaaagtgacccagaaaatttagttttgttcagaatgaaagctgctgtatttcatttttgtttcttaatttgacggagtaggaacgttattttccttctctgtcattgagaccagtagcatttctatgttacaaactgaagatatttggggtctcgtcggcttgggattatcaatgcttgggagtgtgagtgaagacactcaggatggctcaaggatccggggatcaaagagcagtgggggttgctgacccagaggagagttctccaaacatgatcgtttactgcaaagtaaggcgcctggtcaagtgccgtgcgtgctgtccgtgtggactgttgtgttctgtgtagggctgataaaaagacaaatgttttctgcctaaactgccttactgataaatgcatattttcttctcacatcctctggttctctagttctaaaattcaaggaagttcatacttgagcacttggtatttaacacttgaaaaatattatgccatttagttttctttaaacccaaaggttgcctaagcaatgcagatgggaagacacattctccttcagtggaaaggccttagtgtaagatgtatgaactgaaagttcttcagactcgtagtatgtacaaaatctgggctgaatgctgtgggagatagagaggtatatttgtatgagatgcttacagttggtaggagacataagatgtacacaaataactgttatagagtctaaatgttaatttccaaaatagatgtgcaagtagagtgttacataatttcagaggaggaggccagttctcccagcctcagaggtgagaatgggcttgtggaagagtggtctttgaactcagttttaaaatatgtgcaggattgctttatgtggaaagcagagaggaagaacataccaggtgatgagatgtttcagcaagggcacagagctgaggaaagtaacagcaaccggaactggttagcttggacataggatgcattacaaggagtaaatggagataggattttgggaagagaggctggctggagccagatgttagtgttgaattagacaatttaatcaagaaaaacttctgtgccaagagttgcaagattgagatctctttgggattatgactgttgccccattgtgctgaatggattgttatcaagatagagcggaggctctaggagagagatttctgtgtctgtgtgaaaggtaaggagggaaaggagagacactaatccagcctgtgaaatcaccttcagaattaagagaaactgataagaggaattaaagtctggattaaaaatgacttggaaactgaaggaatataggcggcaagtagagggtcaaagatgacggggtttttgacgttgggtaaatgaaaatcattggtgctattaattcaaattgggatatttggaaaaagaatacattttaaaggaagaaaatggcacataagtttattttagtacatgctgaatttgacataattgcttcttattgtacacctttttgatgtttgcatgtttgtgaaaatttaaactaactctcttgtatgttaataaggaaataagttaatgttcatttcactaactacttgagtttctactcagttctgtgcattctgagaggctctgtgtattacttatatgggcaatgtggaactagatattcctggatgatcaatatggtgaatttttctcttttccttgtaaaaatagagttctcaaattattctggctttgagtgtaagattctgtaattctttgctttgcaagagaatgtctagataacccatctctaagaatcatgcttattaaattgcgataaagaaaaaaataggttaatgggactcagcaattagtgaaacatacagaataatagacattgagtcattgttactttcttaacccacccccaaactgggagaccccgtgccaggctggtaggaacatgggctttggagtgagacttaggttaaaatgccaactttaccactctttagcagtatgactgtaagttagttctttaacttccatgagccacaattttttcatctgtaaaaagaaaaaaaaatgtgggaggaaggtaattgtgaagatcactttagataaatcgaatgaggcatcttatatcctacttagaccacaatgtggtccgtaatgaatatctctttttcttttcatgtttaggtcttgtagagtcagtgacacttggagaggaaataaatgataaaatctctaaatgttggtgctgttaataagttgtctagagcaaatttatacagtgagtttttttttaagacacaggaaaacaataaaaatatttttatattcttcagaggattgcaaattcatggattattaaagaataagaaatgcaaaggtcatgtaacccaaccacctttctactagaatgtttgtattatgtttacaggaaaaaaaaacttcctgcaggtttatgagaacttggtttttactttttggtggtagtaaggggcccttttctggtttaatttagtaactaacatgtcaattgctgtagttctttagagaaatgacaactagtaatgaaactatatcttactttcgtgtgacaaacttgtgtaaagagtatatatatatatatatatatgttcatgtttatttgctatattaattaccataaaagggacattgaattggttcagtctgttagaaagaagacacacttattgcacagtgtgagctcaggtcctgacaccattttaaacctagttaacctgactgacttaaaccatggttgtacttgaactatgggattttcatatagttttctactcctgatgctgtaggctgccttttggctacaaccaagaacttacttgctgtaggacattatcctcaaggtatcatcagtaagggttggattgtgaagccaatgacaattcaaagcattttctttggaagtccttttgtgtaatcaattattcaaagtcatagccataaacccaaacctttccttagatacccacgactacaatttacatttaaaaaattgtgctttcatttttgttttctttctcttgtttgttgttgttgttttttttctcttgttgtcagacactttcagtgtgaaatttttgcttggactgcattgtgttgattcagatgctgacatttaaaaagccaaatctagagaaatgaagcttttgggtaaactttcgagtaataagtggatgattatgtccataatgttgttgtgacttttaaatgacatttaggatggtaacctcctgacatatgagtaatgatgggtgggtttttaaagcccacacttttcagaacactcttcatttccttttcatgttttcatgtcattaactgtgagaagttgtactttcccaaggcatgacttatttattgacttgaacagactttctaatttagtttttcatccctcatattcacagtttggattggaggtgtgtatgaaaaatgtattggtcacattaaagatctatttaaaagaaaaccttaattattcatgaagacacccagacctgttaaccttttttatattcctgtatccttaggatcctgagttactgaattgcccagtgtaatgatgatatttgaacctagctatacatcacatcatttagggtgctttataaaaatgttaatcctcaaaggaccccctccacaaggtatttctatttaataggtctgagctgggtcctaggaatctgagtttcaagatgttctcaggaaaatctgatgcccaactaagtttgaaaagcacttacttagtcttttacaatatccagacatagtatgtgttgcaaagtaatgagagagttggtgttttgaattagatttttgatttcataattatttgtagatctctcaaaacgtagaagaaccaagctcttgtcatagggattttagtagcttttccttagatattttctagtcttattttatagatgaaagaactaaaagtatagagagggtgagtaacttgattaaggctcctcagcactttcccatggaagccataatggtgtccagggagcctggccactccaatcagttgcctttctagcaccctatgcgactaccatgttatcaaccacagactactgttaccacattgttggagctgagtagccatggggcacattaaattaatgaaaataatatgtggcagatctttgactttcatgtttcttctgggagagttgacttggattaatgtctcacttttttattgatttttaaaaaatactttaagttctagggtacatgtgcacaacgtgcaggtttgttacatatgtatacatgtgccatgttggtgtgctgcacccattaactctcatttacattaggcatgtctcctaatgctttccctccccactcctgccaccccacgacaggccccagtgtgtgatgttccccttcctgtgtccaagtgttctcattgttcaattcccacctgtgagtgagaagatgcagtgtttggttttttgttcttgcaatagtttgctgagaatgatggtttccagcttcatccatgtccctacaaaggacacgaactcatccttttttatggctgcatagtattccatggtgtatatgtgccacattttcttaatccagtatatcattgatggaatgtctcacatttttaatgctaaagtttcattctactcattggtgcttttgcttcttcggtaaagattttctaaaatgtttacataggtaagattgcttttgagtaagagtaggttgctttctgattttgtttggatctttggtgttaacaatgcctcttgacaaagttctcctaactagactggtaatttgatttgtttgggtcaggaggcatggaagacatcacactctggatgtcttctacatccagaaggatggaggcatggcagatgtcacactctggatgtcttctacatccaaaagctggaggctctgcctgtctggtcccagctttgtgtggagaacttcactttcctgattctacttcttgttttgttttctaccttcttcattcttttcctccttccttttcaattgtgagatacttctaacacaaaaagaatatattcagtgtccatgtaaagtagaaagaattaaaaaatgaattatatgcactcaccattagcttaataaataaaatgtaatactttggcctcatttccccttctgtaaagggaggaaattggtctaaaaatgtacaaatacctttctgcaatgatttcaaagttccattctataactttttgatctttcgtaaattagtacacttccctgatatcaaaacaatgttgtgagactatatgcacgtttaaaggtcttttgagcttttgaagaaatattttagatagttgtaggtaatctaaattggattgagataaagcccagttaagtcaggcattagaataaaaagctttaattgtaattatttaatattcaacagtggaatttagatgacatcttggtggcaacctgtttctttggcttgctaataacatttaagacatttataaaattatcattttgtagtattaattatatgctatatacataacaagtggtgtttaagtagcaacactgtacattgccagtagtatatagtgtcatagatgaaataggggttttagaggaagacaaaaaaggccaatgttcttgtatatcaacaggttagttgcctagcctcgtcactgatggcttccttcacctattcatttctagttattgactccttttctgctggaatttgagtctagcctttatgttgctctgataccccaaggtcactcttcctaatgatttagggcccttgaagtcctgggcagttgttggtttaggcatacatccagaaagtaaatgtcacactattttagttacattggctgtggtatgcagcaagaagggaaggatctagcctggaagaatccgatgctatggaggaagctagggatagagtgtggtttggaattcatagagggcagtggtagaagccagcacaattgagagtctggggacctgcaggtcctggtgactaaggcatgatgaggattagaaactgtcgaatcaggaaatacgtattgagtgtcatttgtgtgccagacactattagatgctaggaatgcaagatgagaactgagccctgaatgagcccacaggccagctgggggtaaatggggaactagacaattacagtgttggtagaagcaactgaggggcatgggaggaggtagaggggtcatgtagtccatcccaggagaggggatgatgatgtagaagacatccagaggatttggcacctgcttcgattcttgaaagatgactaggaattaaccagatggaggaggagagagaaggtgtaggaggcaggactagcacctgtaaaagagcagatttgtgatgtcgtataccgagttcaggagactttaagtggttgatatgaagctaggtttctgtgatgaaaggttgaggaatagagctagacagatggattagggccagatcacaaaagaccttatgtaccatgccaaggagtttagacattgtaaaagtatcttccctttgggcctccacacccaagttcaactcctttgcatgctgctgtctgccccagaggctgagctgtgaggactacatttacagggctcctgtgacctctgggtttcagttgggtttggttagtaaaagtctggaaagagatgggagggaaggagaatcgcaatgtcagagaatttcttctcctgggtctcactctgcaaaaccttgcactggccatatccgtctactgaagtttgttgattctctcaaggcagactactttcctcttctgggtccggacatcctttttgtctactcatccttttgggcctttgccgactactttcctcttctgggtccggacatccttttcatctactcatccttttgggccttggggtggttccagtttgtatttgttatctcttgctgtgtaacgagttatctcaaaactcaatggcttgaaaacatttattatgtcacaatttctatgggttagtaatccaagtgcagattccgtgagttctccagcacagtgtctttttaaaaggctgtgatcaagatgttgactcggattatggtttcgtctgaagtctcagctggggaaaagtctactcccaaacttacttgtgtgactgttggctggattcagctccttaggggccgttggaatggtggactcggttcttcgttggctgtttgccagaggccattcttagttatttatgacacgtgtctctccatatcgcagctcataatatggcaggttttttttttttttttttttttttttttatcagagtgacaacaggcagagaaggaagatgggtggtagtagtcttagtgttttataacctaattttggacatttttttctttattatactttaagttctagggtacatgtgcacaacgtgcaggtttgttacataggtatacatgtgccatgttgttttgctgtacccatcaacttgtcatttacattaggtatttctcctaatgctatccctcccccagcccaattttggacatattatcccatcccttttgatagtaagaagtcactaggtccacccctcactcaaggtgagggatttacacaaagatgtgaataccaagatccagaattcagaaaatctttgtgggccattttggaagccatctaccacacagctctacttctactagccaggggtttctgagtgttttttttttataatttccctgtaccctagaactcctttaaacttggtccttttggaaatacattttccttaaattgtcctatgtatatcatctgtttaccaataagaccctaacgaatgcaagtattatcccacaagcaaagggaagcgattgagactctgcgtttcttgataagggaattcttcatgaaagggtttgaagcaggggagtcatttgtccaaagtggaggatgggatctgaaatggggaagtcaatgtggagaagattcagtgtggaggtcaatgggtgatcgatgtggaagggttcggtgtggagggagagtgttggagaagtggtaggattggaggtaggaggacagtttagagattgaacaggaatccaggtgaggaaaaatgatgcccaaatcagtggcagtggtaatacagatgggaggatgtgtttgagagatgtttaggaggttcaggcaacagaatttgggggctgagaagacgtagggagaatttgagaataatgaggaggaatgaggagtcttttccctaggctatatctgtgattctcagaaagtctcctgggataaacttttgaagcaaatagctgtagaactggattgcctgcccctctcttccctgtatgtagataaattgagagagcccaagacagagtctgtaaatggaccaggatatctgggtatttgttctggctgccccactccactagctcatttatggccatgcgtaagttgttcctactttttgttaagtctagttctttaatttgtgaagtaaggggttagctatgctgggtgatctctaaagcatttttttagatctaacattctaggtcttttgtaatctaaaatagagaaacccacattttattattttactacttcatagcctcctttactttatttttaattttctttaaaaagtgaaccgagccaaaactttaaaaacaggtaagtcagaatgtttaaaacaaatggcttttggtcttcagcacttagggcttgttttttttcactctttttttttttttaacattaaataaaattcctggccacatgcagtggctcatgcctgtaatcccagcactttggaaggccaaggcaggcagatcacctgagatcaggagtctgagatcagcttggccaacatggcaaaaccctgtctctactaaaaatacaaaaattggccaggcatggtggcacacgcctgtaatcccagctacttgggaggctgaggcaggagaatcacttgagcctgggaggcagaagctacagtgagcagagatggtgccaccgcactccagcctgggtgacagagtgagactctgtctcaaggactaacttcagaaagtgttcagggtaactaatttaattgttcagtctacattttaagattcctttcattaaattttttgaagctttttttattgccttaggaaaaaactgttctgttttccttttcccccaggattagacttgctggaagaaaagctcccccatcacattatcttggttggcaggagacaggcatgcaggcaagtcccagaccagtggtatcagtgtccacagatgaaagggatggtatttttagtgtggggaatagctcagtgtggtttcatatgatgcattttgatgagtataactttctaatttgaaaagcctttggtgtgtttacgtcttcatttaatctttccaatttctccccctcatttcatttcaaggagtctaagatttttcattttggcaggcagttgatcactcttgttattgacactcctttgcagtattcttacactgtggagaacctgaatggctgtaaattccctattggcaggattttggagaaaaaaaaataaaagcgaatagatacctgtgaaagaaaaaataaatacattttaaaataattggaggatagaaggattacttttaaaagttctgttagtttgccagtacagagcaaaacagaaaatggacacatttttttgatcagcattctctgttctaaaaacttatttcaataagggaaagaatatgcaaagacatatatatagatatagacatacacccactccaaaagaatagtgatatctttctggtaaataatatccaaagtttggaaagaaatcaaatatccattgaaaggaaactaattttagggggataggattcacatttggaatgatctcatagttagtttactggatttctgttctggtcaacctaataattgtcttgaaagtgagatggctactgacattctagggtatggttagggagaatattctttatttttaaaaccctacaagattttttcattttttaaaataaaatgtcttatttgttaaatatgatggttatgtaggtttactcaaaagtgattttttccattgctctttattattttctgcatctctgtgcttacagctgaaataatttttagtattttctttagtgcaggtctgctgaagataaattctctcagttcttgtttgtctaaaatatctttgggccaggcacgttggcttacgcctgtaatcccagcacttgggaggccgaggcaggaagatcacttggcccaagagtttgaggccagtctgggtaacatagggagacaacatctctacaaaaagaaagaaataaaataaaaaaaaattagctgtgcatgttagtacatgcctgtagtcccagctactcaggaggtggaggtgggggaatcacttgagcctgggaggtcaaggctgcagtgggccatgattgtgccaccacactctagcctgggcaacagagtgaggcatggtttcaaagacaaaaagaaagtctttgtttcatcttcattttgtgaagggtgttttttctagatttagaattctagattgtcggttattttatttatcataactgtcattgtctcttggctttcattgtttctgttgggcagttggctgtaagtttgattattcctccttcgaatgtaatctgttttttcctttggctgcttttaagatttatttcactttggttttagcagttttattataaggtgtgattttctttttaatttattctccttagagcttatgagacttctttttatttggttggtgcttggggattctttttttttttgatggaggcttgctctgtcacccaggctggagtgcagtggtgcaaccttggctcactgcagctgccacctcctggaatcaagtgattctcctgccccaacctcccgagtagctgggactagaggtgcgtgccaccacgcccaaataatttttgtatttttagtacagtcggggtttcaccatgttgaccaggatggtctcgatctcttgacctcgtgatcctcccacctcagcctcccaaagtgctgggattataggcatgagccaccatgcccgactgtgcttgggaattcttaaccattaacttttcaaatattgtttatgcctagttttctcatttctctcttcttgggattgtgttcatatgttaggacctttttcctctagatttcatgtgtttcttatgctcttttctgtattttttattcctttgtcattttgtgcttcaacatggatattttctaccgacttatcctccagttcactaattctctcttcaatatattagataatctgtggttaaagtcatcccattgaatttgtaaccttagttattgattttttaagttct

SEQ ID NO: 2852 - DNA, 46394 bp, Homo sapiens
cctgccgtgtgaggtgtcagtgtgcccctgctggggggtgcctcccagttaggctgctcaggggtcaggggtcagggacccacttgagggggcagtctgcccgttctcagatctccagctgcgtgctgggagaaccactgctctcttcaaagctgtcagacagggacatttaagtctgcagaggttactgctgtctttttgtttgtctgtgccctgcccccagaggtggagcctacagaggcaggcaggcctccttgagctgtggtgggctccgcccagttggagcttcccggctgctttgtttacctaatcaagcctgggcaatggcgggcacccctcccccagcctggctgccgccttgcagtttgatctcagactgctgtgctagcaatcagcgagactctgtgggcgtaggaccctccaagacaggtgcgggatataatctcttggtgcaccgttttttaagcccctcggaaaagcgcagtattcgggtgggagtgacccgattttccaggtgccgtctgtcacccctttctttgactcggaaagggaactccctgaccccttgtgcttcccaagtgaggcaatgccttgccctgcttcggctcgcgcacggtgcacgcacccactgacctgcgcctactgtctggcactccctagtgagatgaacccggtacctcagatggaaatgcagaaatcaccatcttccgtgttgctcatgctgggagctgtagaccggagctgttcctattcggccatcttggctcctcctcctttttttttttttaatggagtttcactctcgttgcccaggctggagttcaatggcacaatctcagctcacttcaacctccacctcccaggttcaagtgattctcctgcctcaggctcctgagtagttgggattacaggcatgcgccaccatgcccagctaattttgtactgttttagtagagatggggtttccccatgttggtcaggctggtctcgaactcctgacctcaggtgatccgcccacctcggcctcccaaagtgctgatattacaggtgtgagccaccatgcccgacctacttttatttctttaaggaatctccacactgttttccatagtggctgtactagtttacattcccaccagcagtgtaaaagtgttcccttttcaccacatccatgccaacatctattatttttaaatttttttttattatagccattcttgcaggagtgaggtgatattgcgttgtggtttttgtttgcatttccctgataattagtgatgttgaacatctttccatatgctttttggccatttgtatatcttttgagaatgtgtctattgatgtccttagcccacttttttataggatttttttttcttgctgattagcttgagttctttgtagcgaatatgacgtatttcttaattttcagagttttgtaatcttcggagagaaaactcttaatttttagttttgtaattcattttgtaattcagataactacaaggcagattggcataaggaaaggtccattaatttagtagagttagcatatttggaaaataagggatagaaatattgattccaacagtagaaaatctggggtggagaagatgaaatgtgaccaactatttgaagtatgcataagactttatgcagaagagggagagaggaacagttagggcagatgtgattgtatgatcaaaggagtaggaattggacagtctgaaattgtatagttggagataaatttggatggaaatctgaggttactaaaggtattgcataaatgaaagataatgccagagtacaataagagttttcagaattacattttctgattttgagaatctagatataatttagtaactttttgctccaatattctcaatagttttttagtactagattttacattttaatatataatttctgtttttattatttttttcctaaactttttcctaaaattatttttgtccagtctagtacactgtcagtttatccttttcctatggaaataccttataactggttttcttgtttccccttttgccctcttccaactttttttcctgtacagtagccacagtgaccatttaaaaaaatgaagcaaattttttcactcttttgcttcaaacttgtgggtggatttccatcattctattttaaaaaatagattaatgaacatctagaagactttaaaaagaaataagctatttgcgatatataagggaaaagagttcgatacttctgaaagaactttctttatgatccataaagcaagacttcctgtcaggggttcagatatataatgtgtaatagtaatagttcatcaccactaggcactgcttcaaggacacacacacacacacacacacacacacacacacacaatcctcaccattattatatgcataaggtactagtatcatctctattttataggtaagaaggcaaaggcacagataatttgtatctaaaaatccagacaaggaaaccttagccaaactggtgatccccagtttcatggtcttctaatttcgtgatcccactgactgcagatcagtggtgtctgcaagacatttttcacttgtcatttcttgatttccatgcctttctactaagttcaatttgctgtttgtttaagtatctagagtgaaaatctgtgggagtgggaattttcttagtgtttgtctaaaaatgtgtttattttgcccacattttttgaatgataatttaataggatatagaactctagactaagatattttcccccagcacaatgaaatattatttttggatgctagcccctgttgctgcagttgagaaatctattgtttttctaattgatttgtttttcctctttggttactcttatttatttttaaaattttattgatgtataaaatacacataggaagtgtacaaatcataattgtacaactctattaattttgatatatatacacacttactttaccactcagatcaaggtttgaaaacatttctaggatccagactgttcccttatgtccattctcagtcaacatccaccctttcccctctagcacttggatctctctccttttttaaaatcataagctcctatctacgctcaattttttttgctcttttatccagcatttctaggtgtttatggatggaagtttttcaggtgatcttgcttgaaatatgacgttaagtagaagtctaaggtaaaggttatttcccattgcacttaaaataaaatctcacctacttaacctggcccacattattctgtatgaactggctcctgtgcaccccttgaacctcatctcacacaactcccttcctcattcaagcagcactggcctcctctctgttgcagagtacaacaagccctttcctaatgccaggccttgtatttgctgtccctctgcttagaacctttttttctgtagttctttgcatggctagtttacccttcaagtcagactgcaatgtcagcgcctcagtgtcctcctcagtgtgaccttaatctctactcatcactctatatatttctttcacagcatttatcacagtgtatatcttaattggtaatttatttttatacttctttaaaaaatcaccttttattttagatataaggactacatgtgtaggattgttacatgggtatattggacccagatagtgagcatggtacccactccctcctgcctcactctagtagttgacagcatctattgtcctcgtgtttatgtatatgtgtgctgaatatttagctcccacttatataaatgagaacatgtgatatttggttttctgttcctgtgttaattcacttcagattatggccttcagctacatccatgttgctgcaaaggacatgatttccttattttttatggctgtatagtattccatgctgtaggaggcatcgcattacccaacttgaaattataccacaagactacagtaatcaaaacagcatggtatgagtacaaaaacagacacacagaccaatagaacagaatagaaaactcagaaataaagccatacacctacaacaatatgatcttcaacaaggttgacaaaaacaagtaatggggaaagaactccctatttaataaatggtgcttggataactggctagccatacacagaagaatgaaactatacctgtacctttcaccatatacacaaattaagataacatttctttttcaaaaatttaatttttaaattttttgtttctgactgcttctctatctcaaatgtcagctctctgaaattaggcacattatctgattcataactatgtgattcgtcaccactatattcattttctaaataaatgaatgaaataacttttgtagcttcagaaaattttaactccaaagaacatatatgttacgtatgcttgatcactgaacacttaagagtctgttctcacactgtgaaccagattcctgcagtgcttaaggcactgctcactaggcaagttagacatcttctgaaatctgggccagttgtggcaagttaatgatagaccatttaatagactagcaaataaatgtattaggttggtgcaacagtgattgtggtttttgccattaactttcaatagtatatcaaaagatatcaaaatggcaatatttctggggtggttcataaacaatctaagccccattgatgttgggtcccactaacccttgttatctcacccccaacctgccttctgggtctaattttaaagttaagctctatttctcccttatctctcttttccaatataagctaccagcccatttcttgctatcaagtttttaaactatttctgcatttcaaatagagtcctgaaaattcctttcgtaaatcagaagggttatctgccattttctaagcagctgatttaagagaattggatatataattgtgccaggtccttagacagctcattatatatgtaagcttatattttattgcttcgagaaaactgcataaaagcaaaatcacaaattccagcagcatactgaagtgactacattgaatgtagatattaatctttgcattctccaatctcttatgtgcaaaaccatttgtgaaagcaaagatagcatgcaagcttcttaatgaatatttgtccagtgagcataagaataacaacattttgatattttcaatccaggtgatagagctttctttttccctctgctctctcagatgtctctagtggagtcaatggttaattaattggtcaatattttaaatatttattgcacttttaccatgtgtatagcaatgggagagggctattatgtgcagggggaagagagtggcatcagtaaggaggtggagacaaagctttaagacagtgtttttacatgaagataagagaacaaaatagtagtcatttagcaaatatttattaagtacctatcacgtattaggtattgtcttagacattggagatacattctcaattctcatggactttaaatactactggagtgagaaaaacatttagcaaacatattggtaaattaaatgatatattatggtgataagtattaaggagtaaaataaaggagtgaggaagtatagcgtgttcaaagactggaggcctataatttaaatagggtggtctgggaaagggacagtgagaacgtgatatttgagcaaagacttgagagaaggtgcaagtgatgtggatatcacaggagtttacggttatagaaaaatttaatattaagcagattatttgtatttgtttctaaatctaataaataaataagaaaataaataaataagcaaaaaatcttgaaacctctatgaatactgtcaaatcagcctgattagtatatgggtctgctctgctagtcctttacaatcctgttcttgcatccagttgaggtgttgtctggctgagcagatgggctgttaataagcttgagttctattgtgccatctgaatcttcttcatctctgtagcattagatgtatcacaaggtgagtcagggagctggtgaggcagatggcacctatgtctcactgtggttgcattaggcaatgtcctatgcatgcatatggaagtgcagacagacagtgcaggtgggtgggaggaaaccaactacccagagaattttcactaggaatcttctcacagcagaaaactggaagattgatcaccttatatttattccttcattacaatgaggacctccagagttttacagcctaagaaacgtgttttaagaggcaacttctccaagaacacttctctaaagaagactttttgtttgctctcttagactggttcaggtgtgactttactatgactttctaaacttctgctgaattctgctcttttcaccactgtacaggaaagggcaggccttgttgactataggattgctatgaaactttcttaaaagttacccagaggtggtgtctgtctttcagaatgtggaagatagtatcactttaatttggccatctctgaagatggaaatagggaagggagttggtattataaggaggaattttgatgttattttttctaccacttgcatatgattaatggccaattacaggtattccaagttagtcataggatccagttattctcataaaattcaaatggtcacctagaagtcaagtttttttttcccataaaatattgggaaagatttatttgtttcattgcttttgttttgttttgttttgtttttggagacagtgtcttgctctgttgcctagtctggagtgcagtggtgctgtcacagctaactgaagcttctatcgcctgggctcaagctatcctctcacttcctgagtagctatgactacaggtgtgcaccaccacacccagcaagtttttatttttggtagagacagggtctcactatgttgcttaagctggtctagaactcctggactcaactgatcctccttccttggcctctcaaagtgctcggagtgcaggggtgagtcaccacacctgggccagaaagatttatatattacattttatgatatctacaaagggaaacttttgctagaagaaaatatgtctattaggcaatcattcatgtcccaaattgcaattacaagaatcaaaaaggatggggagaaataaacatatgttgaaaactttctgtgtgttgggtgctttccatatatggtcatctatttaaacttcacaaaagccccatgaggaaggcattgtcctcaattgacgggtaggagagtttaggaaactttcccaaggtcacacatcaagaaagagttagagtctgagttgaatccagatctgtttgactccaaactacttctcactgtgctatttcctctctgcatggatggtgctttctgactttcccattagtaccattagttacttgttttacatattttattgtctctttggcagataatgggtattaggtgccaagaattcattaaaacattataccataaaacaattatttataaaacaatataatataaaaatagtattaactttctgtattagttatctattgctatgtaaaaattatcccagttgggtaataatgatgcgtcaatgtaagttcatcaattgtaacatatgtaccactctgttgggggatattgacaatgggggcggctctgtgcacacatggagggagaaaggatatatgggatatttctgtacctttctctcaattttactgtgaatgtgaaactgctaaaaaaagaattcttaaaaaaatttcaaaacttatttacccccaaacatagcaagtaatgacaatatatatttatcactttctaagagttaggaatctgacaatgacttagatgggtgattctggctcaggatcccttatgaggctgcattcaagctgctggctggggctgcagtcttctgagggcttgtctggggtaggaggacccatgtgtaaggtggctgtgaagaagaagccccagttttttgccacatgagcctctcactaggttacttatgacatggcagctagttttccccagaccatgtgctacaagagagaaagagagtaagcaagctggaagctgtcctgtgttttacaatctgattttggaagtggtatttcatcacttctgctgtattctgttggtcagtgtgggaaaggactgtatagaggtatgaataataggaggctatctgtgagccttcctggaagttggctatcacactttctacaattttaatactttttcttggttgagaattgggaaaaacatcttccatgaattgtctttttgggcaccttttgcccgcttcttccatgataatatttaaaggttatctaatttgatcattctcttgttagcttagtatcaagcacatgtgctggaaagaactttgattattacttttgtagggactattcaggcttcatatcctgaacactctttatagaaagagatacagaattcttatcctgtatcttattttagctctaaccccaaccccaaacctaagcatcatatgcctgcaaattgcctcaataatgtttaaaaaaatccaatcatatctgatcaaatatagggccatctttctattctggagtatcttttctattactctttgactgcggcaatttttgttttatctccaattgtctcagagttgaagctggcaaagtgagagtaaatattcttccccagtgcaatgcactctgctatttagaccatgtgcatttggtttaatacataagtgcccagtgaataaacatgagttgattttctttaaatgacagctccatcttctcaggacatccaaggtccaaaagaccatctgtgtcattgtggtagacgttgtagcttctccttgcccatcttaagtgcaagtttttacacctcagctcttctctactcaggttgagccccttccctaatccaaggtgaccattatccctcagcagcttagataactcactgtagggattctagtgtcggctttttataaagctctctggcctctcaatcaaagtagtccagaagcccatatcaagaatattttatcttattatttgtcaaagttctactttttggaaggtgggaaaacacttgttaaaaaatgcacatttctaggccttctccagatattctgaatcagaatctctgtaattgggtgggtagggagactcagactatatctgtgattttttttttttttttttttttttttttgagaaagggtctctcagtatcacccaggctggaatgtagtggcatgatcatagctcactgcagcctcaacctcccaggctcaagcagtcctcccacctcagcctcctgagtagctgggattacaggtgcacaccaccactcctggctaatttttgtctttttgtagagatggggttttgccatgtcaccaaggctggtggtttttaatttaaataatacatttattaaaacgaaatttcatacaaagaatttacctttttaaagtatacaattcagtggttttcagtatattcacaaaggtcggcaaccatcaccagtaattaatttcagaacattttttatcacccccagaacaaatcttgaactcattagcaatcactttccatgttccctctccctagctcctggcaaccatgaatctactttactttccgtttctatgattactcattctggttattttatatatggaataatacaatatgtgtggcctttgtattgattggcttctttcacttagcataatgatttcaaagttcatcaatgttgaatcataaatcagtatttcattcctttttattgcccaataataatccattgtatggatatagtatactatgtttacccattcttcagtttatggacatttggtttgcttcaacttctagccattatgaatgctatgaacattcatgtataagttttgtgtggacatgttttcagttcttttagatattgttatggcctaagttatgccctccccacaaattcatatgttgaattcccaaccccaataccccagaatgtgattacatttggatacaagggtttcaaagagatgattaaattaaaatgaggccattagggtggacccaaatccaatctgatgtaagaagagatcatgactgcagagagatacctagggtacacatacacagagggatgaacacgtgaagagaggtggcaagagggcagccagctgcaaggcaaggagagaggctccaggagaaagcagccctggttggcaccttgatcttagttttccagctttcagaactatgagaaaataaatttctgttgtttaagccacccagtctatagtattttgttttgacagccctagcaaatgaatataggtgtacagctagaagtggaattgctggctcatatggtaactgtatatttaacattttgaggaatggccacactgctttccaaaaaattgcaccattttacaatccaattccttcacatccttgccaacacttgttgtctgctttaatttttttttagctatcttagtgggtatgaagtggtatctcattgcaattttgatttacatttcttgaacgattcatgaggtgtgcattatttcttatacgcttgtgttttaaaacgaagttcacaaataatttttattcattccaaaatttgagaactgctgtgcagatttatcatacttcaaagttgttacccagcttaaatgctttatctgggacttcagttgtccaaattaaagtgacctatgctatagtatggtcagtagaaaatatctatgttaaagttaatttatgagtaggccaatcagtccttaggagtatatgtgatgtgacctcagaaacttcacaccagcttgttttcttgcctgcatctgtgacatctaacctctgagagcagtaagtggcaaagtccactttgtcttgggagctagttagtgggaaagagaagccatccttgtgtgatatcctgggtgtgacccttgttatcactagagacacaaccatcactgtgcctcctcatggattaactgcaggctggctgagcctttagaaacaagttcagcatcccctagtttggacttactgctttatccaagtccagcttctgcttttggcttcactcaccttttgaatttacattcttttttgtctaattctgagaaacgtaggtgtttccaaatttacactctctaaatgtaactgagtgttgatataacgtggctctgaaatactgttggagagtctgggaaacaaaaagttgggcaatctttttgaggaaatgctgggcagtagtttttacttgtgtctctattataagtcacatgttcttataaataagcaagaaaattcctttaacattaagtgctgtgtaagaaaactggatggaaatacgtcacttttattcctccttaccattgctagattaaagtgtgtcacttacctgcatgttggggcctcgagatgctgagagtagaaatcaagttctgctctctctccatgaacttttggatcagcaggccgccactgttaatagaagtaatcctaaacccctgaaaatgcagtattattagcttgaaatttctaggcaagttttttttttaaagatttaacaatttttggcaatttctacacatttatattacgtggattgttatttctaattcctgctattaaatatctggcacaaaagtagggatgttaaatctttgcatttcagagctcagctcaacaaacgtggtgaagtttcataacaacaagtgggatgctagtctgtcagttttcagcaaaatgctatctctctttgttatgatgcttcttagtgatgatagtttctctgtaaggcagtccttggtattaactgaacataattaagctttacttctgcattgtagcaattaaagtaaaatagaagaaaaatctggcctgatacatgttagagttgttagattttcatttccatcctctatttctatttgtggaaaattctccattctcccaccattctcctcctaatgaagcttcaagggccctttcttccttttcccgccctctggcattgaggataaactagatcccaagattcagcagctacctcagctgactaggagccagctcaagatttttgtacatgttagattgaaaggcttaatggactcccaagggggagagatctaacaggcagttggacacatggacaacacatttattttacaaagttggacaatgaaaacaatatatcaactcaatgtttctgtttcagtagcaaaatatttgcaagcattatgtaataaaatatgaaataatatagaagtaacctgatagataatttgtacataatgtcttagtaatgtctaaggaaattggtaacatcaattcaaattacagaattatcataatggtttagttatatgaaaagactgttaacatttcattggtcaccattgataatctctttttattagatttatatttaacagtgattaagtaccacaatgtgctggcaacagaatagaataagggctcagaaattgttcctctccagtgatcttataatcttgccttatgcccatgaattttcttttttatttcttctgtgtggaccatggaacagtttgcattattactgctcataaattctgccctgatgagattagttttatagatgtagaatcaataatacttgaacacatttgcagctgtgtactgcccagtattgctcattaatggctttaaaagaatcagtgcattttgctagaagcaaagataatgagccattgattatccctgcacagcacaatttacagcccattttatttttaatgcaatgttaaattaatttgtaaaagatcagaagcattgctttattttcaagctgtgattaaacagttattgaacttttcatggagagcattaatcaattctcatctcttctgatttcccagagttctctgaaaataaagatgaatagcttgtgattacccacacttattgtgaggcagcaaacatggaggagaaaacatccttatggggttcatctctatgtgatggaatttgtcaggaagggttctagtccaagtatttttccttaagttcagattatggatatattctagatcaatgagtggggatggaaatttcactagagttttaactaaaagcaccttgaagagtatgaagatacatagaagttaaggcatgcatgtgtattagttaattcttccactgctataaagaaatacctggtcaggcacagtggctcacacctgtaatctcagtactttgggaggccaaggtgggtggatcacttgaggtcaggagtttgagaccagcctggccaatatggtgaaaccctgcctcttctgaaaatacaaaaatcacacctgagtgttgtggcacacacctgtaatcctagctacttgggaggctgaggcaggagaatcagaactcagaggcagacgttgcagtgagccaatatcgtgccactgaactccagcctgggtgacagagtgagactccgtcaagacctgagactggataatttataaagaaaagagatccacaattccacaggctccacaggaagcacggctgaggaggcctcaggaaacttacaattatggcagaaggtgaatgggaagcaggcacatcttgcaaggtcagaacaggacgaagagagtgaagggcaggtgctacacacttttaaacaaccagatctcatgagaattcactcactatcacgagaacagcaagggagaaatctgtccccatgatccagtctcctcctaccaggctctgactcttaacactggggattaaaattctgtatgagatttgggtggaaacacagatccaaactatatcagcaagagtcatgcttttgctttggaatgatgtatgatttaactatgctcacctacctgtattctttcttcttaaatgtcttttaagctcactttaaaaatatttacaaactcatatagcttttaccttctttatcatttattagcaaacttctatccttaaccgagtctagctaaattagatattaattgtacagaaggactaacatcattgtggtgaattgcttaggccactaaaatgaccttcagacacctgtttgacttcagaagtaaaggactgatttacattctcaatgaagtacttcatagtagatactagggagaaattataggaaaatgagcagagtagaagaaagtgttatatagagtcagatgtcacaatttttgattagatggtgatagaactctaataggaaagacaaaactgttctatctgggaattagcaggatgtagaggcttcttaattacagtgggaagaatagatttagaggggctaagaacaacaactagactttcctattaagggaagggcaagttctagaatggttgggataagaaaattatcctgtaagggctggaagaaggtccacgttaaatttagtatccacggaataaagtcaatcaggcaagcaattacattaggggcccagaaacaggctatagaaatccaagtagtctgtcaaaacccagaaatggggaatgagggacaagttgatcttacgggccccgcaggacagttagggagaaactatgagctcaggattccaatccctacttatcagaactaagtagcagtcctgtttaaagttagaataaatttagtggtgatgttcacccagcatcaagtatctactacacatgctttggcaggtctgatttgttggattagacaacagggacatagggtgaactttagggacctagagacgacctatggagagtgaaatgccttcaaataatactaacagggaacactaatgaaagtgtttacaggctggcccagtaagcaggtagtcatctaaagatgtggttcaatgaccgatgaaaggatcatctgcttcaaaatggctctttgactggcttgctgtctgattcagtatcttcagaccttccccactccctgccacttgctttctctctctttctcctagattttatttactctttgaattattgtttctgaaatatagatacggtgcttgggtaaaaagtcttaatgatttgaggttgacatgttttagactgaggcacagagagaataagacacagaacagatttgctttgtgtagggtaggagaggacagaagaaattagacacttagatagatatctccacagattgcaagcctgggttaaaagtagtgagtggtgctgaacatctggggaattgtgaaagctcttgttgctctgagggagtggagaaattccagtaaaggaatgcagagatttggtaagggcaaacttcagttaccttaaaatgttgtccgcgactgttctgtacagcagtaaatcaacaggttaagtaaggtttacattggaaggaaagatgggttgcgactctttcttgtttgtgtatgtttttgtgtgtgtgtgttgtagttcaaaacaaatacataaataaatgaaattagattgaaatccacaaatgggaaggcagtgggatgcactaacatgagaggcactaagtggtcacatgggaactgttcaggtagtggtgttgtcagagtcagatgtgtagattcctaggtaaagggaaggcatggttagacaaagaaaaatgagggacacataggttatatgcattaaaaggatgtagtgaggtgtgccttaaggaattgtaataagtgacttaaggagaaattgacataagattgaggaggtgttcagtatttatagattcaggatatggggctataaagttacataaaatatttgtagcagcaaagggcttgtgtgaaatcattgtacgtgttcagctttgaacccagatcattgctattatcttttctgtgtcaaagagaggtgtatgctgttttaggaaaactgaatatacaaaagtatatactcatatatataaacatacatgttggaagtgatttgttacattagaaaagggttcatttcagcattgaccatgcattcttgggggactattgcctttgaactggcatggccataggggaaatctgatccaagcttttaccaaggcagggagcccatccatagcaaatctgttacataagtattgcctttgtgttaacacttcacagtatgcagtaaagaaatcactgtctcagttttacagatgggaaactaaagtaagaagatatctaaagttatttagcaaactacccccgatttctaattcagagcttttcccagccggctctccagttgctcatcttccaccaatattatcagatgcctctttgctctgagactttccattaggtggggtattattgagacaactggaagatgatgcagctttgggctcagccctgggtttagacattggctctgtcatctattagctacaattaactaaacctctttgagtctatttgctcacttttaaaatggaatcagatgtctactttatttttttctacaaggattaagtgagatactgaatataaactgcctaggacagtacctgacacttagtaggtgctcaaaaaatgtttgattgctcgctccacatatgcctcagttgttcactttgtctatgaatacatgcagagctatcttaatgacagactaatttctgcaacgtcatgtcctttctaaatatgtagttcatttctttttaacacatgccattcatctaagcctctctgtgggctgtaaaagattcataaaattcttgattttgacatatttctagtgatcgttttgaattagagattaaagtttgaactactgcagaactttgcataggaatttgacttatttgtcttataccttaactgaaataaacttgatattagacctttgcttaagttagctgaattaattctgctttaattcaagttcatctctgcagtggaaaatgacaggcattattgagttatatacacttctcatccttgcaggagcaatttaatacactgcagagcctgtcaaaattcaattcaaggttgaatgactaatgcataaaagtcgattccatatcctatcacagataaagccagttatttctttttattaagtagatggggatgctatttggatctaaggtagtaaaagtttgaaactccaagctttgcaaagttagaggagatgtgagtgtgtggaaaactagggagtttcaggagtaacatctgcctaaagaaatgaatgaacacagacagagtttgacttggtcattttgtcctttatgcaagtacaatttccatagcttttgaatttaggagtaaacttaacacaaagccaagagctggaggaataagaaaagttttctaaggctcttactttctagcaatgctgctgtaatctaaatttatatgtgggtatgtatgtgcatgtgtacatatgcatgtatatgtgtattgggggaacctgcccccgatagtcacgtaggttcttttctattttccctaagtgtcgactggtctgagaaataaagggacagagtacaaaagggagaaattttaaagctgggtgtcctgggagacatcacatgtcggcaggttccgtgatgccccctgagccttaaaaccagcaagtttttattagtgattttcaaaaggggagggagtgtatgaatagggtgtgggtcacagagatcacatgcttcacaaggtaataagatatcacaaggtaaatggaggcagggggagatcacaggaccacaggaccagggcgaaattaaaattgctaatgaagtttcgggcacacattgtcattgataacatcttatcaggagacaggttttgagagcagacagtctgaccaaaatttattaggtgggaatttcctcgtcctaataagcctgggagtgctacgggagactggggcttatttcatccctacagctgtgaccgtaaaagacagctgcctccaaagcggccatttcagaggcctaccctcagggatacattctctttctcaggaatgttccttgctgagaaaaagaattcagtgatatttctcccatttgcttttgaaagaagagaaatatggctctgttccacccagctcactggcagtcagagtttaaggttatctctcttgttccctgaacattgctgttatcctgttcttttttcaaggtgctcatatttcatattgttcaaacacgcattctctacaaacaatttgtgcagttaacgcaatcatctcagggtcctgaggcgacatacatcctcctcagtttacgaagatgatgggattaagagattagagtaaagacaggcatgggaaatcacaagggtattgattggggaagtgataagtatccatgaaatcttcacaatttatgttcagagactgcagtaaagacaggcgtaagaaattataaaagtattaatttggggaactaataaatgtccatgaaatcttcacaatttatgttcttctgccatggcttcagctggtccctccattcggggctgctgatttcccacaacatatgtgtatgtgcatacatgtatgtctgtgtgtgtatgtatgtgtgtgcatgcacattagtgtgtgcaaaaaggcacaagcatgagcataggtcctggcactgcaggcaacctgcctgacatttttctggatgctgaaggtataggagtgaagaaaaattcctaccctatggagcttatattttagtggagggagaaatacaataaataataaaaataataagtatattatgttgtatgtctgatactggtaagcgctacagagaaaaataaaacaggggcagaggaaaaggaatattgtgggaggtacagctttgttaaatagagtgagcatggaaggctgaagtgagccatggaattattttggggaaaaagcattgtaagtagaaagagcagcaattacagaagctctgaggctgggcatgctggcatgttgggagaacaccaagaaggtcagggtttttgaagaaaagtgagtgaaggggagcagtaggagatgagatgagggaaaaacaggagtctagatcctgtccgcctatagaggtgacttaatggactttgtcttcttttggagtgagatgaaagccattggagggttttgcaggaataatatgatctgaattctatttctgtggctgctgtgctcagaatagactttagaggaacatagagaagcagggagaccaactagaaggctaggatatgacagtaaggtgacaagtttttcataatgccactgttgaagcatggctacaggaggagaggctgaagtaggaggaggacaagttaactggaggggaggaggtcagccatgaggccatgttattgtaagggtcatctacatgtgtgaggctaaatgttacctcttgaggagatttgctggatatgacttggggctatactcctaagtcttaatgcctgctgtcattgggcctacagaaaccatcaagaactttcattggaaaagactacagcaggctggctggcattttacctttgttgatatgtacccacagtccttctcattagccattttgccagataatacccaaactcagagttaatacaatgtcggtgcatttattttttgttatactttaagttctggggtacatgtgcagaatgtgcagttttgttacataggtatacacttgccatggtggtttgctgcaaccatcaacccatcatctacattaggtatttctcctaatattctccctcctctagccccccatcccctgacaggtcccagtgtgtgatgttcccctccctacgtccatgtgttctcattgttcaactcccacttacgagtgagaacatgcagtgtttggttttctgttcttgtgatagtaatatcagtgcatttatgatgaaatacactcttccaccaatattctctatgtcctgtcttggagattctactgattaaatacatttctcattctcttggcattgcattttcattttatttcttttgatgagaaattcacttttaatagggaaagtgagctttatgcaggcacatttttagaagtaatttatatggataattgtgtgtctttaaaaatttttgcatcatacaaaatgttcttatgtgataaatataagccagggtttcttttatcagtcagcaaatcaaagcatttaattaatttttgtgtgtggagagcacaatatagaactcagggaagagagctacaaagggaacagaagatataatttttttcccatgaaacttatggaatagtttcagcgtatacagagaaatcgagagaacaataattttcaaaggagcccaccaagcggtcatctagccaaattcctggtagaggtgtgaacagaattaggcttaatcacggaagccttcttagaaagatggacattgatggggccagatttttataatgagcttctatcttagaggtacaaagggagaggaaattccaaggagagaatgaaatgagttccatgcagaagatccaaagtcagtatgtttggggtagaaaaatacatggaaggaaaaatttagaagtgaagttggtgagtcttcactgctgcactggggatttgatatgagaatcaaataatgctggataagtagtgtcatataatgaaaaatggtgctgttgtttttttttttggagacagggtactccagactggagttgtagtggcccaatcaaggctcactacagcttcaaagtcctaggctaaaaccattctcctgaatagctgggattacaggtgtaagccaccactcttggctagttttttattttttatttttttttcttttagacagaatcttgttctgccaccaaggctggagtgcagtggcaccatcttggctcagtgcaacctctacctcctgggttcaagcaattctcgtgccccagactcctaagtagctggaattacaggtgtgtgccaccatgcctggctaatttttgtattttgagtagaaatggggtttgctatgttggctaggctgatctcaaactcctggcctcaagtgatccagcctcctcagcctcccaacatgctgggattacagacattagccactgggcacagcccctgctttattttctttgcacatttataatcaagcacagtctgaatgagctgttttaaaattccctatattatgcatcattttactaggatgtgaagcctgtgaggcaggaatttcattactttttgtcatggccagcatctagaacattgtccgcgcatagtgggtcccagcagacacccgctaaatgaattagtgaatgagctgcagagttagccaacaaagggaagcacgttaagccataggcctggtctacaatggattaatggatttcccattgaactttcagaatctgctggccttctatcacagtcgctctgctgcagagcaccatttttgctattataggcagtaagccagctagcaaacagccatgctggggtacttgccaaactcaacaaatgccatttagaaacaaaagaacctctaatggagacatcagccgtttgttaaacaaaccattagtttggaagcagaagctgcacatgtgatgaatctactaatttacagagcattattggacattagttaattgccagacaacttcatgtcccaggatacattgaggaagcctctattactaaggagagattggatgtcttgcctgttaatgattacaggacgcatatacaagaatgaacgagtgagtagctcctgcatcatcctagtgtttcactgccacttctagaattatttctgagtttttatttttaaataaaagttatacttacacgctgaatatttatttatatttatttatttattcgtttatttcttgagatggagtcttgctctgtcccccaggctggagtggcctgatcttggctcagcacaacctctgcctcccgggttcaagcaattctcccacctcagcctcccgagtagtagctgggatcacaggcatgcgctactgctcctggctaattatgtgtatatatatatatatatttcagtagagatgagttttcaccatgttggctatcctggtctcaaactcctgacctcaggtgatccacccgcctcggcctcccaaagtgttgggattacaggtgtgaaccaccgcgcctggcctttgctgaatatttaaatggaacagaaagataaacaattagaattagtctctttacccgaagtccctttccagatgcatttttttagtcattatccacatataaaatgtcacaagcactcctcttgagattttacttaatgccacatttaggagatttttacagcacaaacaaatataaccaattcttatttaatggttgcatagtgctctattttgtgtgtgtttaataatttaattaatgggacagtactgatagttggtatttaggttttttttttaaactgttatgcaaagaacaagataaatgtacctgtaatgtcctatgaccataatgtcatgagtatatttgtaaagcaagttcctgacagaagtatttctgagacaaggaatatttgtgtttaaaaatatgaaactgctatattggcatcttgaatagaaagtagccatgagagtgcctatttctcttcactgttgctaaacttacatattgtaacatttcagtttgtgtcaatttgaaagttaaaaaattatgtctaatttttatagtttgcatttctttaattctgagtaagtttgaatatcttttccgtataccagttggtcttgtatctctctctctctctctccccctccctgcttcactccctccctccctccctctctccctctctctctccctccccctgtgtgtgtgtgtgtgtgtgtgtgtgtgtgtgtgtgaaggcaaggttaatatgccattcaaaagctttgcccatttaaaaggtgtggttggccttttctaatagatatatatctgtggataggacttaggttccatccctccctgctggactgtgactctgtaatgaaaggactatactgtatttatcccacagtttgttaaatgggtagatttcttttatgtatatggatggtgtaaaaatttgacaagaagtcatttggtatagtaagcatcaggaatagtaaggctaatggatagaaaaataatgaaggaaatcaagcagcttaaaggaagtttgcagccagttgaaatgcaatttgctgaaaacttaatgcaaataaataattatatttgcacagtttatgatgctgcatcacattttcactttcagtttctgacatttgtaggaaaataataaaattttaaaatctccttattatttatttgagatctgttactatttttaacattagtctagcaatgttgatattttctttgtaaagggtagtaagctcagtgtgagttcttaaatatctaggaacccattttttccctctgttaaagcatgtatttaattttatgaagtaagcagaaatatagaaattatatggaaaacagaaaaatagaaattatatactagaattttatttaacttgctggggaaattttttaacatgggtagtgatgcagtcattactttgaataaacttatgtatttatttaaatattatttataatatttagaatactttttcagaccaaatacatgttggaattaagtgtattgtacatattctctgctgttgagtgcatagctgcaacatagatattaaaatcttcttttcaagcaataaaaaactttaagcattgccaacataatttaaatgcatatgtgtgtttcattcttttctctatcataaaagtaatcaaaagagtgttagataccataccaattgtttcaaaatcatgactgccctcatttttgtttgtggtcttaaagtataaatatgtgaaggctacatgtaaacataaagagagcccctttacaaccaatagtccttaaagtaatatactggcacatcaaaaacctgacacagtcttaaatctttaccgaaggtgttgtaagaaaaagcaaacagaagaatgaagtcgtatatataagaacatatgaggtaggtaaagcaatcagcattggttcaagacaataaatcagagcaggttacattatttcctggccacaatccttttgaatgaaaagcaaaggaaaagaaaacacaaagccgtggaagcatagttgttttgggttgaaagtgaaagttggtggacctaaataaatgtgaacctgcttggtagacaggcctctcaagtgtgacttgtctgcagtaaatttaacttttaaccacatattctttcccaaatcaatgagatatttgtttgttttatgggctggaaaaacaaaatgattgttttctaaaagccaaaatattttatttcttttctggattatggaaagtaaaaagcaaaaagatgcaaaactgagaaaaagccctagagcacaactctgattaattactatagctaagtgctctttctttcttctttctttctttcttttttcttttttttttttttgagacagagtctcgccgtgtcacccaggctggagtgcagtgccgcaatcaatacccactgcaacctctgccacctgggttcaagcaattctcctatctcagcctcccaagtagctgggactacatgcacaggccaccacacccggctaatttttgtatttttagtagagacagggtttcaccatattggtcaggctggtctcgaactcctgacctcaggtgatccacccacctcagcctcccaaaatgctgggattacaggcgtgagccaccttgcccagcctgctaagtgctctttctattcacgttctaagtagttttatttagagattattttcccttctgcaatttctctgtctagtcttccctgtcattctttagcagccaagatcactttttgtctagggctccaggccctctcagtcatttggactggtctctgtgggcctttgtttccaatggtcaacactttcaatgacttttttgcctgataggtcttcaaagagttcacagaaaatgcatattattaaaaaaaatgttgttctttgcccatttttaaaatgaggttgctttttgcttgttgacatgaagagacacttctcaaaagaagatatacggccgggcgcggtggctcaagcctgtaatcccagcactttgggaggccgaggtgggcggatcacgaggtcaggagatcgagaccatcctggctaatacggtgaaaccccgtctctactaaaaatacaaaaaattagccgggcgaggtggagggcgcctgtagtcccagctactcgggaggctgaggcaggagaatggcgtgaactctgcggggcggagcctgcagtgagccgagatcgcgccactgcactccagcctgggcgacagcgacactccgtctcaaaaaaaaaaaagaaaagaagacatacaagtggccaataaacttatgaaaaaatgctcatcctcactaatcatcagagaaatgcaaatcaaaaccacaatgagataccatctcctatcagtcagaatggctatcattaaaaagtctaaaaacaacagatgctggtgaggctgtggagaaaagggaatctttaaacactcttggtgggaatgtaacttaggttagccactgtggaaagcagtttggagatttctcaaagaactgaaaacagatctactgtttgacccagcaatcccattaatgggtacatatccaaaggaatatagatcattatatcaaaaagacacatacttgcaaatttattgccatgctattcacaatagcaaagagatggaatcaatgtaggtgacgtcaatggtggattgaataaagaaaatgtcgtacacacacaacatgaatactacatagctgtgaaaaagaattaaatcatgttctttgcagcaacatggatggagctggaggccataattctaagtgaattaatataggagcagaaaaccaaataccacatgttctcacttataacagagagctaaacattcagcactcatggacataaacatgggaacaatagacactgtggactacaggaaagtggaggaagaagtgggagatgggttgaaaaactacctacttggtactttgctcactacctgaggtcgatatacccatgtaactaacctgcacatgtaccacctatatctaaaataaaagttgaaaaaaaaccacagctatgcacagagttgaaaaaaaattttgtgtcaaaattaacttgtactaacttataacactgaacagaatctagtttgaggtactaagaaagataagacatgagtttgaaaagagctcctatcagaacagcatgacttcttcgaaaattgaagaaagaacaaacaccagacttattgtgaagcttgggtggaagaaagaatggtaaaatcattgatcctttatgaaaagtttatggggataataccccaaagaaatcagcagtttataaatggataactcattttaaaaagggatgagatgatgttgaagatgaagctcacaatgtcagaccatccacataaagtttccaggaaaaaattaatcttgtttgtgccctaattgaagaggattgatgattaacagcagaaaaaatagccaacacaatagacatctcaactggtgtggcttacacagttctgactgaaaaagttgagcaaactttccacatgatgggtagagaactgttccacccagaccagctgcagacaagagcagagctttcaatggaacttttaaataagtgggatcaatttcctacagcactggttccaagaattgtaacaagagatgaaacatggctttaccagcacaatcctgaagctaaagcacaaccagagcaatgactatcaaacgttagaggtggtccagtcaaagccagagcagatcaatcaagagcaaaggtcatgacaacagttttttgagatgctcaaggcattttgcttgttgaccttctggaggaccaacgaatgataacttctgcatattatgagagtgttttgggaaagtgatcccaagcttcagcagaaaaacccccaggaaagcttcactggagtctttctctaccgcgacaatactcctgctccttcctctcatcaaacaaaggaaattttgcaagaattttgatggaaaatcataaggtatccaccttacagtttttatttgatgctttcttacttattttgtttcctaatcttaaaaaaaactttaaagggaaccaatttttcttcagtttataatgtaaaaagtcttcattgccatggctaaattctcaggaccttcagttcttcagggatggactaaatggctgatatcgcttataaaagtgtcttaaacttgatggaacttatgttgagaaataaagcttatagttttaatttttatcttctaattctattattctataacctttttgaagttccttgtatttggagtactagaagtgcttcatgatgcctgtagcattcgttgcatgtgtatgtggatgagggcgcatacacacacacacacacgagctgaaggtgaatccatacatgtatatgtgcatgagggtacacacacacacacacacacacacacacacacgagctgaaagtgcatccatgcatgtatatgtgcatgagagtgcacacacacacacacaagctgaaagtgcatccatgcatgtatatgtgcatgagggtgtacacacactgacacacaaacacaaacacaagctgaaaatgcttggagttgtatgtcctccaggaagtcatgggctttcatagccttatgtgatgagggctttgaaagtcgagctcccttaccttcagctgagacaaactttataccccagagctgccctgagaatctggcaaagcctgggacttggcttgtcctcttcccctttcctgtcctgcttcctcattcttttcctggtttctctgggagcagtttcttaataaatcactagcacagaaatctccctctcatgtttacttttggggaatctgattaagagagctgggtatattggagcttaccctgagtcaatgaacagtagcacaagacagtacatctgaatgagtctgaactacaatttcaggttttcttctttgtggttttatttggagtatcacagaaaatttgtgaaatgtgccagacatagttgtgctcccaactcacagatgggaaacaaagggccaaatgacttgctccagcttgtggagcaatcacggcccgggatgcctgttcttcaatgtttcatcttgtgctcgctccgcttcactgttcagcttcttcaagttagagcttttgttctctcccagcgcccccatgaggcactgaaagaaaactaggtcccttttagcttctcgaccctgtactgtccaaaataacagcccctaaccccatgtggttatttaaatgtaaataaagttaaaaactcagttcctcagtcagactagccacatttcaagtgatgaatactcacaaccttgcagaaagttctttggatagtgctgtcttagaccctttactcttcagaagtttcaagtatttttctctttgcgtgtatctgctaacttgatatgtttttctttttttaaaacaatcttgggaccaacatcagggtgattgctaccttgaattcaccattacaggcatctgaatctgcataaacacatgctagatgggctttgggtaaaagagaaggggagtggccacaaatacacatgtaattaggaaagaaaatttcataaggactccatttttctctccctgaaatactagtgaaataattcctgcttttgcctaccacacagatgtagaattgaggtgaaattatagaaataaattagagcaccgagaatgaattagaacaattctaaaacttatctttgagcttatttatgtaggcataatgtaagtatatgggatcattagattttaattaaatgttatatgttaattaacagaagactgctattttctacaaaatgaagaatacattttttaaacagtaataaaaagatttagaaaaaaatgacaaacttatgattttaatctttgaatatgtattatcaacgaagacagtcaatttttttgtgctctggagtagagtgaaaaaaacaacagcatcaaacaatggtaaagaagtgaaatgatagggatcataaaattcggcaggatggtgacgcttgctgtgagaatttgaaggctgccatataccaccggaggctgaggaggctttgtgaggtgatgggaagaattagagaagctgcaagtggtaggcatttttggaaatggaattaaatttagaaaccagtgtttttacaatttaaggctagaatgaaaataaattgtttatgcaaaatttaaatagaagttctttctttcctctttataagtacttttaaagcaagagacactcgaattgatagcaatagaacagaaagaaaacattacatattttggaaaaaaattaaagatttgttttcagaaagcccacattacctgccaaaatttccaatatgtaatttcaactatagagatagagatttatcttttgggcaaattacttttttctaaggcttggcaaatattgcacaataagtcacaaaatgctaagatgaatgaaggtaattgaaatcacatttctcagtataatcacatactcagttgagtataatgctggataatgaggacacacacacaaaatatgtatatgatgaaaaaaatcttcatgtttgttaacattttagtttcaatgagatggactcacttgtttatttacttttaaatttgatttaatgaggttttaaaaaggattgatttaatgagattactcaactattccatctaagtaaatttgagacctaaaagtgctaatgacaccagatgtcactctcaattttaaaaagtaagatcaagacttccgtaggtaaaagaaaaatagttactggggaattattttatattatttaaaagaaagggcgctattaagagaaagcgtagctatgtctactgaaaggaataagagaacatgagaaagctaaattgttctgcataaaaaggccaagggggctggggggatggggaaagaggagaggcattacctctgatgattcaggaggtaggaaaggtgcctctaagccatatagagaaaggatgaagaggtaggtggcagctagagaggagaattggagatgggaggtgttccgtcattcagtgttgcatacaaattacccccaaacttagtgacataaaatgaaaatgtactatattcacagattctgtgagtcaggagttcttagatttgtttgggcagtctctcatgtagttgcagtcatatgctggttggggcttcacacacccgaaaatttgatgagggtgctggagaactcactagcatagctggtaagttagtactggctgttgactcgaggcctcagttctccacgtgggccgctgcatggagctgcttgagtgtccacataacacaataactggcttttcccaaagcaagcaatccaagagggcaagttggaagccatgcttccactatatactcttgatcactcagagccagtgctgattcagtataggaggagattactcaaggtcataaaaatcaggaaacatggatcagtggggtccatcctggaggctagccacgacagagcaaggccacagatatatttattagaaatttgaaaagtatttttacacataatgtgccattaaccattcctcagcctcctcactcaattttcagtaaatctaatacactcattaatgttttgtggagttggatttgctcctgaggtctgctttaagtgggcttgagacaagaggagaggacatctacagttttggacacatctgagttaagtacatattttgacatttttcccaaatgaagcagggagtctctgaattacgttataaaaactcctgtaaaagtgataggaatatctaaggtttctttttctattcttcttgcaagtgacagattactctcattttgtcaccacaattacagtgagaacatctaattattttccttcccctaggcaatgtatacctcagggtgaagagaatagctttcttctatatttgaccttttatattggcttgagaccaaaaaagttcatgtgggagattccacctagtccgatttttgccatatacacatcctcagagggtcacttaaaactctttccttccatgcaagagcactttccctcccacctctcttttcctgataccttgacaaggagaaacaagagccatgaggatccagaatgagaaataggaagacttagggaggaaatgtcctaatccacagtcttctgggaagtcagaacttctcttttcagttcagctcatcttctgtttcacagggagaatgattagtcctgaagaattaactgttcatcaaaaataaaatcaagtaaaaacgaaggtaaaggaaattgactctttaccattgtggaaagggctgaagatctgtcattcctatttcagatttagtcagagagaatttgggtaagcattggctttcataaatgcacttcatggcacacagctccatgaatgttctctcacaaatcgtcagtgtgaatcaatgtaatactcaataacatttccctttggaacctgttttaaaagagctattattgtgatggcaagaatatgctaagcacacagactattatccatttgattttctgctgaagagaattactgcaaaggtaccaaagcagtttgattatcacagggagagtttttattttcagctttttcaagctgtgtattgagttgctttgctttcatttaaacattacattctataattaatttacaatacactcagggaaaagactccttggtgtaaagcaaaaagctacaaaaaagtagaagatttaattccctcaaaggcttcaaattaaatttcaattcaatgcaattaacatttattgaatgtctgcagggatcatagcactgtgtgggtactagaattcaaactatgcagaagttcaagagggtttcaaagttaattttataaatataggtagagaaaaatcagaatcatttaaactatattctttttgaagtctagatttcctttgacagattctcaaaatggtgtgtaatctgattgggagttcccttggaatacggcaaagagcacaaaaaacattctttcttgagtcttaaatttggagtaaataaatttttattactacctcaagaaatggcttaaatgatagaagaaactagtttaaaatattttaactaaaattagtgaatgatagtgttgctttcagaaagataccataaaataaaaagactcctgttatacatggaatttaacatttcagatttggaacgtatttactctttaagtgtcattcaaaaaataacaagtagtagtctggttatcaccaggaactaggaataatttggaaagagagtagagatacttttagaactgctggaatttttcaaaagacctaccaaaatctagcaaaagaagtacatcaaaatttctccagagccctccttacctaagaatgtttcatatatctgccagcccttttcctgcaaaagtcaaagatgggtctagatacaaagcagatgcaatgagttcctttcttaggatcaaaaaccacacctcatctgcagacgagatcctgaacacaaaaacactgtttctttgtctatgttttattatcaatttgtcctgtttatcctgtgagattctttcttaaaattttgttaatgtgattctatgcagccataaaaaagaatgagatcatgtattttgcagggacaggaatggagctggaggcctttactcttagcagactaatgcaggaacagaaaaccaaataccacatgttctcacttataagtggcagctaaccgatgagaccctgtggacacaaagaggggaataacgcacattggggcctattggaggagggagggtgggagaagggagaggatcaggaaaaataactagtgggtgctaggcttaatacctgggtgatgaagtaatctgtacaacaaactctcatgacacaagtttacctatgtaacaaacccacacatgtacccttaaacttaaactaaaagttaaaaaaaattaatttaattctgagtcagtactgtttactgaaaagtacttcctttccccctgccctatggtggaaactgccaccactttcgttgtatattagccaactgtatatttgtgagtctgtttctgcactctattttgtgtcatttttctatttgtctatccttgcatccattccattttaactgttatttgttgacccttgcaatctgaaaatcctctaactttatttttcttttaagtttgttttgggtattcttaagagtttttatgtccatacaagttttagttcaacatcagcttgttaatatcaacaattgaaaacaatagcaacaacaataacaacaacaacaaccaaagccaaaaaccaaccaaccagacaaataaacctcttgggattttatttgaaattgcatttaatctatggagcaatttgaggagatctgaagctttacagtattgagttttctagtatgcaggcgtggtgcattttatcatttatatgggtagctttaatttctcttataaatgctttccagatagaagtcttgtgtaagttgcattagatttattcctgtatttgactgatagttttgaagctattataaagggtagaagtaaaaaaaaatccagttgtttgttgctagcgtgtagaaatacagttgattttgtatattgattttgtatctagagacatttaaaaatcacttatttgttctaatatttcacctgtagactctgctggattttctaagtacaaaactaggttgtgtgcaaataatggtagtcatggtttttcccttaaaatctttatagtgtttctttcatttgcattactgtactagctaggatatacagatcaaaatcgaatagatgaggtaaaagcaaacatctctgtatcgttcttgatttccgggagaatgattttaatgctttaccattaagtatggtatttgctataagggtttttgtagataaggattgatttttattatatctattttagttgttaataattgttaatcgttgtttcatttctttttctttagcctactttctttcagcctgagactgagtcctcctacaccctccaacagctttgtaaacagttttgtaaaatgcctcttgattttccacactgtcaaatctgccagttaatcagatccattcctttttttccttttctggagacatgtagattgtttgcactccacctgggtgcttctaggactccctttgccatcattctgggaattccagttgcctttttctgatttccaggggctgttcttggttccttaattttctttcttcttggcttcttcccatgtttccgtggtaaacaactttagccatttcctttgggcacccgagctcacagtgcagcatggagcatcagggtaggtctgtgggagactgatttgagaaaactcaaatgagcagaggggctttaggacagaaagtgaggaggggaaaatgggaagaaacagctgctatgcttcaatccatgacaataatgaggccattttgagtaacacaaaatttggtcaataccatatctaagaatgtattttccataccatttatcaaaatggctaaagcacattaaaaaaattcaagtaaaatattcacagaattcctgaaaaccactaagatttattaaaatttgaaattaattaccaaagattccaatgaacttttctgtaaataattaatattcattcaataaatattaaaaaatattcaatatttttatatgctcctagatgtttgaaatgcataattgaacaaaatagacaaatctctgctttcatgggggaagataggcaataaacatagtaagttactttgtagcataatagaaagtgataagagatgtagaaaggatatggatgactaggagtcctgggcaggatgaaaagtgcaattttaaataaggttgtcagagtaggcttcatggagaaggtggtatttgagcagagatttgaagaggagcactgcaggcagagaaaatagccaatgcaaaggcccaaaggtgggcacatatctggcatgttcagcaacatggggggccagtgtggctgaagtagagtgaatgagagagagcataacaagaggttaggtcagagagatgatgagggctaagccatgttgaaccacactggccatcatagtacttgggcactcactcagaatgaatataggagccctcagtagcatagatttggagcagagtgacatgatctggcttgtattttgaagcaatcacttaggggtggtgttgagaagaggctgtaggggccaaggacaggaggaggaaggccaggcagaagctactgaagtgattctggctggtggctccaatcaaaatggcagcagtgcaagtggcagtgcaggtagtgagaagtgaacatcatcactgctgggtaacactgccctaaaaccaaagtggcttaaaataatttattatcctcattctgtgggctggccaagtggttcttctgatggtttcttctggactcattcatgtggctgcatctgcggcaaggctggctccctcacatggccaggggaccttggttctccttcatccagcctccagcctttcatcccccagtgctaggccagcctccttatgtggtggccttagggagtattccaagagagggagtggggatgctacaaagtacctaccttgaagtcacataatatcatttctgccacattctacgtttttaaaccaagtcacaagggcagtttagatataagtggtgagggaaatagactccatgtcatgatgggaggaatagcaaagttaattgcaaaggaacctgcatcctggggtaggaggagtttgtatccaattttttaatccaccaaagaagtacttagcatgctctttttttttgttttttttttttttttttttttttttttttttttttagacagggtcttactctgtcactcaggcacaatcatagctcactggagcctcaaacatcagggctcatgttgttttcctgcctcaggggctcctgagtagctgggactataggcatgtaccaccatgcccagctaatcagttaatttgtcagttttttgtttttttaaagaaggggtatttttatattgcctagggtgatcttgaacccctgggctcaagggatcctcctgcctcagcctcccaaagtgttgggattatactttgtaagcccaaagtgtgagccatcatgtccagccaaaaagtattcagtattttgagagtataagttggatatgtgatgtgagagaaagagaggaatcagggatgactttgagatttctggcttaagcaactggcaagtaggagtttttaatcaactgaggtggggaagactgtgggtagactaagttttgggtgagaagagcaggattcagtcaggggaacggaagggcaggctctctgtaccagcactcagtatgcagtttcatatcaagtcaaaggctgtctgagaccaacactggtctttgagagtgggaagttcaagcaagcagaagatgacaagtaggtgtcgctggctctaatggaagatgggcaagagaaggcctctacattctagaaagtgaacttgctatgtggtttgcctggcaacggacagggtgaggtaaataatgccacagaagttccaggatgaaggattacaagaggtttgtaagaaaactccaggggtacagtggttcagaaatggacataacagcctagaggaagacctgggagaagcccttgaataaccattggtccattgtgcatctagggtccttaacaaaaagataaaagacaagtgtataatatgttggaaaaaaaatttcccattcccacacaggtaagtgtctacagcaaagctatccctgggtcttgtaaatgtggaatatggcccacaatttaaagtcagcttctttttttttgagtgaggaaaaatctcataaggaaatgcctgatccttctttaggcataaaaagagcatgattcacacccaaggaagagaatgttggggggagtgcacccacgctgtgtgaaacttcattgtcatgcctctgtgtgagggtgtgtggatacagtgtctgggtgtatttgcacacacatttatttcggcaaatattggtaactgcctgattgacctttctttagggcaaggactcagatggttaggagggagaaacaggttgctcctcaggctggtgcacattcttggctacattttacaaataagctgtaaaagatggaatatatttgctggctggtttgacagtctacccagaggtaggaggatggactctatgacctttgaaagtcaattttcatcccaagatttcatgttccaattatggctgatagactatttaaataaatgatggtttttctattaggaaagaaaattgactggaattcattctatttgagccacaaaaatttgaaaataggtcaactcttaattacccagggtgatataatagggaacatcttggatggattatcccaaaccacaggtaattaacaaaatgtgcaaattaggcactgattcatagcattcattaaaatttacatttaaactactacttaagcagcatagatttatagatgagcaactcaacatggtaaaaataattttaagatgaatatacgcattttaaataaaatgtagagttgaagatattgccaaaagactggacaatctgaaatattttcatactctaaaattcagaacatttacctagtgctgcataagacatttggcagatttaaaaaaatctcatttttataaaaggcaagggagagatcaacagaggtttttcaccccctggaaactcctgtgcccgcccaatgctggacccttccctttgtgctggtgttcaggcccacaaagccacctctttctctccccgacacacttctgtgaaaaatgttgacagaagaacaaagactagggtgagtcaggaagtgagaaaaagaaactagagacaggaataattatagcacaatccttaaccgattatggaaaccaaaattttagtgccatttctatcttacccaaggaaaacaatgaaatgaactttactaaaatttaatatgggttagcacataacacatacatttatatataaatttacatacattggctgcggatattaaaccctggctcacataatcttggtcttcctttgtactctattgtatggcatccagtcgtgcacaggtgtgatctgtcagcctcaagcttcagctcctccatatctctatcatctattattctttctctacctctgtccagccatgctcaagcatgcacaaatatggaagtgtgagaaacttgactcaatgggagctgagagccaatggataaatacttaacctttcccatgtcctggatgaacaattctaaagtgcattctacatggttcttcagagggacctcattggcccttattggcccttaatagtaaccagcccaattatgtcccctttgaattggcctctgcccttccctgttttcccttttccagcccctactatcctgttctccttggtaggattattcctgcaaataaactccctttatggaagccattgtcttagactctttttgagtcttagactctgtttttttgaggaagaaaccaggctatgcaagatttatactaaaacatctttatgaaagggtataagacaaatatttttgagactactaatctaaagcattgattgtcaatgtatttgtaaaaaataagcccacaatatactaatatttgtatatgtggcaagctatgtgccacacatgtgctgtttttatgagcacattaggtatacctctacccccttttctcccaccccatgcagcatattgacacaaatcagaaagagtacttctattatggggatgttcttacatttactcaaagttataaataaagctaatcaagtgtaggctgtagtactttattattaataccaaatttctttgaaggcctggtaactaattgtgattcagaatgttttaggtgggatgctttggttgaaatctctaaagcaaacagattcaggtttagaaagtggaactcgatgctaacaactatttttcatacttaagcaacttctcaagttatttacttataagctatacatataactttacatctttatgtaagagattacatacaactttttgccatcttagtccttgctcaaaaacagctcagaggtttccttcatatatgccaagaaaattaaaaaattaagagtaagttaagaaaacagctcaggggtgttatgagaagggtactttacctctttagcatttttcatcaaaatttgtaacttcagtctaatgagaaaatatcagacaatccaaattgaggagcattctacaaaatgtccagtactcttcaaaagtgtcaagatcccccaaaacaagacaagactaaacaagacaagactaaaaaactgtcatagatcagagaagaatggagagacctggtgactaaatgctttgggctatcctggattggattctagaatagcaaataaggtgagtgggaaaagtggtgaaatacaaataaagtctatagtttagttcagcattgtttagtattgtgctaatattaatttcttaattttcaaaaatgcagcatggttttataagtactaacatcatgggaagctgggagaagggtatagggaaatactctgtactatctttgtaactttcctggaaatctaaaattatttcaaagattaaaatggaaatatattttaaaataatgtccaatttaaaactaacaaacaaagcaactcatgtagacaactctggttaatttgggcagactcttgcctgtaagtcttaattaggaaatacttaaggagacatggtctataaaagcagaagtgtgtgtatggagaagtgatgtctactcagtcagaagaaagtgctcccctgagatttacagagcctatttgtaccatgaagacccaaagtctacttttttctcatttagggcatttttggtacagaattatctaatcacttcaagatgccacttggcacagccaataaatccagctctctttcttcagggggttaagtggtagctcataattttttttgcaattatttttctattagcaactttcagtaaatacttttgtaattgcccatgagttgtcaagcactcatgagatgaagttccaactctacagatgaaagccctgtttttgaatcaagcacttcatgagtaaggatttcacaaagctgcaaaatctgctcttgagaacccctgacaactaaatattccatggcttccactgataatcatgctgtcagttaagtattttgctttttttaaacagctgggtatatttttttctctatgaaattctgtgaagagagtttgatgtagcaaatttttttttttaaaaggcttgtcatataccaggaggtatcaacaatcaccaagctctcgtgcattaactacctgtttcacctccattgaggatatgtctcaggtcaataattggatctatgaaacctggctgtgataaataccaaggaattctatgccagttcacagcagtaagagtgcagaagtgccagaagctgatgtgcccaagaactgagcccaagtcttagcacaagatctccatccatcaaataactgtaatttatcacccagactgagacatttctgagagtgaaagggagcttcatgagtaattattccagaacaactggagtatattgggactgtcttagacaaactaaaaggcaaagtcattctactgccattctactcccaaacttctagactctggctgattctctccacagacctcttcccggtgaaaatatcctcctctttgtagcatatttgtacttctactgaatgataaatgattatatgcattccttgtttttatgtaagaaaatacagtttcctgatattgtttgagaattttagaaattatgtcctcattttggtattttaatccattaatgggaaatttcagactggaagaaagaaaaccagtaaccctagggagatatttttatctataccagtacttttggtcactttcaagtctcctgcctaggcagctgtctgatcagcccatttaaaacaatcactgagataagtactaataaaatgaattcaagaaaattgctttttagatgttaagttgataagaatatatgcctattaataagtacctctgtgcttactctgcacagggttatggtatgtacaatttgtgcacatggcatatatatgatcaatgaaaacatgaaacttgttttaacaaaatcagtaacagggagtaacatacgccaaatgtgtgttggagaaaacaagaaccacgggacccagaaaaggagagaaattgaatttgacatgtaccaggaaggtggatggagcttatacgggtggtgtgtatgtagggcagctggcgggtggcgggtggggggtaggttcggagcatgctggcgggaggacaaccagattgtcttttagtctgccaatggtgacataaaaaaattctgctctttaaatttggctgaccaaattctataagatttgaatcacattttcccatcagaaactaattcacatcacaccgaactgtgaaagttcaatctgcaagacagatttgatttaacagtccatgcattccacttgtgtgtgtgtgacgttattgaagtaggtgtgctctaaaggcattttgtagaaatgcctttgtctaaacggtgcttaggcacaacacgagtggccttgatgatgtactttacgctaaggtaaatgtgtagagaagcctcacgtgtgaatgcgtcgtagtaaatccacagcagactgcagatttatggatatcgttattccgttgtacagacggcacctccattgaatttaatgagctgaactaggtgaaaagttcattctaatctcctggtgcctggaactcaagcactccctgaaatcacagaacatatgccttctcttgttttaaaaactgaaggtgactttctgataaacaagtctctcttgagggtaatgacataggaagttattttgaagacgtttccttcagtgtcttgactgaatattaacctacaacagctacctgttgcaaagctgagaggtgatttgtcaaatttaagatcgatggcagatttgctttaattgatttttgttccctagagtgagtttactactttgagaatggcttagattctctcacctatgtttcctttgctattcagaataagcattagcaagtgatttctcttctgcagtcttttacatggtaattctgaactaattctaacatgtttatcgtaattaggttaaatgtttatgaaagacgtctacaaaactaacctgatgttccctccatatttaaaaaacactcaacaatgaatttaggtaaagaagacttttttgagacagtctcgctctgtcacccaggctggagtgcagtggcgggatctcggctcactgcaagctccgcctcccgggttcacgccattctcctgcctcagcctcccaagtagctgggactacaggcgcccgccaccacacccggctaatttttttgtattttttggtagagatggggtttcaccgtgttagccaggatggtctctatctcctgacctcatgatccgcccgcctcggcctcccaaaatgctgggattacaggcgtgagtcaccgcacccggccttttttttgacagtctttcgctctgtcacccaggctggagtgcatgatctcggctcactgcaacctccgcctcttgggttcaagcgattctcctgcctcaggctccgaagtaattgggattacaggcaccagccaccatgcccagctaatttttgtatttttagtagagacagagtttctccatgttggccaggctggtctcgaactcctgacctcgggtgatctgcccaccttggcctcccaaagtgctgggattacaggcgtgaactaccatgcctgatcagagaatacttttgttgttgttattgtttgttcttgttttttccactatcctccgctagaatagaacttttaaggtctctgatggaagctttgaattctcacagtgctgcattcacacatgggaagcacatcagtgaagtgaaacaatgggtatatctcaatggggaggctcctggcattttgtgggtgtgggggacattttgtgtgtatgtgcaagtctgtctaccttattaaaggacttttacaatcactggaccctacactgtaaatgccaggatcacactccagttactgcaaccaccaaaaacatcccaacacagctatctagcaactcttaaggtataactcattgcagatggtaaaagggcagctgctacctagatgtaagtaatttctaacttgaacagtttatgttttcaaagatgactttgttaagtcgaaatgtagaacacatcactctatatgtaacgcagaatataaatggcgactatgtctccaggctggtgacacctgcctggcttccatgacccctattcacaatccctacttcaagttctcagactaagacaacttaattccaatctttcaatctctttccctcttcctaaaataggctcttcttaaagtctctttgatccaggagaatttacggtgccatatttcaggagtatattgatttcagatcagagttttgcttgatcagaacttgttgtggctctcaccgtatccccagtgagctggttcttttcttacatcccagttactgatgtagtctctatctgggtctcatttgctttatgtcctgctttacttctctctttgctgccactgccagactccctgatggttgttcttcatgtcccacggcgccacttgtttgccgcttttgtggagcctttttgttatcaacacctaatggggcatctgattattccttccttccaggctgaagaggccatgtccatctgcttattgcaatttcttcctgaagattgtttttgggtgctttatcaattgtccacattgttctgggaggtaggtctctagctcctgactctttcctaggaagggcttgcctgagcaccaagcgttaacagctatctcactctactgcagacatgacccagcccaaatcaggaaactggataaaaaacatggaaacaatgctgttgcagtatggaaattaaacgaaactggaaacaaatcgaataagagtttctaaatctttaaatctgatgcataaagtagtcttaattaaagtaaaagaggagataaatgagaatttactttaaaaatctgaattttctgagcctttaaggcaaggtctttagaaactggtggcaatgactttttattatggttaatttcccttcagaacttgtgaatttactgttccttcatatggaaattttaacactactcttaggcagatcagacataattaggataattttttgccacacaagtgaaatgaaaagatagatttccctatccttcctacaagataattgggtaaaaaatgaaatagtgagctaaatgaagaaaagttttaaaaataaatgggtgtgggtaagcaaaatgaacagcttgatggggagatggaaatagcagataaggcaccttaatgcaccttattattattttgtgggtaaaataattttgtcttatttgttaaataagtctgtatttgcgaaatcaaaagagacaaaaagataactactgaaaaaagtgaatcttcctcatacctctttaatcctgctgacccagttgctttccctaggagaagagtgtacattgtggatttattatgtatctttccagagatactattagtttgtttttatttcaatagcttttggggtacaagtgtttttcagttatatggatgaattgtacagtggtaaaggctgatatttcagtgtaccagagatattctatgaataggcaagtgtttgtatgtatacatgcattaacacacacatacatatctaaaaatctgaattacttggatagatttatgtgcaattggcactgaagttgtggaggacccgaaggctcttgtcaagaagttcagtaagatggttatgtcaggctttattaaaaacctttattattagaaacatattttctcttttttttttttgagatggaggttcactctatcgcccaggttcgagtgtagtggcgtaatctcagctcactgcaacctccacctcccaggttcaagcagctctcccgcttcaacctcacaagtagctgggaccacaggtgcccaccaccacgcctggctaatttttgtatttttggtagagagggggtttcaccatgttggccagactggtctcaaggtcctgacctcaagtgatccacctgcctcggcttcccaaagtgctgggattacaggtgtgagccactacacccagctgaaacatatttctttatagtctcatctttcagttgcagccatatgccatctttagtgtggataacatcaataaaatggtggtttggttgaccttatccacgtctacttgttccctctgaatggatggatggctatgatatggtgccttgtgctgtccttgggcacaaattttctaatatgtcctgatctaaaacagtttccatctatcttggaatgcagtggttaacctggattcttccttccccattaccctggacattctcttcactgttctgtttggttgaaggcattttttcttacattttatattttcttctttcttagtttgcttcctcattttgttggaacacataactaccagttacgttttgagaaagggtatgtgacaaataaatttgagatgttgtacatcagtaaatatcgttagtttacttttccacctgattgatagtttgacatgtatagaattctatgtcggaagtaatttcctttcagaattttgcaggtatttcttcacaacccttcagcttccagattgctggtaagtcagaagccattctgatgctgcattttggttttgcagtatattatctgttttttgtttttttaattcccaggagctttcagtatcttctccatgtcctcaatgttttgaaaagttcccacctattgtgttgagcagttggtggctcctttcaacctggaaaatcaggtctattagtcctgggaaattttcttaaattattttatttatgatatcctcccacctgttattttgcattctggaactcttattcaaattaacctaatatttgaacatgatactttttgct

SEQ ID NO: 2853 - DNA, 8979 bp, Homo sapiens
ctggaggcagcagcttgcagcacaaggagaatggagaaggtcctgagatgcccacactcaggccctgacactgaagcaggatgtttctctgactcattcacgggattcgtgacaggtgtgcctcctttaccaagcccattgctctcaactcctcacaggagggagcacacaagcaaacaagacgggaactggagtacaggggcgctggaaccagccagcgaactccctgcaggccccgcggcactttcgggggcgggggatggtgcctgcgatccccaaaaccccaaagggcgttttttacagtgctcttttagctctgctgaccgcggatggcttaagtgttaacagctcagtgggccctttgccttttctcatgagtcggctgccctgtgccagcaagggcaaagggccagtgtaacagccttttgtatctgcactcgtggctcctgagctcctgttcggcacacaggaaaaatgaggtcgcaccaacaaactgaaggatggtaaatgttgaggattttattgccaatgaaagcggctgtcactgggagctgaaaaggtaatggaaagctgaaaagcggataaggtgggtaggtacctgaagtctggccatctacggcagctggattcttctccaaagttatactgtcaagctgtccctctgaagccaagccacttctctttgacatccagccgtagtctctgctcctctccaactgagtatgagggagatgtttcctattatccttgataatgtgccatgaacatatgaaaaaacatagaaacatgaagaaaacaagaagacaaaaatcactaacatctggttggctgtatagaaacaaagctgattctgcttgcaaatggatcttacagacgttgtcacagagacaagaaaagcatataaaaaaataaataaagatgagctcctttcaaggtgactgactagaagcagctggtgtgtgctgctctcacaaagagaagaaagagtggtgagtggaccatccaggtggacacattgggattcatcaaggaaacaatacacagaaaacagaagaatgagacaggacaatcattcacccagaagtggcatagagccgggagatggccctcaccatggttagtaagtgagagtccccagggagtcacatttctgccacagacctttgcaaccctgggcccaggcgatcccccatgacacccgtgccccaccagggcctctggactgacatagacagctacatggagtgtgggcagaactgccactcaggcactcatgaaatccttggagcttttcatccccaggcaccctggtaccaatggctgcagctgcggcaatgggggaggacaggctctcttgcatgtcctcagaataggaacacaatccatggggctaagcagtgggtggactgtggggctcttctacacagcccgttgccagactggcctgggatcctagcatggtcacaaaagtcccacctgggctcttgaggaacagatctgtacttccctggcatggaactcctggaggggatgggcaggctgctgtttttgctgctccacagccctcactcctgttgccctcagtcttgggagtgagcacagtgattggggactaacatagacccccagcacagtgtacagacttgcagaaaagcagccagactcttttccacatgggtcctcacccctgctactcttcactgggcagcacctcttgaccttggcccccagcacaaccaacccgcccccacatgaacgctttgtcagtgatggctctgtgtttctctgaggagaaaaatccaaaagacaatccataagccttctgctattgcagctgcagtggtatggcccttactaccttcaggctggggaaagaacgaaggacttggtccttacactggcccctccagcacaccatcgccaccatatggagaagagcccagtctctcttccccgtaagcccccactcaccactgttcaccaggcaaggcccctagttggggacagcagagcagctgtcctacccccggatgagaattcccactgctattggctctatattttcctgaggtgggcctcccagaagcaattgacatcccctctgtcactgtcatggcagcagttctgcccttactgcactcagactggggaaagaacaaacagcctgaggtcttcactcacactcctagcacaacacagtcatgatatggagaggagcccagttgttcctcctggtgagcccttgacctcctacttttcatcaagtgaagcctccagcttgggctagcagcgtagccaccccacccactggctgaacattctcagtagcaatggcttgcgtttctctgaagtagggctcccagggacaacggaaagcacctctcccactgccactgcagcggtactgccttgctgcccttggactggggaaggggcagagaccttgagtgcttaacccacatgtccaggaagtgacagctgccctaaggagaggaggccagtctgtctcctctgtgagacccctgccacccttgcgcatcaccaggcagggcctccaggcatgggttcacaatgtagctgccccaatcccaagcccatctctccaattagtagtggctctgcatttctctagggtggagccccaagagacaagtgaaaggccctctgccacagcaactgccaaggtcccttcccctgttgccttcaagctggggagggaaaataaagccttagctcgcccctagcagcagtgtgcagcccaggagtgccaaggccagaccttaagccagcactggagtgggaaagggagcccacactttcagagcactgagagggagcatggctgcaatcatgaagaaatacagaggagccacgtggtggagcaagagcccacctactggccattacacttcagtgccatctactggatcatagcccaaactccaactccaaaaatgcttgctaatatacccccctctgtgaaaacaacgacaagatttcaacaacaaagaccctgcacaaaacctcggccctcaaaaaacattcaaaaaaggagtctgcactcaattacaccacagttaaaggagcatcagcccacacagatgagaaaaaactggtgcaagagctctaacaactaaactacagtgttttctttcctccaaataactgtactagttcccaaggaagggttcttaaccaggcagaaagggtggaaatgacagagagagaattcaaaatatggataggaataaaggtcatcaagattcaggagaaagtcaaaacccaatccaaggaatctaacaattacaataaaacaatacaggagttgaaagacaaaatggccattataagaaagaaccaaactgatctgatagagctaaaaaacacactaaagaattccttaatgtaattgcaagtattaacagcagaatagaccaagctgaagaaagaatctcagagctcacaggcaacatctctgaactcagtcagacaaaaataagaataaagaagaatgaacaaaacctccgagaaatatgggattatgtagagaccaaatctatgactcactggcatccttgaaagagaggaggagaaagcaagcaacttggaaaacatatttcaggatatcatctatgaagacttccccaacatcgctatggagaacaacattcaaaatcaggaaatgcagaaaatccctgtgagattctatataagaagaccatccacgagccacatggtcgtcagattcttcaaggccaaaacaaaagaaaaaatgttaaaggaagctagagagaagaggcagatcacctacaaaggaaacctcattaggctaacagcagatcattcagcagaaatcccacaagccagaagagattaggagtgtgtattcagcattattaaggaaaagaaatttcaaccaagaatctcatatctagccaaacttagtttcattagcgaaggagaaataagatcctattcagacaagcaaatgctaagggaattcagtaccaccagacatgctctataagagatcctgaagcaagtgccaaatatagaacagaaagactgttactgaccactgcaaaagcacactaaaaacgtagaccattgacactgtaaagcaaccacacaaataaagctgcataataaccagctaacagcacaatgacaggatcaaatcagcaaataccaatattaaccttgaaagtgaaggggctaagtgccccaatgaaaagtcacagagtggcaagttggataaagagcaagaccctggccaggcaggtgactcatgcctgtaatctcagcactttgggaagctgacacaggtgaatcaagaattcaagaccagtctggccaacatggtgaaaccccatctctattaaaatacaaaaattagccctggacatggtggtgctcatctatagtcccaggtactagggaggctgaggcgggcggatcagttgaacccaggaggcagaggttgcagtgagctgagatcatgccactgcgcttcagcctaaaaaaaaaaaaaaaaaaaaaaaaaaaaagcatgatccaactgtatgctgtcttcaacagacatatctcacatggatccataggcttaaagtaaagggatgaagaaaaatctaccaagccaatggaaaacagaaaatagctggggttgacagtcgaatttcagtcaaaacagactttaaaccaacaatgatcaagaaagacaaaggaagacattacagaatagtaaagggttcaatacaacagaaagatgttactattgtaaatatatatgcatccaacacaggagaatccagattcataaagcaagttcttagagacctatgaagagatgtagataactggacaataatagtagtagacttcaacaccccacagacagtatattacacagatcactgaggcagaaaactcacaaaaatatccaggattcaaactcaacattgaccaaatggactcaatacacatctgtagaactctccaccaaacaacaccagaatatatattctactcatctgcacagagcacacactgcaaaagagaaaacacaattagccataaaataatcctcaggaaatcaaaaacaaacaaacaaaaacaaaatcatacaaatcacactctcaaaccacagcacaataaaaatagaaattattacttaaaaaaccctcaaaaccataaaattacatggaaatttttaaaagccctgcttttgaatgacctttgtataaacaataaagtcaaagcagaaatcaagaaattttttgaagttaagaagaataaagatacaacataccagaatctctgagacacagtaaaaacagcattaagaggggtgtttatactgctaaatgccacatcaaaaagttagaaagacctccaattaataatctcacagcacacttagaagaactagagaaatcagagcaagcaacctcaaagctagcagaagacaaggattaacaaaaatcaaagctgaatggaaggatattgagaagcagaaaactgtacaaaagttcaacaaatataagaattgatcctttgaaggaatagattagatagatagacccctagtcagaataataaagaaaaaagggggaagatccaaataaacaaaatcagaaatgacaaaggtgaacactaccactaaccctacaaaaatacaaaaagcccctagaaactactgtgaacacctaaatgcacacgacatagaaaacctagaagaaactgataaattcctgaaaacatacaacctcccaatattgcaccaagaagaaattaaaaccctgaacagaccaataatgagttctgaaatttaatcagtaataaaaagcctaccaaccagaaaaatcccaggaccagatggattcacagatgaattctaccagacatattaagaagacctggtataatccctactgtgaatattccaaaacatttaggaggaagaattcctctctaattcattctatgagcccagcatccttctgataccaaaacttggcagacaaacaacaataaagaaaactacaagccaatattcctgatgaacaaagatgtaaaaatcctcaacaaaatattagcaaactgaattcagcagcacattgaaaagctaaatgaccacaatctcttaagctttattcttgggaggcaagaattggttccatagaggcaaatcaatcaatgtaattcattatataaacaaaactagaaacaaaaatcacatgatcatctcaatagatgcagaaagggcttttgataaaattcaatgtcccttcatgttaaaaactctcaacaaagtaagcatcaaaggcacatactcaaataataagagccatttatgaaaaattcacagccaacatcatccagaatgggcaaaagctggaagcattccgcttgaaaactaaaacaagacaagaatgccctctcttattatttttattaaacatactactggaagtcctaagcagaataattggccaaaagaaaagaaaaaaaagcatccaaatgggataatagaaagtcaaataatccccttttgcagacgatatgattctatacctagaaaaccaaatagtccctacccaaaacctccttgatttgataaacaatttcagcaatgtttcagaattcaaaattagtgttcaaaaagtagcattcctatatagcaacaatatccaagctgagagccaaatcaagaacacaatcgcattcacaatggccataaaaacaataaaatacccaggaatatagctacgcagggaggtgaaacgtgtttacaatgagaattacaaaacactgctcaaataaatcagagatgatgcaaacaaatggaaaatccccccatgcttatggataagaagcatcaatattgttaaaatggccataatgtccagagcaatttacagactcaatgcttttcctatcaaactactaatgacatttttcacagaactagaaaaaaaaaactattttaaaattcatgtagaaccaaaaaagatcccaaatagcaggcaatagtaagcaaaaagaaaaatgctagaagcatcctgttacccaactttaaactatactacaaggctacagtaaccaaacatcatgggtttggtacaaaaatagaaatgtaaatcaatggaacagaatagagagctcagaaataatgccacacgcctacaaccatttagattacctttgacaaagctgacaaaaacaagcaatggggaacggagtccctatgcgataaatggtgtgggataactgactagccatatgcagaagattgaaactggatcccttccttacaccatatacacaaatcaattcaagatggattgaagacttaaatgtaaaacataagactattaagatgctggaagataatctaggaaatagcattctgggcataggccctagcaaagatttcatgacaaagatacaaaaagcaattgtaaaaacaacaacaaaaaacggacacatgagacctaattaaagagtttcagcacagcaaaagaaactaccaacagaatgatatgatttgactctgtgtccccacccaattctcatgtcaaattatagttttctcagtgttggaggaggggcctggtgggaggtgattggatcataggggcaaacatcccccttgctgttctcatgacagtgagttcttatgagatctggtggtttaaaagtgtgtggcacttaccccttcactctcttcttcctgcttctgtcatgtaagatgtgtcttcttcctcttcactttccaccatgattgtaagtttcctgagacctccccagccatgtttcctgtacagcctgcagaactataagtcaattaaacctcttttctttataaattactcagtctcaggtagttctttatagcaacacaaggatagacaaatacatagagtaaacacacaacctgtagaatggtgaaaaatatttgcaaactatgcattcaaaaaaggtgtaatatctagaatcaataagaaacttaaacaaattaacaagcaaaaaacaaccccattaaagagtgggcaaagacactactcaaaagaagacatacatgtgaccaacaagcatataaaaaattcttaatgtcactaatcattagagaaatgcaaatcaaaaccacagtgagataccatctcacacctgtcagaaggactattattaaaaagtcaaaaaataacagttgcagctaaggttgtggagaaaagggagcacttacacactgttgctgggaacataaattagtttagccattgcagaaagcagttcagagatctctcaaagaacttaacacagaatgaatgaccagttgatccaacaattccattattgggtatgtactgaaaggaatataaatcattccaccataaagacacatttatgcataagttcactgcagcactaattacaattgcaaagacatggaatcaacctagatgaccattaatagtgcactggataaagaaaaagtgataaatatacaccatggaatagtatgcagttataaaaaagcatgaaatcatgtctttttcagaaacatgtatgctgcaggagaccattatcttaagcaaactaaagtagaaacagagaacaaaataccacgttctcatttataaatggaagctaaccattcagaacacatggacacaaggaagagaatgttagacaccaaggcctacttaagtgacgacagtgagagtggggaaaggattgaaaaactgcctattgggtactatgcttattacctgggtgacaaaataatctatacctcaaaacttcatgacatgctatttacctagataacaaacctgttcatgtacccttgaacctaaaataaaagtttaaaataatcctgaaagtaggtaactaaagtttagagaaaaactataaaggagatcaagagataatctagttaatggaactgaaataaaaagtattcaaaataactccact

SEQ ID NO: 2854 - DNA, 9032 bp, Homo sapiens
gtttcgcgcacgcccccagggctgacaggtgagtggggctgtctgtccctcagtacttccaggggttttcctatgcagaatttttaaaacgcagcaccccttggtcccggcctcgacattatttctagggatggattgacagaagcgaatcagtttgggggaaggggagctaatggaaatgacttccgagttttccctccgcgggcccaggttgagcaggctttgccaccacggagagccccagtctccctgccgtggctggtttccctcacatgctaaatagactcacgtgggccccaggagtaatgcctgttagtgactgcactgtggatgttcaccggggctcacgcgggccctaatgcattttcggtgcagagacgcgccctacctggcccatcgggctgcgtggtccggggcgcgtgggaggccgccctgggagcagaacgctggggcggggtcgggggcgattcttgacctgcctcttccaagctccccctgtctggtgcactgagggttccgaggaatgtgacgggaacccaggaggctgcgggaagtctgctgggtcccgagggaagccttcggctcctaccgtccgctactttctgcttccacacgggaggctgtcacctgtcatctccttccccacttagatcatccttccgtggtagattttacatcttcaggccgggtgcagtggctcacgcctgtaatcccagcactttgggaggctgaggtgggcggatcacctgaggtcaggagttcaagaccaggatggccaacatggtgaaaccccgtctctactaaaaatacaaaaattagctgggtgcggtggtgcacgcctgtaatcccagccactcaggaggttgtggcacgagaatcgcttaaacccgggaggcggaggttacagtgagcctagatcgcgccactgccctccagcctgggcaacagagactctgtctccaaaaaaaaaaaaaaaaaaaaaaagataccgcttggcatctggaaatgtctgggacgacctctagaattaacctagctcaaacctctgttcccagatcagtttcatcctgaaggcttccctagggatggatcatcaagtcctgggaaactggacataaaatgcccactacttaaataatgatttcccatacgtaacttttagtgacccgagttataaatgttttttaaggaggatttctatctatgcaatgaggggaatttttcaggttcctggttctctttctataaatggtgttttcattacaatactaagggaaagttttgtacgttgaaattaagttaccatagaatttaataaccaaggtgattattaaactgattgagggttggtcttttcccccattgccttcatcgttatttaagtgctttgatttttttttttttttttttttttaaccctttttctaccgttcatatatatatatctagttgaattatttcaagatttcaaggtcagtattgtccccattttataggtgaagaaataggcctagagactttacaacttcaggtgagcaggagataaacaggtaggattcaaggcttaccagtctgattcctgttagaagaaaaacttcagctgaactaaatttaaaggagttaaactgagcagtgaatgactgggcagcccccagaatcacagcagattcagagagactccagggatgcctcgtggtcagaacaaatttttagacaaaaagagggaagtgacgtacagaaatcagcagtgagatacagaaacagctgcattggttacaggggggcgtttgccttatttgaacacagtttgaacaatcagcagtgtatgactggttgaagtatggccgctgggattggccaagactcagctattgttacaggtgcatactcctaaattaggttttcaagcttgtctgcctattaacctaggttacagttcgtacacaaggactcaaatacagaagtacagagtccttctcaggccatatttagtttgctttaacactgcctctcaaattctttctcttataattaatgctataatcctcttaaacatgctctcagttcaaaatgcagatttgcccttttttgtgtgtttcatttatctccacattggatataagctgccataatgcatgtatagacaaaatagaattagttgttataaagtaaaaattttgttcagaaatattattaaaagaagtacatgtattatatatgtaataaacatttaggccattcaagtcagtcacatcttcaatgaaaagccagacactaaatggccgtgaattggacattactatagagaggcagaagggccatagtctttcctagctggaaaagtaatttgctggggcgctgcccggtgcactttgcccccatcctagcaactcgagtgtgctcagcagaatgaagttagcaaaactggttagctcctgaaacagacttccctgtcttggcagattaacaccatccatgagctcacttttccttctaatatctgggattctaatatccattcattattactttcaaaggaattatcctctctttttgaaaagcacaacgttaaagatgttttgacactctttcacagctatcgctttaaataacaatcacaaataaagccaaaaatagtttctcaaggtcatttatctaagtcataagcaataagaaagaatgactacttcaaaaaaagagtctgtctgcttccaagacatgccaggaactcgagaactgagaacaataatgtaaagcttgtgtttcagagttgagattagcattatgcttaagattttctttaatgttttttatgccagctggacgtcttctgttagtgaatttcccattctgtactgggtcatacgaaatgagtttttaaaaactcattaatcagttattaaacaaaacatttttccttagactaatccaaaccacatttgtgatctttttaaaaatcagaaacattaacaaaaactcatttttctaaaaactgacatatttctggagccttgaccaattcattattataattttgagtaactaatagtgattgacatttatgtagtgcttattattgccaggcactgttctaagtgttttttaaaaataaactaatttagtctttgtaacaaccatgtgagggaaaaactatcctccactttacagatgaggaagctgaagaaaaaataagaaatgtactcaaaagttgcacagtcaatgaaggatgaagctaaattcaaacagacattctggctctagggtctgtgttcttaaccactctgcaaactgcctcctagggtgttacatttaaaaatacattcctaggtctggtgcggtggttcacgcctgtaatcccagcactttgggaggccgagggatatggactgcctgagctcaggagttcgaaaccagcctgggcaacatggtgaaaccctgtctctactaaaaacaaacaaaaaaattagccgggcatggcagtgtgtgcctgtaatcccagctacttgggaggctgaggcaggagaatcgcttgaacccagaggcggaggttgcagtgaaccaagatcgtgccattgcactccagcctgggtgacagagcaagactctatctcaaaaaaaaaataaaaaaataaaaaatgaatatacattcctaatttgtatttgtctccttctatcccctttcctcagagactgacatttaaatttacttggcatgaattgtgctcatttaatctggatttcctgaattataagttatattacctagattgaacaaccaaaaataaataaggaaaataacgtcaaccttgtaactgcaacagactgccattagttggttctcttagcggtgcctttgaatattaatattttgcaggtttgtccttaacaggctgtctctaccggaaaaaaaaaacgatatttagtactttttttcttctttttctttttttgagacagggtctcactctgttgcccagactggagtgcagtggcaccaccacgcctggctaattttttgtgttttttatagagatggggtttcaccatgttgcccaggctggtcttgaactcctaggctcaagggatccactcaccttggcctcccgaagcgctgggattataggcatgagccaccctgcctggcctgtttagtactttttttttttttttgagacagagtcttactcttgtcgcccaggctggagtgcaatggtgcgatctcagttcactgcagcctctgtctcctgggatcaatcgattcttctgcctcagcctcctgagtagctgggattaccgacgcccgccaccacaaccagctaatttttgtatttttagtagaaacgcactttgggaggctgaggagggcgaatcacctgaagtcaggagtttgagaccagcctggtcaacatagtacttttaattgctaagacaggtaaaccaggttggagacttggaaaatgcagagacttggcattaggaagaaaaagaagctggggtaaaataaaggaatttgaaaaaggtacaaaagaaataaaaatagaacaatttttttaatatttaaaatgaagaaaaagcaatagcaagtgctacataaaaaaggtctcagagaatagaaaatgtgatttaccaaaaactttcaacctagaactgtaccttattctgcttaccttccatggaaaataaagcagactgtcataaaccaaggggatttctgtgatccctgcccaacctcaagttcccttactcgaaatgcaagtaccctagtgtatttctaagtacttttccttgccaatttagattctaagtactactgtggcaataattagcgaaaatagatactgaggatacaaaagggagacaaagcaaaggtcaaaaccaaagtagttttttgcattttcaaaagaaataaaggaagatgaggacaagtaaagttcgtccttggatctatgctccttattaacaggagggcatttaaacctgtgactttgtagaaagggctgatgagaagtgtgtacaaagttttcatggccaaagataaggctacataatctggtattatgggagaaaggctggagaacacttagctgtgccaaatagttcaaataaaagcttcccaaagcatctcaagcattcaagtgattctgtgtctttgaagtacagtaggggtcaaggagcaagaagtcaccatctccagattataaagtgaaaaagtactcgacatttgcagaaaggaccagacagaagaaaaaaacacttctgggtatatataatatctgcaaccaaacaaaattataaatattttgttgaaattgtgagaaagaccctaaaatatttctagtaacaaggaaggtcacatggattattaaaatgtacccaacattactaatttaggatagatacaatgccatttagtctctataattttatttttgtgaatgtaaaaatatttataaagtttttcaaaaggctccacctatagtgacaatcccttcaaacctattttctcaataatggccctgcagatgaatatccccgggactgtcagaaacctgccttttgtgttgagaaggaactgctatacttctgttaaagcaagtgtgtctatggttgtagatatggtgctggatagaattagtgtagttctggggacaactgctaagccactatgctttacagattctgtaacctgagtcatagggaacgtgggactacttaaaattgttggtgaaagtttatgaaactctggattgttcgaaaaatgctcaaaacaaaaaacaacaaaaaaaagaaacaaccctatgagagttgggtatgatagtacatgtgtgtagtcccaggtacttggaaggctgaggtgggagaatcacttgagcccaagggttcaaagctgtagtgagctatgatggcacctgtgaatagccactgcactccagcctaggcagtgtggcaagaccccatttgtaaaacaagaacaaaaacgtgaaataactttgaaataccaagagttagtgagaagaagctccagggatatgtttatggccaagagaactttagtgtagcagaatagatttgcagagaatttagtataattaaaatacttttttcttatttttagctattccaaacttttaaccaaatcctttttttttgagacagagtctcactctgtcgcccaggttggagtgcagtggcgcgattcggctcactacaagctccgcctcccgggttcacgccattctcctgcctcagcctcccgagtagctgggactataggcgcccgccaccattttttttttctatttttttttctatttttagtagacacggggtttcaccgtgttagccaggatgatctcgatctcctgacctcgtgatccgcccgcctcagcctcccaaagtgctgggattacaggcgtgagccaccgcgcccggcccaaatgctttaagaattattttacatcccttcttaagtaggtaaacttcctgtttgtagatatcatgtcttacatctaatgcagatatcagtccacatcaaacatttaatacattcttaaaaaaaatatgtgaagccttggaaaggaagagagaagttaggaagatactttaatctttccaatttcttaggaaaaaaaggaaaattccattttatatgttcttaattcaatgatgtctgctatgtagtgagcactctgtaaatatttataaaaacaacaaatgaacgaagccccccaaataagtaaatatgtttttttgttttgttttgttttttgagacggagtcttgctctgttgccaggctagagtgcagtggcccaatatcggcttgctgcaacctccgcctcccaggttcaagtgattctcccatctcagcctcttgagtagctgagactacaggtgcatgccaccacgaccagctaatttttgtatttttagtagagacggggtttcaccatgttggccaggatggtctcgatctcttgacctcgtgatccacccgccttggcctcccaaagtgctgggatcacaggcgtgagccaacacacccggtcaagtaaatacattctaattacacctcatttcatccacaacccagaaagtagtatgtaaactgaattcttagaaaaacatttccacgttaaatgcactagggcaggttgccgtataaaggaattctataaacaattttttttttaagagatagggtctcactttgtcacccaggctggagtgcagtggtacagtcataactcactgcaactttgaactcctggactcaagctgtcatcctgcctcagcctcccaagtagctgggactaaggtgcctgccaccacgcctggctaattttttaaattttttgtagagatgggggggtctcattttgttgcctaggctggtctttaactcctggcctcaagtgatcctcctgcctcagcctcccaaagtgctggaattacaggcatgagccaccgtgcccagccacagattttttaaaaataacagttttattgagatataattcacatatcatagaattcaaccttttaaagtatatgtttaatggttatagaatgaaccattggtttatagaatatcactgagttgtacaattgccatcgccccaaaaataaacttaatattactagcagctactttccattcctccctactccagcccctgaaaaccactaagttactttctgactctgtgggtttacctattctgaacatttcatataattggaattgtacagtatttggtctttttcattatctaacttctttcacttaatatgacgttttcagggttcatccatgttatagtatctattccttcctaatactttattcctttttatggttaaataatattctaccatatggatataccatattttgtttatccatatatttattgatggacatttgggttgttgctatttggcaattatgagtaatgctgcaaggtttttgagtgaacatatgttttaaattctcttcattgtatatctagaagcaaaattgctggatcgaataatgactctattgtttgaagaactgacaaactttttcaaagtggctgcgccattttacaatcccactagcaatgtacaagagttctaatttctctacattcttgtcagcacttgttatcgtctgtcttttttattttagccatcctggtaggtatgaagtgttatttcattgtctttttgatttgcatttccctattgacacacagtgctgagcatgttttcctgtgcttagtggcgatttgtatatcttttttggagcaatacctattcagatcctttgtccatttttaaattgggatatttttgtttttgttgttcttgagttgtaagagtcttgatatattctagatataagccacttatcagataaatgatttgcaaatattttctcccattccatgaggtgtttttttactttcttgcctttgaagcacaaacattaattttgacagagatttatttatctgttttttttttgtcacctgtgcttttggtacttgtgatggttagttttatgtgccaacttgactgggttaagggatgccccatagctggtaaacattatttctgggtatttctgtgagagtgtttaaatgaaagatcagcatttaaatcagttgactgagccaggcatggtggctcacacctgtaatctcagcactttgggaggctgaggcaggtggatcacttgaggccaggagttcaagaccagcctggccaacatggcgagaccctgtctctattaaaaataccaaaaaaaaaaaaaatagctggatgtggtggtggatgcctgtaatcccagcactttgggaggctgaggcaggtggatcacttgaggccaggagttcaagaccagcctggccaacatggcgagaccctgtctctactaaaaatacaaaaaaatttgctggacatggtggtgcatgcctgtaatcccagctactcgggaggctgaggcaggagaattacttgaacctgggaggtggagtttgcagtgag

SEQ ID NO: 2855 - DNA, 1873 bp, Homo sapiens
gtctgtgccctggcgcgagccttaggggcgcctccagaaagttcttcggggtttttccccaggaccggcgggtacggcgggtacggcgagggaccaagccggatttgcgattgggatgcagctgcgtttcaccaggggcaaaaagctcctttcctcctctctttcctcctcgccacttgcccttccccggggccacgaggaacaagtgcaagtagctggaagtcgagtgtgctactcaactcaggagatttggagacaaactgaacttccggcagaaacttctgaatctgatatccaaactcttctgctcaggaacctgactgcatcaaaaacttgcatgaggggactccttcaaaagagttttctcaggaggtgcacgtttcatcaatttgaagaaagactgcattgtaattgagaggaatgtgaaggtgcattcatgggtgcccttggaaacggaagatggaatacatcaaagtgaatttctgttcaagttttcccagattatcattctttgggatgagagaacattataaaaccactttgtttattttaaagcaagaatggaagacccttgaaaataaagaagtaattattgacacatttcttttttacttagagaatcgttctagtgtttttgccgaagattaccgctggcctactgtgaagggagatgacctgtgattagactgggcggctggggagaaacagttcagtgcattgttgttgttgctgtttttggtgttttgcttttcagtgccaactcagcacattgtatatgattcggtttatacatattaccttgttataatgaaaaaactcattctgagaacactgaaatgttatactcagtgttgatttcttcggtcactacacaacgtaaaatcatttgtttcttttgactcaaattgtattgcttctgttcagatgatctttcattcaatgtgttcctgttgggcgttactagaaactatggaaaactggaaaataactttgaaaaaattggataaagtataggagggttacttggggccagtaaatcagtagactgaacattcaatataataaaagaacatggggattttgtataaccagggataataaaaagaaaaaagaagttaatttttaattgatgtttttgaaacttagtagaacaaatattcagaagtaacttgataagatatgaatgtttctaaagaagtttctaaaggttcggaaaatgctccttgtcacattagtgtgcatcctacaaaaagtgatctcttaatgtaaattaagaatattttcataattggaatatacttttcttaaaaaaaaggaacagttagttctcatctagaatgaaagttccatatatgcattggtgaatatatatgtatacacatacttacatacttatatgggtatctgtatagataatttgtattagagtattatatagcttcttagtagggtctcaagtaagtttcattttttttatctgggctatatacagtcctcaaataaataatgtcttgattttatttcagcaggaataattttatttattttgcctatttataattaaagtatttttctttagtttgaaaatgtgtattaaagttacatttttgagttacaagagtcttataactacttgaatttttagttaaaatgtcttaatgtaggttgtagtcactttagatggaaaattacctcacatctgttttcttcagtattacttaagattgtttatttagtggtagagagttttttttttcagcctagaggcagctattttaccatctggtatttatggtctaatttgtatttaaacatatgcacacatataaaagttgatactgtggcagtaaactattaaaagttttcactgttc

SEQ ID NO: 2856 - DNA, 1584 bp, Homo sapiens
tgtatttgtaccctagaatatagaaaatgaaatgaattttaaaaccccacaatatacctggcaatccggaagaagattccagaaagtttgcattttctgttgagggactaaacaacagtactttcaaagtaattaatgaacttcttttgtcttttttatttttttaagaaaactggtaccaattggttaccagaaaatggcatgatcttcaagaaaaaaaagttttcctggtgaacatttcctctctccccaacatccttgagatggcaagaggcagacaactcaactaaagagaagaggatttacagcaagttgctgacccagcttacagcacagctgtcctcttccatagaatgggaagaagttttatgcctttatgcttctctgtaccatcaacctcaaagttcggtgggtatctcagagaaagtgttattattagcaaacagtcataattccaagaaaccacttgctaaggggttcctgatggatgattttctctctctgtagaaaacaagtaagaaccttctatcttggggaagtctggcaaatgctccatagaggctgctgtggaagggaatcattccacatcccatgttaggataaggcccgaaaccctgcctgggaaaacaagagcagcacacggagtgggcttcagtcctgtctcatttacagggtcttgaacacgccctataggcttctgggacctgtttttctgtatctgtcaaacaagggggtgctctaacgaccttcctgctgtagcgatcttgcttcactttgggtaaatgccacagccataggagaggaggtagggtctttgtcctcatgggtctcccaccaggcccaaggtttctccaagccctgctgacccaggagggccactcctagcccctctgccaagaatctactttccttccctcattgactgatcatgctcagaaatcagctaatttgggggtggggggcatccaacatgaaagaaacactacaaagaaactcttaggtaagctctctacctctacacacacccatacacatacactgacacagacacatacaggaaccctgaaatataagtattttcccttccatgtatcaaacctcttttgccctcttgaattgccagtgtgctgggagagaattcagtcccacagtggagaagcactgcttccacttacggaactcagctaaacctcagtgtttagggatgaccctgggcacaggttgaagctaaaggtcctaacacacctccattgcagtgcagaaatgcagactttaccagccatgattggggcagtagctaactaaaagcacaggaccaggatccagatccttcctttcttgctcttccacttccactgcctcccccaccctagatgtgttattctgtaacagtggtcgcctgctcgagactgctcatctgcctgcatagagtgccgtggacttgctctgtaatgcactgtatatgtgtatgtcctgactctgtggtttactgcaaataaaaatgacagcaggtggctgacctctgacctcctggtcatttcatgccattgcttgtgaaatcaggattggccattcatgctctgg

SEQ ID NO: 2857 - DNA, 1345 bp, Homo sapiens
gttcttttcctaaaacatgcatcatttacaaaatggatttgcatattctcagtattgttgggacagtaacatttggaaacagtcatttccacagaagagctttgagcctgatatccagtggggggtcatttctgactctgaaaatgagtatagctcaggaggcccaggtgctggggagtgacgccatcagctccactgcaggcctgcttgttatttccagccgcatatcacacctgtgaaagggaaagattcttcccactgtttgtccttctgatagccttctctctggactttgcatttccattccttttcattgacaaactgactttttttatttctttttttccatctctgggccagcttgggatcctaggccgccctgggaagacatttgtgttttacacacataaggatctgtgtttggggtttcttcttcctcccctgacattggcattgcttagtggttgtgtggggagggagaccacgtgggctcagtgcttgcttgcacttatctgcctaggtacatcgaagtcttttgacctccatacagtgattatgcctgtcatcgctggtggtatcctggcggccttgctcctgctgatagttgtcgtgctctgtctttacttcaaaatacacaacgcgctaaaagctgcaaaggaacctgaagctgtggctgtaaaaaatcacaacccagacaaggtgtggtgggccaagaacagccaggccaaaaccattgccacggagtcttgtcctgccctgcagtgctgtgaaggatatagaatgtgtgccagttttgattccctgccaccttgctgttgcgacataaatgagggcctctgagttaggaaaggctcccttctcaaagcagagccctgaagacttcaatgatgtcaatgaggccacctgtttgtgatgtgcaggcacagaagaaaggcacagctccccatcagtttcatggaaaataactcagtgcctgctgggaaccagctgctggagatccctacagagagcttccactgggggcaacccttccaggaaggagttggggagagagaaccctcactgtggggaatgctgataaaccagtcacacagctgctctattctcacacaaatctaccccttgcgtggctggaactgacgtttccctggaggtgtccagaaagctgatgtaacacagagcctataaaagctgtcggtccttaaggctgcccagcgccttgccaaaatggagcttgtaagaaggctcatgccattgaccctcttaattctctcctgtttggcggagctgacaatggcggaggctgaaggtaagaaaattgaaccagatttattcaccaaaacag

SEQ ID NO: 2858 - DNA, 854 bp, Homo sapiens
cccctgatgtgtatacagtctgtcactgactgaaatgttattatgtgctgcatgaacgcatctgttaaatgtataaactaaagagttgaaacaaatcccatgtttggccaatgtagaatctaagtagaaggaagacatagaactaaatttttcatccttttataactacaaatggatttaaatataatattaagtcttctgttcacatagtacatggttcaaatgtacatagaaagtacatataaatatctggaggaagattattccaggtggagagaactgcaagaccttgtggcaagaaggggctcagcatgactgacaaatagcaagaagagtcttgctgggtcttccggactggagtgcagtggcacggtcttggctcactgcaacctctgcctcccgggttcaagcgaagtagctgggattacaggcacccaccaccacgtccggctaatttgtgtatttttagtagagacaaggtttcactatgttcaccaggttggtctccaactcctgacctcaaatgatctgcccgccttggcttcccaaagtgctgggattataggtgtgagataccacaaccaaccccaactaccttcttatcagctactacaattatcaaccttaatggttctaaaaatcttggggttttgtttttatggtagccatggagaacagaaacattttgaacttatcttagtgatcttacagggatagcaaggaaagaatatgaccaatatattagagctatgatactgaattatacatttgctaaaactcatcgaattatacactcgagatctttgaaattaataatatgcaaatttcaccctgacaagaaaaataaaatactg

SEQ ID NO: 2859 - DNA, 31344 bp, Homo sapiens
gtaggagtcagagctctccttggtggaggagatgaacactttaggcttcctgccatcctgcctgtcagaggtgcaggtgggtctgaggaaacttatcttctaatggttagagcagatacaggttgtgctgtgctgatctgctgtgttcatatggcttcccacagtgttcaatgtggtccttgcttttagatgtgtactttaggggtttccacatgtgtccttatacctctcttaaagaaaattcctgctggtttgtgaaaatccaactaccctttgactagggacgcttcagaggcataaagggagtctctataatggcttggccagttggcttttatatttgacctggggagaaaaatcacctgaagaccaggataaggttgtgggtgtacatgcaacattaaggaaaatagtcataaatatgccaaaatatgaattgatctttagttttctttgatctttgaagatgagtaatttgctaagtgtggaagattgaaggaagatttacttttcaaatacaaggtttttaattgcctccttttgtaggcccctagataaatagagagctgaaataaacttttatagggtttgttttagaactggtactttataacctaatattcatcatgattaaatgctgtgtgttttggagacactgccacagtagctcactactcttcctaggctgaatctgctccagtttcttcacagccactaggtgtcagcgttgtcaagcttttacttccaccaaaggtttattccgatcagaacagccagttaaatgtttaaatgaggttgcatgaaattcggtaatgtgctccatgatggatagagtctagaaaaatgactaaatgtctgacttgcatggccaggcctcgagtcgatcacttgagagactttcctcttagagtagcaaagggtgtggcattctcaccattgcctaattcacaagttttggatccttttggatgaaggttttcaaagcagaattttctatttttagttaaatctcattaagtcaacatgatatggtctagaattactgggccaaaaagagaattgtgttctaggtattgctctatcacagatgttacatggacatttaacctttctatggccttattttcctaggggttatatttgttttatagaatgttccagggcaaatacattctttttgcagacacattaatttacatgaaaaaggatacaatgtccatttaagttttgtttttttaaaaaaattaatgatgatctaggtattagcacttgatggttactgagtgctactataacaaacccccagaggatgctgcttagcgttcacaccagagtcactcctccggcctatgcaatttttagtacagttttgtttccaaaaccatattttaccatggaggggtatttgagctggcaggcagtagtcactgtactcttctgttatcgtttctcattaacacattttcagtgattggattcttttattagctaattgtgaatttggaagaatgtaaatgcctcaggggcagaagggtagaactctgggagaatggcattgaggatagatgggtaaattatatgtgcataaagaaaagatgagcacatggagtgtatacatatatgcctatataaatcatctatactatttattaaatgaaaagcatatggcacatggtatgatttaaacatttatgaattgaatctttaaatgcttataacaatacagtgaggtggcttttgttagcaccattttacagatgagaaaattgttaaggaagttaagtaacatgcctaaggtcatggagctaataaggcgtgaaactgggcttcaaatctaaatcaagtctgacttcaaacctggagtgttatgtcttcttgatgggcagggtcaaagggtcagaacatcagctcttctctagcttgatgggatttatcttttatctcgcattctattcctttaaagctccaaaacctgatgaagcacacgccagaaagtgtttttcttctaatggaaaagattcaggcctctgtaaaattgccagtttagcaagaaagtttcctctttataaggtggtattctttgtattagagaattagtcatggtttgttccctggtccaaccatatttatcattccgcactgggacagaacataagctccaaaaggacagggcctcgtctgtcacctttaatgctgtatcctctccagtgctcctaacagtatctgactcatggcaaatcctcagtaaatattattggtggtgttgttgctatgaacaaagaaccatgccaaaaggtttgacctcagattataggcaattaaaatcaatgtgttttgctacacatttaaaattcaaaagagcataagcctttggtttcctggataccaagggctgagagattttcccttgcccctatgtattattgaggttttctcctaacatattttattcttctatccattttttaaaacaaacagaaaatgccagtgttaactctgaattatggatgtccaatgaattgactataattattttattggagtcatccattaggttttattttctgtccccttctatgatatttttaacatcatctttgagagatttctttctcggcacaagataagactactggagttctttgctccattctctcacttctgtttttctgaggttactgtgctttctttcctaggtctgaacttagtatttatttatttaaaagagtgagtgcctgcacatcagctattccttgggtcagggcacaacatctctacattttcctactttcaaaaagactaatgttgaaatagctttgattggaaaaggtgtgagaggaggctgtgataggtgaggtggtgggtttactgggatgaatcagcctaaagtaaacggatgacaaagcaggattaaccggagaatttggacactcttttggttcttactatcgaaaggcaggtacagtcttggagtttatctgcttggactacttggttttcatccttctagttggtgtgacataggaatggtaataacaagttccagctattatatcgatctcagatttatgtattaatttgagtgcttataaatcaagaggtttccttagagctttcgttttgtgaagtaaaacaaaataaggtttgataatgtggactctaatgtaattcattcctctctttatctacccttaaaacttataataacattataaaacacatccatttccagaggcttctgaagtcttttgatataaattaaagttgacattattgagttgaacattatatagactaaagcacatttagacattgatataaaaatatgtaaaattaaattattgtacttcagacctgcatgcatgttggaacacatcacgtatctgattcttgtctctctgatcacggcatactattcttgccttctgacctgtgcacaaggtttatataacttcgtatttagaatgtacagcccgtttcattttacatacttaaatcattctttaaagtcaaactgaagtctagcctccctcataacacctcctcctgtgacctctagtcaatataactcttcactctttgccattcttagcttttatttgtgtcatacaatttagcatttgattgatgatatactcattgagaatccatgtagtacagtgattagagtgtgagctttgtagttacccaaacctggttagactgtttgtactggatacctgagtttctttttaaaaagcatcggaaaaataaccctaacttaaatagcttgctttgaggaaacaatatatcaagtataaagtaagtcctatgaaatatgtataaaggacttaacattgcacctgacatgtgtttagtataattggtagctattatatgttttctgttattctcataagccattttcttaaataggttgtaagttccataaggatatggatatgttctttattttgtatacttctgtgctgtacatagggtccagcactgttctgaacatatgggatagaatgtttttggacatacatagtctagcagttggtgatctatgtaacaaaaagaacatgctgacacctctcaagaagggagctgcaacattttgttctaatatgtttctaaggtgatatctcttgatgggcagttaaagtactgaggacttgtactatgacaatctcttgggggaagtaggttcagtgttctggctaacgtccaattcaggttaataatacattctatatatccaagcttcccttatgcttcaggtattgttcagcacatggtacttttttagtgacgatgctcaggagtgaacaactgctttttttttcttttactaaactgggtgtgtgaccccttttaggtaattccaaagccagaagggtacataataccttgtaggataaaaattgaatttaaaacaaacttttattaaacagaagaaaaataaaaataagttagataaaatttatttgataaaaatgactgcgggttaatatttttcaattgaaaaataaaattctacttgttatctcttatctttttcatgatagccatcctaacaggtgtgcaagacaagagataacaggagttagtgatgatgtgaagaaaaggaaacctttgcacattgttgggaatgtaaattggtacagtcatttcggaaaaagtatagaggttgctaaaaacatatgaaatagagctatcataagacctatcaatcttacttttgggtatatatccaaagaaaatggaatcagtatcttgaagagatagctgcactcccacgttcattgcagcattattcacaacagccaagatattgaaacaacctaagtgtctattaacagatgaataaagaaaatgtggtatacatataagcaatgaaatattatttagccttaaaaaggaaggaaatcctgcctttgcaatagtatggttgaacctggaagacattttgctaagcaaagtaatccagacacagaaatacacatactgtatggtcttacttatatgtggaatctgaaaatgtcaaactcagagaagtagagggtagaggagtgctttccagggattggtgggtggaggaaattagtagatattgatcaaaggtacacattttcacttataagatgaacaagttctggggacctaataaacagcacgagtgatgatagacgtgttaatttaatggtggtagtcattacaaaatgtgtatatatctctcaatcatcttgttgcacactttgaatatattcaatctttgtcaatcaaatatttcaaaacaaaaaataaaattctagatagataatgactgaccacatagaaaatactcttaggcttactctgggaacttgagaactctgaggatacaacaaaacaatgtagggatcctgtggaagaaatgcttagaaaatgaaactaaatagtgctaggcttgtggttgtactatagcatatagagaagaaaaagttgatgagttccgataatatccttcaatcatgtaaggacttatagcaagaaaaaagtagtgaatcagctagaataatattgcactgggaattgcttatctacaaggaccttataaggtagggactaactttccattggggctaacattaaaatggaattgtaaatatattttctttaagacctttaaaaataaagaccaacctgaccaacatggtgaaaccccgtctctactaaaaatacaaaaaattagccgggcatggtggcaggcaactgtaatcgcagctactcgggaggctgaggcaggagaatcatttgaatataggaggcagaggttgcagatagatgagatcatgccattgcactccagcctgggtgacaagagcaaaactccatgtcaaaaaataaataaatcaataaaataaaagataaagaacatgtgtatctggaattgtttagatgcagtctaaggaagggtgtaagtgggagctggactgaatgagtactaaggggaggtgctaagcttctagagcaatagttctatagccatggattaacttcagtgacctttgtaagatgaagtatgttaattgctcaattgggagaagattctttttttccttcttctgtaattaatctaactgtcctgaaagaattctgattgaattattccttttaagggtaagtgaaccaaggactgctatactaaaatattcatgtctgtcttaggtggtattctatttcttatttaccagatcaaataaaatgattttttatgccatttataaacctgtttctgaagatttcaaagcatttcagacatcatttaaaaatttattgcacaggtataaaaaatgttgaattattaaacagtgtgctaagttcaaaccaacccaaacatattctatccactacttatgcaatttcatttttattcaattgtacatagttgtttgtcccaaaggagaaaagaatgtgatgttacatttattctttagttttctgatatagagaaaagaaggttggatgcatcatgcaaggtcatcctgagtcagtaacaaattcagaattaatattcacatttcctaatatccagctttttgcaatagccatttgatcattttcactacttcataaactacagatctttatagggtgatttgtttttctatagttacagtctgaagaaaaaatcttatggattttttaatgtaagaaacttgcctttattttaaaatgaatgatgaaaatgatgcatattatacatttgtcctcctaaaatttgatttccacattggatagttaatggtcatgataactaagtgtcttctattaaattagcaaagtaaaaacattatagagacatcttttaattcctaaggtttgctattctgtttccgtctgttgtctctggggctcagtttattggtggcacttaggtagaaagctgttgagtcaagcgttagctgattttcatgcaccagagaagatttattaatttttacaaggttgtttgctatacagtagtttgcgttgtgggcagcttatagctactttatgtggggaatgtttattgaaacaagttaattctttgttatgggttgtttcaaaatttacaatgctgataggaattccagagatggcaaaaaaaaaaaaaacaacaaaaacaaaacaaaaacccaaaaccaaccaaacaaacaaacaaaaaacaacttcagtgtttgcatcaatatggtgcttatttgtgcatgtcttatattgacatacctaagtccataaggttgtcaataaaagttggtattgaggagaaataatgtgcacatgtaccctaaaacttaaagtataataataaaaaaaaatagacaagttaactctgaaaatgtcttctttagtctgttttgcactttgaaagtgatctgtgcatgaaaagaaggtaatctttcactactaagattatgacttttggtggtttaagatgcaaattacagaggctatgctatactagagaaccttaaaccaagtaaagaatctttagaattcatctaacctaactgttttattttattttattttttatgtttgagacaatctcgctctgttacccaggctggagtgcagtggcacaatctcagctcagtgcaacctctgcctcctgggttcaagtgattctcttgcctcagcctcccaggtagctggaattacaggcatccaccaccatgcccagctaattttttgtatttttcgtagagacagggtttcaccatgttgcccaggctggtcttgaactcgattcacccgtctcagcctcccaaagtgcaaggattagaggcatgaactactgtgcctggccccaactgttttattttaaagatgaaaaaaatgagttgcaaggagattaaatatcttgtacaaggccacatactttgctaatgacaagagttgggacaataacaggaaatgatatattctcacaacctttggttctttggtgagccctctattgatccttggtatctggtttgtatcctgaaaccaagagaggacctatagtatgaaaagcattcttttcctgtttgaaaagctgcatgatgctgagattggactggctgcagaaatctcttctaatgttaaaacaaagccaggacattcagtttatttcactggggttcatggtttgggaggccttgcttatatatggctataatgaaaggctctgatggcagcctttgtggaagtgagccccattctctccagggaaaaacatacttctgctacctcctgtgtcttgaggagcatttcctttgctggacacttgctaggtggtcgagtagtgacattctgtcctgtattcagggacatgtggaatagaggagcccctcatagtccccttaataaaagatgtgggtgcagtcttctctaaaacgcaagcctccagccactctacatttccactttcctactcaagaagaaaggagtgaacttctttgagtgttcacagaaatgtacaacaaaggactgaaatgaggatgcagcacaattgacttttcagtgaagtccacttctttctgattatgcttgtcctccaggtgggagttctgctctttcagattgagccctaggaatctgaagtagaacagaattttctaccaggatgaaaggagtaccagaatgggtatggactttcttgagtctgtaggaaccttgttgcattgggactatggaataatccaggaaattgggtttcatatcaaactgcaggaacaacaaagatgcttttaacatttatctatacatgcgaatatactgtattaggcggtgaggtgccagtaaatgaaaataattcagtagtgcctttttaaaaatgttaaatttttaaatatttatttatttatttttgagatggactctcgctctgttgccaggctggagtcagtgacgcgatcttggctcactgcaatctctgcctcccaggttcaggcaattcttctgcctccgcttcccgagtagctgggactacaggtgtgtaccatcatgcctagctaatttttgtatttttagtagagatggagtttcaccatgttggccaggatggtatcgatctcttgaccttgtgatctgcctgcctcggcctcccaaagtgctggaattacaggtgtgagccaccgctcctggcccttttttttttttaaagaagaaaatgcaataatattacaacactgtagacaaaggaaagacttataagcatcatctggttcagccactttatcgtggatacacaaacaatacagaaagtacatcattttgtagttttctactgcaatggaattttgatttattgacaatttctagaatcccgtgtcgtctaaacctttaaagtatatcctaggcacttaggttgtttctataccttgactatcatgaatgatgctgcaatgaacatgagagtgcagatacctcttcaaaatactgatttcatttcctttggatatatactcagaagtgggattgctggatcatataatagttctatttttttaaaatctattttaggaaccttcatactactgttcatagtggctgtaccaatttacattcccaccaaggttcccatttctctacaagcattcccatttctgattacactcaccaacacttgttaccttttgttttttggtagtagctatcctatcaagtgtgaggtgatatcttattttgttttgatttgcattactctgatgattagtgatgtgagcacctttttatatatctattggccatttgtatgctttctttgaaaaatttctatttagagaagcaataaaagatgataaaggggatatcaccactgatcccacagaaataaaaactaccatcagagaatactataaacacctctacgcaaataaactagaaaatctagaagaaatggataaattccgggacacatacaccctcccaagactaaaccaggaagaagttgaatctctgaatagaccaatatcaggctctgaaattgaggcaataattaatagcctaccaaccaaaaaaagtccaggatcagacacattcacagccgaattctaccagaggtacaaagaggagctggtaccattccttctgaaactattccaatcaatagtaaaagagggaatcctccctaactcattttgtgaggccagcatcatcctgataccaaagcctggcagagacacaacaaaaaaagagaattttagaccaatatccctgataaacatcgatgagaaaatcctcaataaaatactggtgaaccgaatccagcagcgcatcaaaaagcttggccaccacaatcaagtaggcttcatccctgggatgcaaggctggttcaacatatgcaaatcaataaacataatccatcacataaacagaaccgactacaaaaaccacatgattatctcaatagatgcagaaaaggccttcaacaaaattcaacagccttcatgctaaaaactctcaataaactaggtattgatggaatgtatctcaaaataataacagctatttatgacaaacccacagccaatatcatactgactgggcaaaaactggaagcattcattccttttgaaaactggcacaagacagggatgccctctctcaccactcctattcaacatagtgttggaagttctggccagggcaatcaggcaagagaaagaagtaaagggtattcaattaggaaaagaggaagtcaaattttccctgtttgaagatgacatgattgtttattagaaaaccccattgtctcagccccaaatctccttaagctgataaaaaacttcagcaaagtctcaggatacaaaatcaatgtgcaaaaatcacaagcattcctatacaccaataatagacaaacagagacccaaatcatgagtgaacttccattcacaattactacaaagagaataaaattcctagggatccaacttacaagggatgtgaaggacctcttcaaggagaactacaaaccactgctcaaggaaataagaggacacaaacaaatggaagaacattccatgctcatggataggaagaatcaatatcatgaaaatggccatactgcccaaggtaatttatagattcaataccatccccatcaagctaccaatgactttcctcacagaattggaaaaaactactttacatttcatacagaaccaaaaaagagcttgtagtgccaagacaattctaagcaaaaagaacaaaactggaagcatcatgctacctgacttcaaactatactacaaggctgcagtaaccaaaagagcatggtactggtaccaaaacagatatatagaccgatggaacagaacagaggcctcagaaataacaccacacatctacaaccatctgatctttgacaaacctgaccaaaaaaaaaaaaagaagtgaagaaaggattccctatttagtaaatggtgcagggaaaactggctagccatatgtagaaagctgaaactggatcccttccttacaccttatacaaaaattaattcaagatgaattaaagacttaaatgttagacctaaaaccataaaaacactagaagaaaacctaggtaataccattcaggacataggcatgggcaaagacttcattacccaaacacccaaagcaatggcaacaaaagccaagatagacaaatgggatctaattaaactaaagagcttctgcacagcaaaagaaactaccatcagagtgaacaggaaacctacagaatgggaaaaaatttttgcaatctacccatctaacaaagggctaatatccagaatctacaaagaagttaaacaaatttacaagaaaaagcaaccccatgaaaaagtcaggaaaggatatgaacagacacttttcaaaagaagacatttatgcagccaacagacacatgaaaaaatgctcatcatcactggtcatcacagaaatgcaaatcaaaatcacaatgagataccatctcacgccagttagaatggcagtcattaaaaagtcaggaaacaacagatgctggagaggatgtggagaaacaggaatgcttttacactgttggtgggagtgtaaattacttcaaccattgtggaagacagtgtggcaattcctcaagggtctggaagcagaaataccatttgatccagcaaccccattactgggtatatatccaatggattataaatcatgctactataaagacacatgcacacgtatgtttattgcagcactattcacaatagcaaagacttggaaccaacccaaatattcatcagtgatagactggattaagaaaatgtggcatatatacaccatggaatactatacagccataaaaaaggatgagttcatgtcctttgcagggacatgcatgaagctggaaaccattatcctcagcaaactatcacaaggacagaaaaccaaacaccacatgttctcacttataggtgggaattgaacagtgggaacacttggacacagggcagggaacatcacacaccgaggcctgtcggtgggtggagggctgggggagggatagcattaggagaaatacctaatgtaaataacgagttgatgggtgcagcaaaccaacatggcacatgtatacctatgtaacaaacctgcacattgtgcacatgtaccctagaacttaaaggatttaaaaaaaaaaaaaagaaacatgtctatttagttcgggcacagtggctcacacctgtaatctcagcactttgggaggctgaggcaggcagatcacctgaggtcaagagttcaagaccagcctggccaacatggtgaaaccccgtctctactaaaaatacaaaaattagcaggcgtggtggcaggtgcctataatccctgctatacgggaggctgaggcaagagaattgcttgaacccaggaggcggaggttgcagtgagctgagatcatgccattgcactccagcctggggtacaagagcgagacttaggtctcaaaaaaaaaaaaatgtctatttaggtattttgctcatttttaattaggttatttgtgggtcatttcttttcttttcttttttgcttttgagttaaatgacttccttatagattttcaatactaacctcttattggatgtatggtctgcaaacattttatttcattccataggttactatttcattttgttgattatttccatttctgtgcagaaactttttagtttgatataatttcacttatttatttttgcctttgttgctggtacttatggcatcatatttaaaaaaattgtgaaaactaatgtcatagagcatttcccctttgttttcttatagtagttttatggtttcagggcttatgtttacagctttaatccattttgagttaaattttgtttgtgatgtaggataaaaataaatttgttttttggtatgtggatattcaattttcccaaccccacttattgaagagactattttttccacattgtgtatttttggcaacttttcactattgagcataacactaactatgggcttgtgaaatacggcctttattgtgttgaaatacattccttctgctagccactgcacccggccttgatttaattttcttactcattattggtctattcagattttccatttcttcatgattttatcttggtagtttttatgtgtctaggaatttatccatttcttctaagttatccaatttcttgccatataatagttcacaggagtcttttttaattctttgtatttctgtggtatcacttctaatgtttcctcttttatttctggttttatttgagtctccattctttttttgttagtctagctaaagagactgaatatgggaacagctgagactaaggtacagggagctgaagaagagtaaaaatgtcatactttagctctgggttgtccactgtgacttggccaaactgatcatgggactgtctggtattgactcagcagcatttgtttcagaaaagcaagcttagtcacatatttactatacaactagtaaaaattataatctcaaatacactcatattaaatttttgtatccaagctgtacatctctacctgtgttcacaatcagaagacatcacaatgactgttacggtgtccttgtcaggcaaaaagactactgcttcaactacagctgttttgttaatagtagtgctaggagcatgcctagggcactgttggctaaaattcaaaggaaatgttgaggatgcctagctgagaccaacagttcagcttacagcagagctttaaacaggcacacaccagtcatgcagccttttgtagatgttaagctgtttgttaggggctgattacctgagggctaatttaatatgtaatgagaagtttagtttgttctgttattttttttaaggcgtacttatttttgctctctaaactatcatgtttggacaatttcatgtttgctatttaggaagaagctaatcatcttttataccctatctcatgctccaaatgtgacagcagtagaaacacttacactgaaatacatctaggtgagggaaaatgtcaccagaagatggagtagtgttgctggtttgctccatattttgttcaatgatttagaagagtatgtgtatgtacaggtttactttcatacactctagtttcaaatgacagaaaatataaattaattgatattcttcagagtcaacattaaattttagattggatgtctttaaatttttacaatgtaaattgcttttctctcttctgtggtcaactgacagttgcattcattgaccagataaactatatttagcttaacatttttagtatcacttatgggattttagcaagatgccacaatatgaacttgtaatattgcatttcttttttaactgtattattacaaacctgattttaaatcatttttttctattttagttacagcattaatacaggctaaaattctctatataaattctgctcatattagtatagcacctggtagcactacagttcagtatttatcatctactccattataaaacctttgttctaaaagagctgtatgagcctattagatgtatacacaattaagtaggtaatgatctgtggttgcatccacacagcattaacagctgacttgtgactgattttccaagtgaggtgctgattgttgatacggagtacttattggatgaaaatgtttagaatattttgaagaattatttttgtgctttgaagtttaagttacatattttgttttaaccttactgtttgcttaatgaagaaattataatgtttcctccctctcattttgatgttggtatttatctctattgttctaagctccccatccaaacattgggagttactgaagcccttcttggtacttttggtgcagaatgtaatggtccaccacatgtgtcattactgatagtgacacatttatgtcttcatgttaaatttgcatttttaaaattaaaggtaactgaattttagtcattttcccaactttaatgttaaagtcattgagaatagttatgatatttttgaaagtttgataatgatcatctgtgaatttagagaaactaaatatgggagattattctggtaagtatccaatttcagtcttctttgtcagtgtttgaacttaagctaaatgctcatgtttgtaggacaaaggcatttcttctcaccttgggtcagagcagcaagtcctgggaatatgatacagcattatgtgaataaacagaagttttggtaggcagcagtgtacaatttgttaagaaaaaaatcagacaggaagtttttgttggccttttgcccattctaatataaacatacatctataccatatattaagattgggcatagttaagatcaaattcatttaacaactgggggaatttattttacctgggatggaaaacattaaatccaaagatgaaacagaagcaaataaattaagcgtacctgaactttattttaaatttagaggaagctgtctttttggaatctctttgaaatctatcaggaaacatttttgtcttaaaaacagagagtaaataactctgggtttaagatatctaacatgtttgacctttgttatgctaaaatagtgggctagaattggatccataaaaaaatgatcggatgtttatccagggaaggaatcttaagttagacttggtattaaccaatgtgtgataagtaaggtaccacttgtgaacatgtggttggtgctcatgagtaacttgtatcagtcactatgcatttttcttctactccaaacacctggcctagtggatatagagaatgtcttgacatctttgttactctatttttttttctttcttctatgttcttctaatgaatgttactctgtttttttttttttttttttttttttgagatggagtctcactctgttgcccaggctggagtgcagtggtgcgatttcagtgcagtggttcttgccattctcctgccttagcctccggagtagctgggactacaggcgcctgccatcacgcccggccaatttttttgtatttttagtagagatggggtttcaccgtgttagccaggatggtctcgatttcctgaccttgtgatccacccgcctcagcctcctcaagttctgggattacaggcatgagccttggcaccgacctgtttttttttttttgagacggagtcttgctctgttgcccaggctggagtgcagtggcgtgatctcggctcactgcaagctccaccttctgggttcacaccattctcctgcctcagcctcccaagtagctgggactacaggcacccaccaccatgcccagctgattttttgtatttttagtagagacggggtttcaccatgttagccaggatggtcttgatctcctgaccttgtgatccgcccgccttggcctcccaaagtgctgggattacaggcatgagccaccgcgcctggctgaatgttactctgtttttaagcggttttggaaaagtttatttcttactcttgatataagagctgtgcacagtgctgctataaaaagttagtaattttttaatgtcagtaggggatcaatttgagagaagactaaagttgagaatatctaagaatgttggcatatatggaatagatgttatcaccctacattttaaaggtcttttttgtatacattctatatgtaatatgaggtcagtgaacacactctaagatcaagctcttatagtagactgaaaaacttggcaacactgaagaacaattgtgagtatttttagattaagtgaatgacactacaaatattatttttaagatatctggcattaaggcttatttattgtgaaaaccattaaacgaaagagagaaatcacacaccagaataataaaaaaaaatagttaagatagacatataggggcaagagggccgaataggaacagctgtggtctgcagctcccagcaagatcaatgcagaaggtgggtaatttctgcatttccaactgaggtacctggctcatctcattgggactggttagacagtgagtgcagcccacagagggtgagccaaagcagggtggggcattgcttcacccgggaagtgcaagggattgggaaactaccttccctaaccaagggaagccgtgagggactgtgctgtgaggaacggtgcattccggcccagacactatgcttttcccatggtctttgcaacttgcagaccaggagattcccttgagtgcctatgctaccaaggccgtgggtttcaagcacaaaactgggaggccgtttgggcagacactgagctagctgcaggaattttgtttcataccccagtgacaactggaatgccagcgagtcagaactgtttgctcccctggaaagggggctgaagccagggagccaagtggtgtagctcagcggatcccaccccaacagagcccaacaagctaagatccactgtcttgaaattctcactgccagcacagcagtctgaagtcaaactgggatgcttgagcttggtgtggggagggatgtctgccattactgaggtttgagtaggcagttttcccctcacaatgtaaacaaagctgtgggaattttgaactgggtggagcccaccacagctcagcaaagccgctgtagccagactgcctctctagattcctcctctctgggcaggcatctctgaaagaaaggcagcagccccagtcaggggcttatagataaaatacccatctccctgggacagagcacctgggggaaggggtggctgtgggcacagattcagcagactgaaacattccatctgccagctctgaagagagcagcagctctcccagcacagcgctcgagctctgctaagggtaagactgcctcctctagtgggtccctgacccccatgcctcctgactgggagacacttcccagcaggagttgacagacacctcatacagaagagctctgactggcatctggcaggtgcccctctgggatgaagcttccagaggaaggaacaggagcagtctttgctgttctgcagcctccgctggtgattcccaggcaaacagggtctggagtggacccccagcaaacaccagaagcactgcaggagaggggcctgaccattagaaggaaaactaacaaacagaaaggaatagcatcaacatcaacaaaaaggacatccacacaaaaaccccatccgaaggtcaccagcatcaaagaccaataaaggtatataaatccatgaagatgaggaaaaaaccagcacaaaaaggctgaaaattccagaactcagaatgcctctttccttcaaaggatcacaactcttcaccagcaagggaacaaaactggacggagaataagtttgacaaattgacagaagtaggcttcagaaggtggagagtaacaaactcctctgaggcaaggagcatgctctaacccaatgcaaggaagctaagaaccttgaaaaaaggttagaggaattgctaactagaataaccagtttagaggagaacataaatgacctgatggagctgaaaaacacagcatgaaaacttcctgaagcatacacaaggatcaatagctgaatcgatcaagcggaagaaaagatatcagagattgaagatcaacttaatgaaataaagcatgaagacaagattagagaaaaaagaatgaaaaggaatgaacaaagcctccaagaaatatgggactatgtgaaaagaccaaacctacgtttgactgatatatctgaaagtgatggggagaatgaaaccaagttggaaaacactcttcaggatactaaccaggagaacttccccaacctagcaagacaggccaacattcaaattcaggatatacagagaacaccacaaagatacttctcgagaaaagcaaccccaagacacataatcatcagattcatcgtggttgaaatgaaggaaaaaatgttaagggcagacagagagaaaggtcgggttacccgcaaagggaagcccatcagactaacagtggatctctctgcagaaaccctacaagccagaagagagtgggggccaatattcaacattattaaagaaaagaattttcaacccagaatttcatatccagccaaattaaacttcatcagtgaaggagaaataaaatcctttagagacaaaaaatgctgagagattttgtcaccaccaggcctgccttacaagagcttctgaaggaagcactaatatggaaaggaaaaactggtaccagccactgcaaaaacataccaaattgtaaagaccatcggcactatgaagaaactgcatcaactaatgggcaaaataaccagctagcatcataatgacaggatcaaattgacacataacaatattaaccttaagtgtaaatggtctaaataccccaattaaaagacacagactggcaaattggataaagagtcaagacccatcagtgtgctgtattcaggagacccatctcacgtgcagaggcacacatagtgtgctgtattcaggagacccatcgcacgtgcagaggcacacattcctcaaggatggaggaatatttaccaagcaaatggaaagcaaaaaaaagcagggtttgcaatcctagtctctgataaaaccgactttaaaccaacaaagataaaaaaagacaaataaaggtattacataatggtaaagcaatcaacgtgacaagaagagctaagtatcctaagtatatatgcacccaatacgggagcacccagattcataaaacaagttcttagagccctacaaagagacttagactcccacacaataatagtgggagactttaacaccccactgtcaatattagatcaacaagacagaaaattaacaaggatgttcaggacttgagctcagctctggaacaaacagacctaatagacatctacagaactctccacccgaaatcaacagaatgtacattcttctcagcatcacatcacacttattctaaaattgaccacataattggaagtaaaacactccttagcaaatgcaagagaacagaaatcttaacaaacagtctctcagactatagtgcaatcaaattagaactcaggtttaagagattcactcaactgcacaactacgaggaaactgaaaaacctgctcctgaatgactactgggtaaataaccaaagtaaggcagaaataaataaattctttgaaaccaatgagaacaaagacacaacatacaagaatccctgggacacagctaaagtggtgtgtacagggaaatttatagcactaaatgcccacaggagaaagtgggaaagatctaaaattgacaccctaacgtcacaattaaaagaactagagaagcaagagcaaacaaactcaaaagctagcagaagacaagaaataactaagatcagagcggaactgaaggagatagagatatgaaaaacccttccaaaaatcaatgaatccaggagttggttttttgaaaagattaacaaaatagatagacttctagccagactaataaagaagaaaagagagaagaatcaaatagacacaataaaaaatgataaagggatatcaccaccgatcccacagaaatacaaactaccatcagagaatactataaacccctctacacaaataaactagaaaatctcgaagaaatggataaattcctcaacacatacgccctcccaagactaaaccaggaagaagtcgaatccctgaatacaccaataacaagttctgaaattgagacagtaattaatagcctaccaaccaaaaaaagcccaggaccagacggattcacagctgaattctaccagaggtccaaagaggaggtggtaccattccttctgaaactattccaaacaatagaaaatgagggactcctccctaactcattttatgaggccaacatcatcctgataccaaaacctggcagagacacaacaaaaaagaaaatttggggccaatatccctgatgaatatcaatgcaaaaatcctcaataaaagactggcaaaccgaatccagcagcacatcaaaaagcttatccaccatgatcaagtcggcttcatacctgggatgcaaggctggttcaacatatgcaaatcaataaacgtaattcatcacctaaacagaaccaacgacaaaacccatgaatatctcaatagatgcagaaaaggccttcaacaaaattcaacaccgcttcatgctaataactctcaataaactaggtattgatggaacgtatctcaaaatagtaagagctatttatgacaaacccacagccaacatcacactgaatggacaaaaaccggaagcattccctttgaaaactggcacaagacaaggatgccctctctcaccactcctattcaacagagtattggaagttctggccagggcaatcaggcaagagaaagaaataaagcatattcaaataggaagagaggaagtcaaattgtctctgtttgcagatgacatgattgtatatttagaaaaccccattgtctcaggtcaaaatctccttaagctgataagcaacttcagcaaagtctcaggatacaaaatcaatgcgcaaaaatcacaagcattcctatatgccaataataggcaaacagagacccaaatcatgagtgaactcccattcacaatttctacaaagtgaataaaatacctaggaataaaacttacaagggatgtgaaggacctcttcaaggagagctacaaaccactgctcaaggaaataagagaggacacaaacaaatggaaaaacatttcgtgctcttggataggagaaatcaatatcatgaaaatggccattatgcccaaagtaatttatagattcaatgccatccccatcaagctaccactgactttcctcacagaattagaaaaaacgactttaaatttcatacagaaccaaaaaagagcttgcatagccaagacaattctaagcaaaaagaacaaagctggaagcaccacactacctgacttcaaactatactacaaggctgcagtaaccaaaacagcatggtactggtaccaaaacagatatatagaccaatggaacagaacagaggccttagaaataacaccacacatctacaaccatctgatcttgacaaacctgacaaaaacaagcaatggggaaaagattttatatttaataaatggtgttgggaaaactggctagccatatgcataaaactgaaactggaccccttccttacaccttatacaaaaattaattcaagatggattaaagacttaagtgttagacctaaaaccatagaaaccctagaagaaaacctaggcaataccattcaggacataggcatgggcaaggactttgtgactgaaacacccaaagcaatggcaacaaaagccaaaattgacaaatgggatctaatttgaactaaagagcttctgcacagcaaaagaaactattatcagagtgaacaggcaacccactgaatgggagaagatttttgcaacctatccatctgacaaagggccaacatccagaatctataaggaacttaaacaaatttacaagaaacaaacaaacaaccccatcaaaacgtgggtgaaggatatgaacagatatttctcaaaagaagacatttatgcggccaagaaacacattcaaaaaagctcatcatcagtggtcattagagaagtgcaaatcaaaaccacaatgagataccatctcacgccagttagaatggctatctttaaaaagttaggaaacaacagatgctggagaggacgtggagaaataggaaggcttttacactgttgatgggtatgtaaactagttcaaccattgtggaagacagtgtggcaattcctcaaggatgtagaaccagaaataccattggacccagcaatcccattactaggtatatacccaaaggattataaatcattctactataaagacacatgcacacatatgtttatgggagcactgttcacaatagcaaagactggtaattaacccaaatgcctatcaatgatagactggataaagaaaatgtggcacatatataccatggaacactatgcagccataaaaaaggatgagttcacgtcctttggagggacatggatgaagctggaaaccattattctcagcaaactattacagggatagaaaaccaaacactgcatgttgtcactcctaagtaggaattgaacaatgagaatacatgggcacagggaggggaacatcacacaccagggcctgtcagtgggtgggggcctaggggagggatagcattaggagaaatacctaatgtagatgacgggttgaagggtgcagcaaaccaccatggcacgtgtatacctatttaacaaacctgcactttctgcacatatatcccagaacttaaagtgtaatttttttaaaaaaagatagacacatagtttatgccagaaaaataaaaaagttaagatagcttatagaaggttgagtgtgtattacctagaacttctctgaaaacagtaagtgtttatcattggaattatagacaacagatattatatatggcttatgattattaatgagaaatacaatttgtatttcttacttgctacatctcattttgaactgtattccaaaattgatggaattaggacagcgctacaaatttatttcattatttaatgttataagcaattaaaattttattcatatgagataaccatgctctcaaaattataactaatttcatattcagttacctatatgaaatccttcttaatcattctttaaaactgggttgtacaagaggttctcttgggccagtgctggagtagacaacagaggggtgagaacctcctgttgaaaaggaagaaaaattatcatgcaacaatttggaaggtttggattttttttaaaaaggcaagtgcattaaaaaataatgagatagtgtagtaaattatgaaaggctgggaacgtggcttcagtaaaggcagaaagtcctttattattatttttaaacctatctttctcctaaccgtaaacataagccatatattcatgaatacaacccccaccagtgtgtgaggccagtctattaaaaataaaaaggcacataggagtctgtcacaccgcaagatgaaagctgtgttctttatgcatggatatcattttgttttagaagggttgtaaaaaataatacaattataaagaaagtcaatttatggaaagaaggtagactcttcccgcattatgtaaatactttctactagggtgctcgatataagaaatatactacacagcatttcactttcacagaaaatatgtgatgattattcacataataacaggaacttttagagcatgtgaatattcatttatgaattattgacagagaggttggaatgttaggagatagtgcctactggacattatttagtaatacagattttccatctctgaagctgtggaagtgcctactatacaggttaggtctttgatttacttaattcttacaataatcatataatgggaatattattttccccttataattcccatataatgggaatatcaattttctcccctattgggccactcacacaggatgtaagtttcaaatcaggcctaagtaataaaaaatggcaaattcttgatattttggaatgagagacaataggcataaccaagttgttatactgcctcttccatgtcacctcttctgtgcctcctgagcaaataccctccaacttggggagaagaggagagttggataggaatagaataaacttagacatggtttgtttttgtgctggtctaccactactgtctgccactacccgcccattcctccagggtaggagacatgatagaatttactgcaatgaaatttgggagatctgagatggccagtgaatctcaggccctgtatggacctatgactctaaaaaatgcttctaggagtcttagggaaacggagagaatgtttctgccatgttgtaaccttggagtctttttagttctgggatagtgtgtaggggcatcagaaattttgtcttaggtccagagtgtgggtagaagtcagtggagagagggtgtcagggagcttgatcacatggaggagagcaggggaagcaggcctcagtcaggaaacattgtaattttggaagtatacagaggtttagatggcggtgtgtgtgggtacagcactttatcatgtactttgacttttgtattccacttctgccatagccaggtgggagacaagctgttgctttggttagggttgccagataaaataatacagaatgcccagttaaatttgaatttcatatcaatgatgaataattttctagtagaattatgtctcaaatattgcatggggcacacttatgctaataaaaatatttattctttttgaaagtgaaatttaactgggaatgttttatttgctaaatctggcaacacaactctttggtgccctgagccagtgaaggaatcaaactatcctgtgctttatccatctttgaagtttgacaacaggtgggtgccccacaacaggtgttaatattacatttcatagaagaagtaattctcagttcaagaagtaattcttaattcttgatgggttagtctgtctttctgaggcagcccaattaggccaaatagaatggaaaatatttaatccctagaaaatttcgagagggtaacctatttagtagcttgttctagaacacacaaatagtaaatggcagcatcaggtttttgcaggtccaaatagcctccacaatacacattcaaaatttaaaaagctcctcaggaacatatttattgtgtaaagaaaggtgctcttaaaaactgactggtaggtagctgctgctattttctataatgtactcttgtgttatggtcaggcctacaaaagaaaccttacaagtctttcccaggaaacatccttttgaaattaattgaattattttaaagaaataatgagatattacttctttttaacttggcattttattcaaaggatgtttctgaaattaaaccagtgggagtttaaccaaaatagtacagtgacacaatgatgccatttagaagaatgttgtgctgagttaaatagctctaattatcagcaactttcaaattataaagcaattaaaaaaaccctcagttttcttcttcagtggaatccatagtgattgtatgaagcatttcatctggtttggatagctgggtttcagcatctattttgagatcccagagtcacaaaaagtatgctatccttaaacttagttttctcttgtgcccagaataatcctgtattctgaatcccattttcttctgtcccctgaggaccttcctttataggaagttgtattttgcctttactgtcaacttttcatttttttctactcatttttccttttcagcatattaacctgttaaagtttgatccaaacgacatgacgatgctggcaacaacagcagcagcaatggtaaccttctttcaaagcaataccccatccagcgacagtcctgtctttcttcttttcctcatgctaagtttctgaaagattttaggtgcgctgacctgcttactaactacatccatttttggacagaagcgagggagtcgaatgtttcctggagctagttttgttaactggtgttctatttccattaagtatcagatgccacaaaaattccagttaatcatgaaaataattaaaaagaaatgttaatatataccttaaaaaatacatgttaagcatataaaatcaaacttttttttttttttttgagacagagtctcgctctgtcacccagcctggagtgcagtggtgcgatctctgctcactgcaagctccgcctcccgggttcacgccattcccctgcctcagcctcccgagtagctgggactacaggtgcgtgccaccacgcccagctaattttttgtattttttagtagagacggggtttcaccatgttagccaggatggtctcgattccctgacctcatgatccacccgcctcggcctcccaagtgctgggattacaggggtgagccgccgtgtccggcctaaaatcaaactcttaacataaaagctatgctgtacaaatattccttttgcgagcttttttttttttttcccccacgttgagctaggtgaagcttctgaaacaggaaatcaaagaaatctggcctgaaaggcaacccccgccttttaaaaaaacaaaacaaaactacctttaaaaagcacaggcatttttattgcttcaaggatcttcaaaatgcagctaaaattcaagatttagggcaatctattattaacatttttgttcattcaatgaacatgaaatactcccaacagtttaaaattgttaattgtagaggaggggaggtttccatggtcttttctttttctatgattccttcctctcttatttcaatatgagccagcttatttgcctccttgtgaccagctcaacagccctgccagcagactcagtgaaggcatggttttattagcagttgttgggtggatgtaagtatcagtatagttattactgtggatgttttaattatgtgcttgctaatctgtccttagtacttgctgttccctcttcgtggaatgattttcccctagagctcacaggacaattccttcttatcattcagggttcagcttaagtatcacttccttacagtggatttctctgattaatctaatgtagactttcgcctcttcatagcagttatcactgtaggaaattatcttgcacatttgatctttaagttgtttattgcctggcttctccattgggacataagcacattgtctctcttgatattaagtggcactcaataaacacttgttggagaaatgaatgatatgaaaggttaagtatacaagtgagtcagaagtcaaacatttctaaggagaggtttgtatatactattttttattaacttgacttttcacttctcagtaatctatttctgcctttcacttgcacaaacactgttattatgatcacttatccaactgacatttttcagaccttttaacttcaactgttcttttttcctgtaaatcttaattttctttttttttctcccaatttttctcctacatgtctggactcttcccagttcctgtcagagtaaatgttgatattgcccagaacataacttgctcttccttttctctccttctcatttttctttctttcccctacaccctctgtatactctatagagtaaaatcatatacacccacggagtcaataactgcctttaatctaacaattggatgattcccatatctttatttctaccccatatatttctcttcaattcaagattttatccagttacttaatgaggtgttcaagctcaagatgtccaaaatttaaacgtattatatatcatatattgtaaatacatttttatatacatttaatatattatcttttctttcctccattcctatactttttttccacttatattccttgttggtgaatgcctgctaactggttatcttgcattcaaattcacccctttctaattcagcctaaatattattactggaaggattattttaaaatgaaaatctgaacatatcctcaagtaaaaatccttcaatggttctggttctctgttgcctttagaatgaaatctaaattgtataaagcaactgtgaccctttattttcccagagctttgttttcagccatatcagagtattttccgttctttgaatacatcacatttcttctgacttcatgcctttgcatatactgttacagctgcatgattattttcctcctggaattttctgatctggctcttacttgtacttcagttgcatatgtgatggctcctaatttggaggtagatactactttatggtgtttcgaaaggatttcctgtatacttttatcccatcacttgtcatactgtatgtgtttctccttctactgtaataagctccttgaagtcatagagaatgtttcctctctattccccaacaactaggacagtgccagggacaaagttgatttttaatgttttaataaatggttgccaaatgaactatggttgcacagttttgtgtatatctatattcttatttctatctatatctgtctgtaattttggtgaaagtcttcataatcttttgaggctgtttgattcactttgggatattatgctactattttattttgattcactattggtttttttgaggggatattttcaactgagtttttaaaatttttatttctgttttcctgtcatattagtttttttttctttttagaatacttgtaggttgcttaagcctcagcaattctgtgatggtttgggatggtttacaagatccctggttagaactcttctgttaaggttgtaaaagatagtttatttcctcagtagctttcttcaattaagaaaaattcttttgtcttactggattctgattttccctttcttatttcttcttatgttcactgtgtagtttccagagtgcttctccattcctttgttacccttctctctcccaaggcctttctaagaccacctcttagagccccacatactcattcctccttctagtaggctctgatctaccaggactctttttccattatttttgcaatgagagtagaatttctctttatagctgtgattttagatcaattttaaatttcattgctaggttctctcttctgttttcagtatggttctcccccatctcccaccatccctccactctggccccatcttgcccttgttccccaggtaggcttgcaccagaagggtgagaaattccatgctaagagttggtgttaattttttattcacgtgtaatttgaaatctaggttgttctctcttttctagttatgctgacagcataggttttctgtagttttatttattttttatttttatttttggagtatgtgctgggagattcagacttaagcagctgccatcaccttggctatccagaattcgatcataaatgtttaaagggattgaaaaacaatgttttcacttatctcttggtaaaataatttattttctttctttgaaacaaataacttgagatgtttcccaaaattgttgtgacatttctgtttggctacataaattgtctacagcatcaatttaagaaacaaagtgcttaacattaagagaaatagaagatgagatttcgcatcagtttcactcttggatgaattcagattagaacatgggcaatggaaagcaaattagggccttcaaaatttatgaccagtgggaaaatacatgagaataaaattacattaagattggtgctttgtgttaaagatacctgtgatgagttttcttttcaagaggaatgaaatgacctagatacaaaaagacaaatattacatgatctcacttaaatgtggaacccaaagcaactttatctagttacttaatgggcttttcaagctcaacatgtccaaaatttaaatgaatgaatgaatatatgtatatacacacacctaatgtgtgtatatatatatatatataaaatcatgtattataaatatacttaagtatatataaatttaatatatttttatttcctcattttctccatttctaccctttctttccactctatttcctgcctcagtgaatgcctgctaattggttttgttgcattcagtcctaggagcaatagtgagagctaagcagttttaaaacaatttggcacttcatttccatgatattgatttttttccagatacttatctaagcccctgagaaggtgggccaaggtgcttttcttggtctctttccacgcttaaatgtttggttactgtcaaaagagcaaagagcacctgcttctagtgaatacatg

SEQ ID NO: 2860 - DNA, 2466 bp, Homo sapiens
cctagaattgccttgatagagacggatcttttattctgtgttttaatcagctttcaatatattggctgtcttccacaggacactgccctagatcaagacaattcacagaactgagattctggatggcatgctaaggttatctggcccagtggtaagaagctacagtcagcttagcttgctgcattgatatagtcatgtaatgacgtactgggggcataaagaaaaatgcactaaatatgaacttaggggcctaattcccaacgtgtcattggagtcagggacaccatcacttgactggaagcaccatatgtgagccaaggctcatctgactgcagtggtctttctccatgtctagctaatacttgtgaagctgctttaggcatgcctcaaataactgaaaaaaatcacatacttctttccaaaaagggggagggggctcaccgtaaacagtactgtacacaaataatcggagttaatttatgcagacagcttctttaccctaaagctgcggtttgatttggacaagaagttcttcactaatattcacttcctctcacagggcctcatgcagggccttgggccaggcctcaagagaagtccctttctattaatagttcctgccctgccagccttacctatttgactgagtcactttgcttctctgggcttgcagcagcatccagggaggggtgtggtgagagtgcccctgttcccagcccaacagctcctcttttttctcttatgcattggatttttttttcaagaaacatgcttttactttaacaaaaactgaaatccactggtctacgtgatttctaagatttcctatgtgcttagtcacccacagatgaaggaagattggacagcaatgaagttatgaaaatgaaatcgaatgcttgtgactgcagttttcccaaggtttcatagaagtggtctggaggctcttcaaggagaactacaaaccactgctgaaggaaataagagaggacacaaacaaatggaaaaacattccatgctcatggataggaagaatcaatatcgtgaaaatggccttactgcccaaagtaatttatagattcaatgctatcctcatcaagctaccactgactttcttcacagaattggaaaaaaactactttcaacttcatatggaatcaaaacagagcccgcattagccaagacaatcctgggcaagaagaacaaagctggaggcatcacgctacctgacttgaaactttactacaaggctacagtaaccaaaacagcatgctactggtaccagaacagagatatagaccaatggaacagaacggaggcctcagaaatactaccacacatctaccacctctgatctttgacaaacctgacacacacaagcaatggggaaaacattccctgtttaataaattatgttgggaaaactggctagccatatgcagaaaactgaaactggaccccttccttacaccttatacaaaaattaacacaagatggatcaaagacttaaacgtaagacctaggaccataaaaatcctagaagaaaacctgggcaataccatttaggatgtaggcatgggcaaagacttcatgactaaaacatcaaaagcaatggcaacagaagccaaaattgacaaatgggatctaattaaaataaagagcttctgcacagcaaaagaaactatcatcagagtgaacaggcaacctacagaatgggacaaaatttttgcaatctacccatctgacaaagggctaatatccagaatctacaaagaacttaaacaaatttacaagaaaaaaacaaccccataaaaaaatggtcaaagggtatgaactgacacttctcaaaagaagacatttatgcagccaacagacatatgaaaaaatgctcatcatcactggtcattagagaaatgcaaatcaaaaccacaatgggacaccatctcacgccagttagaatagcgatcattaaaaagtcaggaaacaacagatgctggagaggatgtggagaaataggaacacttttacactgttggtgggagtgtaaattagttcaaccattgtggaagacagtgtggctattcttcaaggatctagaactagaaataccatttgacccagcaatcccattactgggcatatacccgaaggattataaatcattctgctataaagacacgtgcacacgtatgtttattgcggcactatacacaatagcaaagacttggaacaacccaaatgtccatcaatgatagtcttgattaagaaaacgtggctcatatacaccatggaatactatgcagccataaaaaaggatgagtttgtgtcctttgcagggacatggatgaagctggaaaccatcattctcagcaaaccatcacaagatcagaaaaccaaacaccgcatattctcactcataagtgggagctgaagaatgagaacacatggacacagggaggggaacatcac

SEQ ID NO: 2861 - DNA, 8409 bp, Homo sapiens
gctggagcgaaagaatgcgggggctgagcgcagaagcggctcgaggctggaagaggatcttgggcgccgccaggttctgtggacaatcacaatgggaatccaaggagggtctgtcctgttcgggctgctgctcgtcctggctgtcttctgccattcaggtcatagcctgcagtgctacaactgtcctaacccaactgctgactgcaaaacagccgtcaattgttcatctgattttgatgcgtgtctcattaccaaagctgggttacaagtgtataacaagtgttggaagtttgagcattgcaatttcaacgacgtcacaacccgcttgagggaaaatgagctaacgtactactgctgcaagaaggacctgtgtaactttaacgaacagcttgaaaatggtgggacatccttatcagagaaaacagttcttctgctggtgactccatttctggcagcagcctggagccttcatccctaagtcaacaccaggagagcttctcccaaactccccgttcctgcgtagtccgctttctcttgctgccacattctaaaggcttgatattttccaaatggatcctgttgggaaagaataaaattagcttgagcaacctggctaagatagaggggctctgggagactttgaagaccagtcctgtttgcagggaagccccacttgaaggaagaagtctaagagtgaagtaggtgtgacttgaactagattgcatgcttcctcctttgctcttgggaagaccagctttgcagtgacagcttgagtgggttctctgcagccctcagattatttttcctctggctccttggatgtagtcagttagcatcattagtacatctttggagggtggggcaggagtatatgagcatcctctctcacatggaacgctttcataaacttcagggatcccgtgttgccatggaggcatgccaaatgttccatatgtgggtgtcagtcagggacaacaagatccttaatgcagagctagaggacttctggcagggaagtggggaagtgttccagatagcagggcatgaaaacttagagaggtacaagtggctgaaaatcgagtttttcctctgtctttaaattttatatgggctttgttatcttccactggaaaagtgtaatagcatacatcaatggtgtgttaaagctatttccttgccttttttttattggaatggtaggatatcttggctttgccacacacagttacagagtgaacactctactacatgtgactggcagtattaagtgtgcttattttaaatgttactggtagaaaggcagttcaggtatgtgtgtatatagtatgaatgcagtggggacaccctttgtggttacagtttgagacttccaaaggtcatccttaataacaacagatctgcaggggtatgttttaccatctgcatccagcctcctgctaactcctagctgactcagcatagattgtataaaatacctttgtaacggctcttagcacactcacagatgtttgaggctttcagaagctcttctaaaaaatgatacacacctttcacaagggcaaactttttccttttccctgtgtattctagtgaatgaatctcaagattcagtagacctaatgacatttgtattttatgatcttggctgtatttaatggcataggctgacttttgcagatggaggaatttcttgattaatgttgaaaaaaaacccttgattatactctgttggacaaaccgagtgcaatgaatgatgcttttctgaaaatgaaatataacaagtgggtgaatgtggttatggccgaaaaggatatgcagtatgcttaatggtagcaactgaaagaagacatcctgagcagtgccagctttcttctgttgatgccgttccctgaacataggaaaatagaaacttgcttatcaaaacttagcattaccttggtgctctgtgttctctgttagctcagtgtctttccttacatcaataggtttttttttttttttttggcctgaggaagtactgaccatgcccacagccaccggctgagcaaagaagctcatttcatgtgagttctaaggaatgagaaacaattttgatgaatttaagcagaaaatgaatttctgggaacttttttgggggcgggggggtggggaattcagccacactccagaaagccaggagtcgacagttttggaagcctctctcaggattgagattctaggatgagattggcttactgctatcttgtgtcatgtacccactttttggccagactacactgggaagaaggtagtcctctaaagcaaaatctgagtgccactaaatggggagatggggctgttaagctgtccaaatcaacaagggtcatataaatggccttaaactttggggttgctttctgcaaaaagttgctgtgactcatgccatagacaaggttgagtgcctggacccaaaggcaatactgtaatgtaaagacatttatagtactaggcaaacagcaccccaggtactccaggccctcctggctggagagggctgtggcaatagaaaattagtgccaactgcagtgagtcagcctaggttaaatagagagtgtaagagtgctggacaggaacctccaccctcatgtcacatttcttcaatgtgacccttctggcccctctcctcctgacagcggaacaatgactgccccgataggtgaggctggaggaagaatcagtcctgtccttggcaagctcttcactatgacagtaaaggctctctgcctgctgccaaggcctgtgactttctaacctggcctcacgctgggtaagcttaaggtagaggtgcaggattagcaagcccacctggctaccaggccgacagctacatcctccaactgaccctgatcaacgaagagggattcatgtgtctgtctcagttggttccaaatgaaaccagggagcaggggagttaggaatcgaacaccagtcatgcctactggctctctgctcgagagccaataccctgtgccctccactcatctggatttacaggaactgtcatagtgttcagtattgggtggtgataagcccattggattgtccccttggggggatgagctaggggtgcaaggaacacctgatgagtagataagtggagctcatggtatttcctgaaagatgctaatctatttgccaaacttggtcttgaatgtactgggggcttcaaggtatgggtatatttttcttgtgtccttgcagttagcccccatgtcttatgtgtgtcctgaaaaaataagagcctgcccaagactttgggcctcttgacagaattaaccacttttatacatctgagttctcttggtaagttctttagcagtgttcaaagtctactagctcgcattagtttctgttgctgccaacagatctgaactaatgctaacagatccccctgagggattcttgatgggctgagcagctggctggagctagtactgactgacattcattgtgatgagggcagctttctggtacaggattctaagctctatgttttatatacattttcatctgtacttgcacctcactttacacaagaggaaactatgcaaagttagctggatcgctcaaggtcacttaggtaagttggcaagtccatgcttcccactcagctcctcaggtcagcaagtctacttctctgcctattttgtatactctctttaatatgtgcctagctttggaaagtctagaatgggtccctggtgcctttttactttgaagaaatcagtttctgcctctttttggaaaagaaaacaaagtgcaattgttttttactggaaagttacccaatagcatgaggtgaacaggacgtagttaggccttcctgtaaacagaaaatcatatcaaaacactatcttcccatctgtttctcaatgcctgctacttcttgtagatatttcatttcaggagagcagcagttaaacccgtggattttgtagttaggaacctgggttcaaaccctcttccactaattggctatgtctctggacaagtttttttttttttttttttttaaaccctttctgaactttcactttctatgtctacctcaaagaattgttgtgaggcttgagataatgcatttgtaaagggtctgccagataggaagatgctagttatggatttacaaggttgttaaggctgtaagagtctaaaacctacagtgaatcacaatgcatttacccccactgacttggacataagtgaaaactagccagaagtctctttttcaaattacttacaggttattcaatataaaatttttgtaatggataatcttatttatctaaactaaagcttcctgtttatacacactcctgttattctgggataagataaatgaccacagtaccttaatttctaggtgggtgcctgtgatggttcattgtaggtaaggacattttctctttttcagcagctgtgtaggtccagagcctctgggagaggaggggggtagcatgcacccagcaggggactgaactgggaaactcaaggttctttttactgtggggtagtgagctgcctttctgtgatcggtttccctagggatgttgctgttcccctccttgctattcgcagctacatacaacgtggccaaccccagtaggctgatcctatatatgatcagtgctggtgctgactctcaatagccccacccaagctggctataggtttacagatacattaattaggcaacctaaaatattgatgctggtgttggtgtgacataatgctatggccagaactgaaacttagagttataattcatgtattagggttctccagagggacagaattagtaggatatatgtatatatgaaagggaggttattagggagaactggctcccacagttagaaggcgaagtcgcacaataggccgtctgcaagctgggttagagagaagccagtagtggctcagcctgagttcaaaaacctcaaaactggggaagctgacagtgcagccagccttcagtctgtggccaaaggcccaagagcccctggcaaccaacccactggtgcaagtcctagattccaaaggctgaagaacctggagtctgatgtccaagagcaggaagagtggaagaaagccagaagactcagcaaacaaggtagacagtgtctaccaccatagtggccataccaaagaggctaccgattccttcctgctacctggatccctgaagttgccctggtctctgcaccttctaaacctagttcttaagagctttccattacatgagctgtctcaaagccctccaataaattctcagtgtaagcttctgttgcttgtggacagaaaattctgacagacctaccctataagtgttactgtcaggataacatgagaacgcacaacagtaagtggtcactaagtgttagctacggttattttgcccaaggtagcatggctagttgatgccggttgatggggcttaaacccagctccctcatcttccaggcctctgtactccctattccactaaactacctctcaggtttatttttttaaattcttactctgcaagtacataggaccacatttacctgggaaaacaagaataaaggctgctctgcattttttagaaacttttttgaaagggagatgggaatgcctgcacccccaagtccagaccaacacaatggttaattgagatgaataataaaggaaagactgttctgggcttcccagaatagcttggtccttaaattgtggcacaaacaacctcctgtcagagccagcctcctgccaggaagaggggtaggagactagaggccgtgtgtgcagccttgccctgaaggctagggtgacaatttggaggctgtccaaacaccctggcctctagagctggcctgtctatttgaaatgccggctctgatgctaatcggcgaccctcaggcaagttacttaaccttacatgcctcagttttctcatctggaaaatgagaaccctaggtttagggttgttagaaaagttaaatgagttaagacaagtgcctgggacacagtagcctcttgtgtgtgtttatcattatgtcctcagcaggtcgtagaagcagcttctcaggtgtgaggctggcgcgattatctggagtgggttgggttttctaggatggaccccctgctgcattttcctcattcatccaccagggcttaatggggaatcaaggaatccatgtgtaactgtataataactgtagccacactccaatgaccacctactagttgtccctggcactgcttatacatatgtccatcaaatcaatcctatgaagtagatactgtcttcattttatagatcagagacaattggggttcagagagctgatgtgattttcccagggtcacagagagtcccagattcaggcacaactcttgtattccaagacacaaccactacatgtccaaaggctgcccagagccaccgggcacggcaaattgtgacatatccctaaagaggctgagcacctggtcaggatctgatggctgacagtgtgtccagatgcagagctggagtgggggaggggaaggggggctccttgggacagagaaggctttctgtgctttctctgaagggagcagtctgaggaccaagggaacccggcaaacagcacctcaggtactccaggccctcctggctggagagggctgtggcaatggaaaattagtgccaactgcaatgagtcagcctcggttaaatagagagtgaagaatgctggacaggaacctccaccctcatgtcacatttcttcagtgtgacccttctggcccctctcctcctgacagcggaacaatgactgccccgataggtgaggctggaggaagaatcagtcctgtccttggcaagctcttcactatgacagtaaaggctctctgcctgctgccaaggcctgtgactttctaacctggcctcacgctgggtaagcttaaggtagaggtgcaggattagcaagcccacctggctaccaggccgacagctacatctttcaactgaccctgatcaacgaagagggacttgtgtctctcagttggttccaaatgaaaccagggagcaggggcgttaggaagctccaacaggatggtacttaatggggcatttgagtggagaggtaggtgacatagtgctttggagcccagggagggaaaggttctgctgaagttgaattcaagactgttctttcatcacaaacttgagtttcctggacatttgtttgcagaaacaaccgtagggttttgccttaacctcgtgggtttattattacctcatagggactttgcctcctgacagcagtttatgggtgttcattgtggcacttgagttttcttgcatacttgttagagaaaccaagtttgtcatcaacttcttatttaaccccctggctataacttcatggattatgttataattaagccatccagagtaaaatctgtttagattatcttggagtaagggggaaaaaatctgtaattttttctcctcaactagatatatacataaaaaatgattgtattgcttcatttaaaaaatataacgcaaaatctcttttccttctaagggcctttaatatgtaataacaagagctaatgttgaacacaagccattgccagtagtggatgaaaaatcagacactgattttctcagacttctttgctgtgggcgcggccagtgaggcaatgagacacattcctgaaggcgctaaaagacgaaaagttacaaggactgaagaccaagcaacctggaaagaagtcggcctctctctcctgaggagctgcctaccagagcttgggcagccacctccttaggtgttagtgcttagataatgtgtcccatttgttgtcatttcaaagatggttattttctgttctgtatttaccgctgttcttgttgctaccagcatgtacttcacatacagtgcccactttgtgtggtaaatctcatggtctctctcctctctatgtgctgctgagggagctctctcatggtgtctagaagctgctgtccagccagcattcaaggtctcccgagaccagggagggaacccccaacactaccacagtcatgcaaaccagaacaacagattatcaggaaggaatcgggagaaaccaagggcaatgtatatattggttctactgctgtgtctctgctcagaaaggttctttgaggactggaatagtggaggtttggtgtgtggtttgttttttttcccaaacatatttactccttggaagtggttggtgttttcattttttttaaaatgttttttggaccacaaactctctgataatcttatcaaagccctggaccttcctagaaattcatatattcaagaaatatttattgagtgcttattttgtgcctaggcacttggg

SEQ ID NO: 2862 - DNA, 1987 bp, Homo sapiens
catatatacacaccataacacacgtatatacatatatacatatacacatatacataccatacacacacgagcatatacacacacatgccatacacacacatatgtacacatacatacccacaccatacacacatacatacacaccacacacacacatatacaccccgtacacatatatacacacaccatatatacacacacatatacgcacacacaccccatacacatgcatacctcatatatacatatacacacctacatatacataccatacacacacatatatacacacatatacccacaccatacacacacatatatacacacaccatatatatacacatccacaccatatatacacacaccatgcacccacatatatacacacaccatatatatgcacatatatatatacacccacaccatatacacacacatacacatatataaacaccatatatatacagacacatatacacacccacagatagacacacatatacacaaacatacacacaattatatcacaaggtctgattgtattactgagacacagtgaaaggatgttccataacaggaaggttatgcctgattcagtgacactactttttcaatattaggccttatatcagtttatttttgctgttttaacaaattactgtagattattggcgtcatacaacacaaatgtattatcttactgtcatagaggtcagaagtctgaagtgggtctcaccgggctaaaaccaggttgttggaggctgtaggagatattctgtgtccttgcttttgctggcttctagacgccgcccacactccttagttcgtgaccccttcttccatcagcaaagcctgaaaagacaagtcctttttccgtcacaccactctgaccctcctcctctaagtttaaggactctggtcattacattgcgcttgcttctataactcaagagaatcttccgtatgttagaggcagccgattagccattttaagtccatctgcagccttaattttcctttgccatacaaggtaacatatttgaaagtactggaattaccatagagacacatttgagaggtgggcaaagtggcaagatcccacctctacaaaaatacaaaagttagccaggcgtggtaatgtgcaactgtggtcccagctactagggacgctgaggtgggaggatcacttgaacccaggagatcgaagctgcagtaagctgggttcacaccactgtactccagtggcgacagagtgagaccctgtcgcaaaatatatgtgcacacatacacacatttgagaggcaggcctatccattcagagtttccttaatgactacagtgtgcctgctcccccataactatgtttgtgtttggcattttcttttaatttgggactatctcagtaaatttcttatattataatgggattaatgcaggcctgctggccaaaaaaaaaaaaaaaaaacaaattagtccctgaggagctcttagagaaaactctctaaattacccgtaattgtgcgatccacaggtcattactgtttctggtcctcgtttttgtaattaatgtttctagtcctcctctttgcccttaagcaggtatgtgttttctttctggagctggaattttgctaattaatcatgtgactactccagagactctttaaatctagttttaaatctaatctgtagcagcaaattatcaagaaagcctttaaaattaaagattctaaggtggaatgattgcttgaggccaggagtttgagaccaacctgagcaacatagtgagacctcatctctccaaaaatttaaaaaattagccaggcatggtggtgtgtgcctatggtcctagctacttaggaagctgaagtgggaggatcccttcagcccaagaggttaaggctgcaatgagccgtgatcccaccactgccctccagcctgggtgaaagagtgagaccatctcaaaaaaaaactagaaggccgggtg

SEQ ID NO: 2863 - DNA, 6095 bp, Homo sapiens
gtgctgtcaacctaaaggttaacaggttgaagggaccctgggctaaggaagcacaagctggagacaccaaaatggtcttcgcaactcgcctctatattttctgccctgctcctaagccagcctgttggccgactggcccttctccacagatgtcatcttgagcctcttacagagtttcagcactgacattaatgacaagatggatcacctacaggacaaccttggatcctcaaccagcctgattaagcattgacactgcatttgtcaccaccagctctgatggtttggacatgtagaaatgtattgcaggagaatatgcaaacagctgctgtaaggtgagctgatcgggacaactgccagcaggcagaagggaaggcataattaatgggcacccttcagcagagctcagagcagaccaaacgccaatgcagaaggctcaagaaagaggcaaacagactagccactgctccaggatgactgtggctctttatgagtgaagagaaagggtggagactgaagacagaactggggacagtgacaggcttggggaagaacagctgattcagcagtcccaagcatctgaacacaaggtggacattctccagggtgacatcgcaaaatacatgggtgaagacaacctagtggccgtgacttggagcacccttcctcacaatgaaggcattctgggccagcctgaaaaacagcatggaaataaatcacctaagtacaagggacctcggtgacaacgctgtgaacatctatggattccgcattcaagtactttgtcacaactgtctccacaagttggtacatcttctgtacaaggcaaagaaaactctaaaaacatacaaaaagtcaatgttaataatgagacattattattaaacatcaacaaagtgccatgttcttcaggctccctaaggaatgctagcactttcagactataaatttttgtatccacataatcattgggaaaaattaactttaatgaaaataatccctaatatttgtgaagtttatggtttttaaaaagaaatttgacacaagttactatcctcaagaaacacatttttatgggctatctacttcagaaatagttatctaaagaaatgagtaaagactacataaaccattcatgaattttcctaatgtaaaaatttgttttaaaaaacttgctctgaactaccccacaaagacaaaaagaaaggtttagtctttaaaacaccacctggctgacacttataatctcagcactttgggaggccgagacaggaggattacttgaggccaggagttcgaggccagcctgggaaacatagggagagcccatctctacaaaaaatttttttaaatgagccaggcatggtgacaggtgcctgtattcccagctactgagacggctgaggcaggaggatcacttgagcccaggagtctgaggctgcagtgagctaggatcacaccactgcactccagcctgggcgacaggataaaaccacctctcttaaaaaactgtaacaactacaaaattataaaattcacctgtaacataaacatattgtgacaagtattagaagtagtcttatacatatgatgctgttatttgtggagagtcaaaaaagcttactcaaagtgccatcctactatgcctttatctcaaagcagcctaaaataaactcacctataacctattacataataatgacaatagcacagcctcccctattgtcaaaccccaccagactggtacatttgttataactgatgtacttacattgacacatcataatcacccaaaggtcatagtttatataaaggttcactcatggtgttgtatattttataggtttggacaaatgtataatgacatatatccaccattatagtatcacacggaggagtttccctgccctgaaaatcttctatgtctctcctattcatctctctctctctccccaacccctggatgccattgatcaccacagtttggacctttccagaatgtcatatagttgggggcttaaattttgtagctttttcagactggcttctttcatttagtaatatgcacttaagtttcctggaggacgtcttttgaatgtcttttcatggcttgacagatcatttcctatataaatataaaaaaaaacaagtcttacttgatttctgacatggacagaaccttttcccagatcgaggacattctccacaagcaccaacatggcaaacttgctcacatgtgtgattaccacatggcagtgtttttccacatacctaaaataaaatgcaataaacactaatgaaggatttaaaagttaacaaaaaaagacttcatacaagacacaatccatttttcaatcacaaataaacaactgctttacgtccctcatattattttactttatattttatacaggtgtcatacatatgtatatatagatacatatatacatatgtatacacacacatatatttcctatgcaccaaaaagtatattttaaaagtacaatacagaaaaaaactacatgcagctccatatggccattcaccaaggagttctaagtggcattaaaaccatgccaattctaggacaagcaacctataaaatcaatcttacttcctcaattggattaattcaagaagcagggaggcgtgctggttgaagagaggggaaagagaagaaggggacaagagctagcaagaaagagtacaaatgtagtgaatccaaaactcaacaaatagctgttactttgaaaaaaatttttcctctaataattaaaaatgatattaaatttaaaagtagtttcttaaaacatgatataattcatctgagttgctattcttccttgccttttatccaactaaacctgattagccttgctgctttctaggttgtctatgctttctgtactctttaatacccacccctcaaaatgcatataaacttacttgatcacagtgccatagtggacttgcacaacttctttcagctacttttttgccacagacacacttttgtctactaactcttggacaaggctgacagcttcctaaaaccagaatgataaattagcacagaaacataaaagcaataaagattgctttgacttttgcttaaagtcagaaaaatctaatgggtatggccttttacctgcatgacaaggattttcacacttatgttgcccacaaagcaacttctgtccacatggcagctgacaagaccattccttggcactgcacctacgagggataggttttgctttcttacagtaacaagtagttgtgaccatctttggacaaggagggcagggacctagaattcagtaaaagcaaaaaaaaaaaaaaaaaaaaaatctaaagtcagaaactaaaactttcaatttctacacctatcaataatttctagaactttctttactgacactttacaaaaggcaataactttcaatattttctcatggcaaactaaactgtgaattcaacttttacaatttttttttttgcctcaatataagaagaaataatcacccacaaacaatttaaaatgcaatatataactcacctggatgacagaggagtaaacatttatggccacaaggaggtttaaattcacgctcacatacttggccacatgaatgaggcacaagccacggatctaaaggtggatcttctacttttccacaatagcaatagtacctactaggtgtttcagatcgtttgtattcaaacctacattttggactacaaagaagaagaaaattattaaagctaacttcacctttaaaagcaacatgagagacagaaatatacttaacagagtatattctgttaaattagttttatgttaaggaactctgctccatctttgtgttagtgaaaaaacaagatcttattaaaatctatttcaaccatataaaacagcactgcacaatacaatgtgctgagatgatggaacagttttatactgggattgtccaatacagtagcaattagccacatactgtgagcacttgaaacgtggctagtgcttacaactgaggaaggaatcaaatttcttataatttctaaatactgaaacagctacatgtggctagttaccatgaattaaacagcacatatctagaatacagctacaaaaagaaagtaacattagttttctactaaccacctgaactttattgaggaattcactctgcttttcacaaagctcaactttttaagttttgttttgtggtttacaaataaacaaaatatattagcaacaacaaacagaagagagaagtcagggtatagacatgcaataccgcaagaaacatgactacaatttagaattaagggggaataaacttgaaaataaagaatttcataattctcaacatctagcacaaaaagacatataattcttttttttttcttttttgagaaaaagtctcactctgtcacccaggctggagtatagtggcgcaatctcggctcactgcaacctctgcctcctaggtacaagaaattctcgtgcctcagtgtcccaagtagctgcgaatacaggtgcacgccaccacgtccagctaattttttgtatttttagtagatccggggttttgccatgttggccaggctggtcttaactcctgacctcaagtgattcaccagccttggcctcccaaagtgctgggattacaggcgtgagccactgtgcccagcccaaaaaaagatataattcgaatgtgcctaagtcaaagaaaagttcaaataccatgaaagactttaaacttccatcattaaaatacataagtgttggcagtagaagtgttaaccttcagctctatcaaaaatatacttgtagatcatcatagatcagttcattctcaaaagatgctctaaccttaactcccaaatgagtatagttagtatattatgctagaacaagtttcatattaacatttaaatttcttttgtatcatatacaaaatattttcattgtcacgagaacatgttctgtttccaaataaatgccacataaatactcaaaataaccaaaagatatttgttcttgtaatgaaaaatcaaaaacaaaatactaagttcatctgtctgtggaataagtaactggcgctttgttggaagagttcaatttttttttattaaaagaaaaagctagtgtggagggggatatgtatttttaataagcgtgggtatggatgactaataggcaactcaacataccttaacactgcccatcagcattgaaactgaactggcccagtgagggtaatatgtgcaaacgcatgagttttattttaaataatgggatgccaacaatgaaatgtaattatgctagatcttcttcattaaaaagcagtatcttagtagaaacctatattttaaattttttatttccataaaataacttaaaattattaacattttaccaagttctagctccatcttgatgaggattaaacaaaatgggttcttaaccagaatggtcatttattttcttaaaaaaatatgaaatatggaatgcaaagtatatggcacagctgattaaactgttgttccttttaaattagaagttaacagtacattttttttaactgatcctttcctcctctgtggcaaaacgactacttaaaacagaagtgagaagagcgagggtaaaaaaatatatacataaggtttaaatctctaaactaaaacctggcttaattccgtacctattagacactaaaattcctccaccaccagtaaataatatgcaggagcaaaacaaatatactttgaaatgttaaacagtttccaaaaagtgtgtattcaatgaaaagaaaaataatatttctaaaagccaggtcataagagataactcaggtggaagaatagaaaaagcactgaatttaaaagtaagaaatcctaggtttcaaattttggctccactacttaagagtgaggagtcagaagtcatttcccttcaattaacttcaatatccccactggtaacaggagaataaaatctctcacagattgctgagaattatttttacatactcttctaaaagtaactagcacatctaaatgtttttaaaaactacaccactggccag

SEQ ID NO: 2864 - DNA, 2819 bp, Homo sapiens
gttgtattctcacagagggtgaggacttttctggtatgaggaagagtcatggttcgggtcggaaaatggcacgaggaaagagtttatgaaatgacttcagaacaaaagtgaagtggtggcaaagtgctggaccagatgttagaagtctccaatttgctctcgacaacaacaatccacaagtaaccctgagaaaagtcatctctgtttccccactggtaaataatggtaagaaaaatagtgcctagtggggcttacgtagaggactgggaagctgaactgtgaaaaatgattccaaggtttctggtcaccatggctactactcttttgtacccagttctttgctcctcaaggagccttgttttctatacttgtgaatatttcaaccaactaataaagatttaatggcaatgtgtaaagttactttttctccctggacatccatttcttcattttgtgaaatcagaacatcagactcagtttgacatgaacagacttttctcaaaagaagacaaacaagtagccaacaaacatgaaaaagtgctcaacatcactaattgtcagagaaatacaaattaaaaccacaacgagataccctgttataccagtaagaagggctattattaagtcaaaaaacaacagatgttggcaaagatgcagagaaaagcaaatgcttatacactgctggtaggaatgtaaattaatacaacctctatgaaaaccagcatggagatttctcaaaaaaacaaaaatagaactactatggaacccagcaatcccactgcagagtatctatctaaaggaaaagaaatctttatgtaaaaaagtcacctgaatgcatgtgtttatcacagcactattcacaatagcatagtcatggaatcaacctaagtattcctcaacagatactttgataaagaaaatgtgatatctacacaccaggggatactacacagccatagaaaatgaaatcaatttgttatttttaagggttttctttttaaggctgtgaagttctttcttcaaatgaacactttcatttgtccttctttgtgtctctacaacttgtcgacattctccaccgatgttaccactcacctctcacttgcattatggaagaagcctctcaatggacacacactacaatataaatgaatctccaaagtatgctaagagaaagaagccagacccaaaagtctacatactatgtgaatccattcatatgatagtctggaaaagacaaaattacaagaagagaaaatagatcagtggttttctgaggttgggtatggagggaaacagttggctacaaaagaccacaagggaaatttttgttgtgatggaagtatcctgtatcttaattgagatggtggttacatgacggtatatacgtgtcccaattaataaaactgtacaactggaattggaaaactctactgcatataaattatatatgaatatgcatgactttaaaaaggtcgttctttaaaggtcaggtctttcaatagatgattagagggtacaaatatatagttagaagaaataaggtctagtgtttgatagatcagcaaggtgagtatagttaacaatataatacatatcaaagtagctagaagggaattattcaaacattcctagcataaaaaaacaggtaaatatttaaggtgatggatatgtcagttaccctgatttgatctttacacattatatgaatgtataaaattatcacatgtactccaaacacatttatatcttttatttatcagtaaaaaaatatatagaaaccaaattgatagaaaacacatacttcccttttctctagagggagacagtatctctatattccaagaatatgcgcgatataaacatcctttgaaagataggagaaagggtagtcttgttagctttacttgcaagatttgtggagatgcaagagacttgggaagatcctttccccaatacaactctccaaacctctagtcttttttcttctttttataagtttccacacacagcattgacaaacctctagtcttaatggttcctaatttgttaagttggcctttgtgtttatgaaagttaagaaagttaattttatctcaatatttctggcaaattgtctgctgcctgtgtgcagaaatgtctttttttccccccgaatgtcctttttcttttgttctgcctagaaaccatggaagtaattatttagacttttttttggctttagggtggaaagaataatttcagtcgagcagtatctgaaaatatccccaaatatgtaaaaatcactgactgcacgtgaaaactgatgtgtggagactatgttgaacctaaatatatagttacctagaaaagaatgggctaaataagaagtgtcttgcacagtactttcatttttacatagaaaatatttgtaaatatgtttattagtgcatacatacattcttaagaatgataaattatctaaagtttggtaatactatcattttgctactttctataatagatgaataaatctataatctacattaacatagttatatagatctaatgccaacattatattactactgatttcctagaaatggagaaaaacaggtacaagatgtgtgttttttttgttgttgttgttctgaatttgttgctaatggctcacacctgaaaacaacaggaattacatcatccttcacattctgattagccttctttgcagtcagacccagttactgatttgaccacagaacctgtgaaaggaaaggctgagccagctcttcttcctccacccaacatgccagcttccttcctccttcctacttgcagac

SEQ ID NO: 2865 - DNA, 7672 bp, Homo sapiens
ggcaaacgtttatctttgctcaggcctgggtgcacgctaacctcggccaaatctctgaatgttcaaacatctgccaaaataccacatttcgacaatgggccttctctatagagatgaggttacgggggcagtactgggatgctggaaaaccacttaaactaaactgcgggaaggggcagggtccaggatcctgactttgagtgtaaggggtggggaaggagcagggggcagctccttgccatacagagaggcctgaggaccagctccctgcttccagagccggagcggggagggggctgctgccaacctatcttggcattctccctttcgtccttggggtagatttcgttgtaattagacaagttgtgacaaatagcccattggtctttgggctggagaattgtgccgagtcctgcctggaaacccagccttgttcacttgggagccataattaggcaagagaacagttcatgagccctttgattcaataaagacccttttatgatgttggtttttcccagaaaaatcataccactttgctccatgtattgcatttagatgtgtaatcatattagagctaagcagcccaggggactgaagttgtgtagctggggtttaaagcctgttacccggtcttcagagaaaaacagtgtcctcagaaaaaaagaaaatgacaaggaacacttctaaagattttctctcttgtcatctaaagaacattttctcccttcagagtgagaagtgacccagggggaaaaaccagaaagtgaaactaacttgacaggccagggcagcccctggtgcctgccctctgcagtcctgtgtcggcccaggccacgcgtgcccagcatggtcgatatttgtcagacggatagcacgtgtccagccaagggccagagaaaatgcccccatcctttccacaaagagttgtggtcagcccactggggtctggggtggcagggctgcagcaggtggcaggggcagtcagccctgactacatatagccctggagcttgcgggcagctttcagctcgttgggaaggtgtgctgggcctgcgacattgaccggacagttcttccaggcatgagagggatgccctgcccaggtcgctgtcacaggcacaccccctcccaccagccaccctcttgccttcttaccccaagaccatgttgtcaggcaggccaaaagcatttcccaatcatggagtcagatgtgtcccagaaatctgccctgtgcccaggagaggtcgaaatcgccagtggaatcaagaacctctttcccaatttggggtttagaaatctctggcaatgaggaaatttctggtagtcatttgtaagagttactctaagatagagggtatgacatttcagaatgctaaaattttgttgcattagaaagggggaaaatccgtttacttcccaaacatctggtgggagttatcaccaaaatatattttcagatatcctctaatgcagaaaaactgtattttataggacgtggtttatctgtttgtagataatgtgattaaaatacttttttggaagaagtgctatttcttctggatactttacactttttggaagaagggctattaagttatatatatgtatacattgcttccccccccgccaaggagtataattagagcatctgaaaccagattatccaattagtacatttttctaattagctgttaggatttcgtgatgagataaattattttagatttccaagtggaactttggccacagggaggctctaaggaagtacacaggggagaaaaataatgggtttttaaagttttgactccacccactcacctgctcccccaaaaacctaatgtgcctgcccatgaggcagcaacagtgaccagaaaacagtttcttttccttgttctgagtaaatggagttggaagaattattcatttatattggcttttctttgttcctggtaatgaagcaggcagacaggggttggctttaaatgctattttttctacattttcatcagtcatattagtagctgttctttggcagaaaaaaaaatctggtgatcaggattaattcagaacctatttactgtgagccttgtatgtgctttctctgtgccaggtggcaatgaagaccgtctgtcagggggatcggggggatgtcctgtcaagacccaggggatgaagtcaggactgcattttgtaactgtggttgatgcaggcccaccatcctttgtccaaaattctggatacgcaagaaaactggatactgaacgttgtttttgccgctaattgaatgggaagacctgacccaaactgacagactattggagtccatatttatcctggggagtgtgaatactcatgggtttccctgcagagatattaatgtttgattatgggtgctgccttgctggggtgttacataatatgtggcataggcaccacattccctttctaaaacttgaaaagttctggaacacatggcctgaaggtttggagtaagagaccctgccctggagtagcgtccacttaagactacagcagccgtgtgctcagagtccctgctctgccagggcccgtttccagccataggaggagcctgaaggcagattgagagtccagctgaccagtgggtgagatgcccaaacagctgtaccgccaccagggcaggtgacttggctgccccatgaccctcagaggccttccctcaccaggtgccaagcaaagattgttcagaagcagattctgttctgctgtcattgtgaatacatcaatgaatgagtacatctatgttctaataaaactttatgagggccaggtgcggtggctcacacctgtaattccagcactttgggaggccgagatgggcagatcactgaaggtccagagtttgagaccagcctggccaacatggtgaaaccctgtctttattaaaaatacaaaaagtagctggacatgatggcgggtgcctgtaatctcagctatttgggaggctgaggcaggagaatcacttgaacccaggaggtggaggttgcagtgagctgagtttgtgccgccgcactccagcctgggtgacagagtgagactctgtctcaaaaaaaaaaaaaaaacccaaaaaacaaaactttatgaaaacagatggtgggctgggatggccctttggccagagtttgctgatgccttgtcaaaacgataaatgcatccttaaacatactgttttcttccacagactttagccctgccatctgcctgcctggtctgcttgtcttgttccccacccctggccaagtggagttgccttaaagagataaaagttgtgcctctagtgtcagtacccaccccttgcttggctcctccagatggtctggaaacatagatggaaagcaggcgctgccctcaccgacctggcctcggtagcaggagtgtgtttttgtgtggacaactgcagttgggcccaggtccagccttgctgacggctactcacttgggcctccacccactgatgaattttgggggcagagccaagccccaagatatgttggctggcagcctggggccaggcagggctgctgttgtgggagcccagtcccaggtgggtttgtgaggtgtacggggagtgaggggttgagaatgagtgttttcagagctgatgtgttcttagcaaaagaatttctggcagattgattatcgtaaacccagcggctctgatggatgagtttcaggtctcctggctttgtccagcaagggcctgcgaggccaagacctcttttcactgcatcagaagtttaaatccagttgagccctctgacttgcacctctgtagtggtctggcctggggaagactggctggggtggacagaaggagggcgggaccctcagagcaatcacccctgacctccaaccctggccaagaagggccagcccctgcctcagcaccttctctctgtaggcggtttctctcccaagacatttgagacttttgccctctgcctggtcaccttctttcctagccaggatagggctggtggatggttttttccttaaagccaattccaaacaagggctgatatttagttggcctttctttttcttctctcatggttttgtgggttgctggcactttagggactctgttcagagtggagcctccttactctacagctcgctggtaagccctggtggcccatcagcccacagaagggggcatgatgcacctcagtcgtcagcgtgtgcccagcccagggccatgcagagtgagcactcagggaaggcgcatggaactggactgggtggctggtgtgtttggtgataggttaaaagtgtcacatacccagcacggtgtgaggagctcctccagccactctcaggggcctgaccctgcctccttgattttggaggagcctattaacaatgcagattccagggccgtttgtgtgattgtgaggcaggtggccccaggattgtgctctggttgggtggaccaataggtaaagcacagtgtgatgagctttgggatgggggagaaggaaggggctgtaacccagggagagtctggggtcaaggaaggtcacccagaagaggtgagctgagtcttgaagaacaaagcaggaatggtaataatagctaatcttgattgaacgctttgtgccaggcacagttctaagccttttccatgaatttcagtcctccagacaacccctgaaataggtagtaaccccagactcacacaggaacagacaaaagcactcggggttaagttgctggcccgaggctagtgagtggtgagctaggtcttgcctgcttattgcacggcaccacgtggggtaaggtgtgccaggcagcgggagcagctcagcacagtgatgcaggtgtgctgttcagtggttcagatgatgcagaacctagtgtggggggactgcttcagttctgctttacaggtgccagaatgtcagtttgagagggctgaggctggagctgggcacacttcctcacagtctgaactggaaggagcgtggagtgttggggagaagatgcagtgtcagtgcccagggtgcagcgaggcacgggctggcaccctgacccagcccccttcccagaggggaagaattccccctgcccttggggtctgaggggatccacttttgttaggagcctgctacacactttgctttctttcgatccttacattgcccttccaggtgggcttattattcctattacagataagagagctgaggctgggaagccgagtaatttacaggacagattccagctgtgccggggccttgggcaaagtggcctggagacacgtttcctgttgctgggtgacattccacaggtgggaggccaggacctcattccctaggggccttcctggtctgggccctgatgccctgagttgaccctctactgccctggaggctcacctgggcctcgggacagaagggattgtcccattaaggagaatcctctacgagtctctgattctggaagctcttgttttttatcctcccatacaaaaaacaaattggccaccagtccttctttttggccactgtctcaccatctccttcacccaaccttggtttctttcagcctgtgcttcccagcagagcctgtgggcttgttgatttgaacccagaaaccacctaggacattccagaggtctgtctttgttgcccattgtagtagaagggtattgggaggacctgcctgaagctgttgctcttttgctaagggcagggtgggatatggccgagaattggtgggcgggcctgagatccattcagcagcaccccagggcgtgctgtttctcacaggttgcagcctcttccagcccctttgctttctgtgacagagctgaaagtctcatttcctctttggctttctcctgtctgtgtgccgttctttaagatgggctggagagagtcggggcagctcttctcccgggttttcaggcctggctggtgtttttgcctgaatcaggcctggcctcaggcctggttacaagaaggttggaggctggctgtcttgtgttcatgtgtcacgccaggcctgagaccatcattgtctctctgagatggtccacgcccctcctgtgaacacaggggctacagactatagtatagttcttgccacgttcccgagttttgggggctgctctccacattgggattccaccaggatgctggtctgcagtttcctgcaggcagaaggcgctgggttctgagttggctttaggtggaacccaggtcattcctgggtatgccttgggagggcggcgaggctggccgcagctgggcccggcatcggagaaaattgtgtctctctggagaccctgcagccttcccacccaccagggagctttccatgggctgtggggaaggcgtcagtgtcgggtgagggaacaccagcttcacctcggctcatctgggcgtggcagacgactgcttcctcacctggagagtgttcaaggacagcaagaaaaatgagggactttcaggggcagctgtgttttctgactcagtcataatgcccctaaaaatccttattgttcttgcagtgtgcatcgggcagcggccagcaacctgcctctcacccacctggcccttctgggaggaccgggacttcctggggtcagattggaatgtacgtccaaaataagagtgaatggggatttgctgattattaaaacaattttgtttgcgtgcatttttagcatcttctcttctgggagggtcgggatggagcccaggagggtggcagtgaaggggaaggtcatcttccgggtcagtgatgttagaggcaaggacaaggagtagaggaggctgtctgagacccagtagccattttgagagggtctttccccctctactgtgaccctggagcttgcttttcctccatccttatttcacttcatggatctcctccattctcagcccctacccctgccctatccagccccaccctgcagatattttgaccagccaaggcttttggaggtcctgggggattgtcgagaagcagaaatacctttttttaaatttaaatcaatttgtgatatgcctgccttccccaacaatgccagtccaccaaacccgaagcaacagaatcctgctctccaggggagactgggggcttgcagttggacaaagtgacaagcaggactcgccccagtgggtccactctatgtcttactgccctcatgggtcagcaggggaagtttacccttgggtctctaggtgcagctcaaaagctctcgtcacttgaccacgtgtgctcagcatttgcagaagtccaactgccacgatcttccctgcagcccagccctggctctgtggacagttttgaaggagctgggtttgctcaggagccttggcttttttctgcacagggcaaggacagctccaaggtaaagtttaaacatgatggcatttatcctttcttggtaagggataggtggggctcccatgaaatgctattctcgcaacctccaacggacaggggtgttgcaaaggttccttcatccccgatcagcttccctgccatttgctcccctcaaccatcccctcccatggggcccctttctcctgcccttcattcccctgaacctccttgttcttacatgtgttcctcattcttttttttttccttcttgacatagaatcttaactctgcc

SEQ ID NO: 2866 - DNA, 2444 bp, Homo sapiens
cctccgcctcctgggttcaagtgattctcctgcctcagcctcccaagtagctgggattacaggggcccaccaccacatctggctaatttttgtatttgtagtagagacaggatttcaccatgttggccacgctggtctcaaactcctgacctcaagtgatctccctgcctcagcctcccaaagtgctggtattacaggagtgagccatcgcgcttgacccacttaagctttttaaccaatctggtccaccgattgacttgtgcacgtccttaccagtcctgagtaggacatcaaactgcaaccttggtgtcttgggcaagaagcaccaactgaatgatctagcctaaccagtcatacccaaaagtaatctgtgtgggagaagagagcagctgcttttaagccaataaaattcaaggcaggtaagacgactgggtagttatgacactgctgtctccttctcctggtaaaaatgcttacccgctgtggctgctccctcagtgcttctacctggtgcctgacctttcagtcttcctaataaatctgcctgagcttcggtgcctcctcaggtgtcacgaggggagtttgtctggagaccctttgggagctgatgtcaaatgctcaacaaatgttctgttaagttagtgctgcagtagtctggaaaaggagaagattaaaggaataaaatatgcccccaacagttttggagaacactagccagtggggactctgctctgtcatctaaggtgaccatatggttggctgataaatgataacaattttctgtaacacgtgggcttttcatcttcccaacagtctggaggaaaaatattagatatgatgacaggagcagtttttaccatgtcgttaagggccccaaatgtagtttttagattccatagacactaaatccagcaatgccacaagaatgcctgtgcaaacaggatctgtgttgatgcaggctttaaaattttttttttatttctgatatatacaaagaaaactcacttcatctagcttaaacaaataaggttattttgttaggaggatacaaagtatctagcagaatccaagagagcaggtgttgctgggtctctcaagggacctgccaccaggttcccacagggcatcggccaccaaggaagaagctccctctcccatctttcgcttcctgcatttatttgctttattcttccctccatacagcctgcctttctctgcctctcctgggcttcacatgctcagttccagacctgagcaatgattgacttgctcttggtccctgttataaattccaagggaaaataatagaactggcctggggaggtatgtagggtggcctagagcatcatggcttcagagagggacgtaattctgggtgggagttaataatctcagaggagattgtggatgatacagacaccaatagcctctgggacctctctgatctatgacagaggtcgatttctgtcagggcacaattgctttgcattacaggctaggaatctgcaagtcagtgtttctgcttttttggaggtttacttcatatcttcactgggtactattgaagaggtgaacactgggtataaatactgttcttattactgtgttacagcacgcacctgagaagttctaagaggcgattctatccaggtttaaataaggagctttgcagaggtagtatatctcatgatcatgtatttgagatatctggcagaaaaaatgggtgtgttcttgactgtccctagtccttgagtttggaggcacttctcttctatccttccaaggctctctgctattcacccatgccctcttgtcaactttagtgtccacaagtacctgatagggacctcaccctgcctaaagcaggatttttggattcttgccttggtttctgcccagtgctgttccccatacttgagattcttttaacttccttccgtgtctctaactcatacatatcatttaaggtcaagttctgtaccttttgtcatggttcactgggcttccttactttagaactcattcagtagtgattcactgaacagttacttatacagcagagtgctggctggttatgttagttcgctagggctgttataacaaaataccacagactgggtggcttagaaaacaaaaattgaggccaggtgtggtggctcacacctgtaatcccagcattttgggaggccacggcagaaggatcacttgaggtcaggagtttgagaccagcctggctaacacgttgaaactctgtctctaacaaaaatataaaaaattagctgggtgtggtggtgtgcacctgtagtcccagctactctggaggctgaggcaggagaatcgcttgaacctgggaggcggaggttgcagtgagccgagattgtgccactgcactccagcctgggcaacagagtgagattccgtctcaaacgcctccacaccaaaac

SEQ ID NO: 2867 - DNA, 9870 bp, Homo sapiens
acaaaatggagtctcttatgtctacttctttctacacagacatggtaacaatctgatctctcttttccccacggcataaggacttaatttctctatacattggtaatctctccttttttttgccatttttctctgtctggatcatctctaaacatcatttcttctcctccttatgccacttggggtatcatcaaaaactggcatagctagatattataatatctggataaattcaatatttttaacatagaggtgattatgatttcgtcttttatgtttttagttttaacaggttttgaaactaataacaaatatgaaattaagaacagctttggacagagggtttactttgcagcggaagatactgattgctgtacccgaaattgctgtgggccatctagaccttttaccttgaggattattgataatatgggtcaagaagtcataactctggagagaccactaagatgtagcagctgttgttgtccctgctgccttcaggaggtctgtgatcaattaccagggcactttgtaaaatagttcagcaagaatttctgccctgtcattgaacctttcatcgaacctaggcattatgattattacatttacatatattattttgcctttgtagatagaaatccaagctcctcctggtgtaccaataggttatgttattcagacttggcacccatgtctaccaaagtttacaattcaaaatgagaaaagagaggatgtactaaaaataagtggtccatgtgttgtgtgcagctgttgtggagatgttgattttgagattaaatctcttgatgaacagtgtgtggttggcaaaatttccaagcactggactggaattttgagagaggcatttacagacgctgataactttggaatccagttccctttagaccttgatgttaaaatgaaagctgtaatgattggtgcctgtttcctcattgacttcatgttttttgaaagcactggcagccaggaacaaaaatcaggagtgtggtagtggattagtgaaagtctcctcaggaaatctgaagtctgtatattgattgagactatctaaactcatacctgtatgaattaagctgtaaggcctgtagctctggttgtatacttttgcttttcaaattatagtttatcttctgtataactgatttataaaggtttttgtacattttttaatactcattgtcaatttgagaaaaaggacatatgagtttttgcatttattaatgaaacttcctttgaaaaactgctttgaattatgatctctgattcattgtccattttactaccaaatattaactaaggccttattaatttttatataaattatatcttgtcctattaaatctagttacaatttatttcatgcataagagctaatgttattttgcaaatgccatatattcaaaaaagctcaaagataattttctttactattatgttcaaataatattcaatatgcatattatctttaaaaagttaaatgtttttttaatcttcaagaaatcatgctacacttaacttctcctagaagctaatctataccataatattttcatattcacaagatattaaattaccaattttcaaattattgttagtaaagaacaaaatgattctctcccaaagaaagacacattttaaatactccttcactctaaaactctggtattataacttttgaaagttaatatttctacatgaaatgtttagctcttacactctatccttcctagaaaatggtaattgagattactcagatattaattaaatacaatatcatatatatattcacagagtataaacctaaataatgatctattagattcaaatatttgaaataaaaacttgatttttttgtatatttgatttttgtttttaaacgaaatgtgttcagatggtattttgagcactcattcagttaaatgatggtacatttgaagcaggatatttccctgaccccttcacaggactcgagacaggggtgccttgtttactcagcctgccattctcaactcctcctgggagggagtgcacaggcaaacaaggcaggaactggagtgtacaagcactggaactggctggccgctttggcatgggcaggaacaaactgtgcaggccctgtggtagcatccaggtggggttgcctgcgattcctgaagccccagaagatgtgttaacagtgctcttttagctctgctgtctgtggacggcttaagtgttaacagctcagtgggccctttgccttgtcatgtgggacagctgccctccaccagcaagggcaaatggcgaatgtgagagccttttatatcggcactcatggctcccaggctcttgtccggtgtccaggaaaaatgtggtcacaaaaacaaactgaaggatggtaaatgagggggattttattgctgatgaaagtggctctcagtgagaaagggagctgaaaaggggacagtggggtaggtgatcttcccctgaagtctggccctgtccagctggattcttctctgaagttacactgtcaagctgtccctctgaagtcaagctgcttctctccaatgtccagccatagtctccactcctctctgactgagtcttgggtctttataggcacaggattgcaggcagggcgggccatgggcagtttaggaaaaggcaacattcaagtaggaaaacagggatataaattctcactttgggccggggtttcaggcatttcagcttgagggtagggttttcactggggactcacccttttctacctagaatttctctgcctcctgtctccatcatatttaactgacttttcctttcaaatctcctttaaaaatgagcaaaggtacatgacactttgtagtaaaatctgtaccagtgttggaaactaggatttccacctgtcagaagcttataagaatttagttaatctcttttgtaatgaagattgagttgaaagatgacatgaacaacccacaatattcttcatgcaatggaaaagtatgcttaagcaataagggcatgtggaagagtccctctttcatattcagcacaattcttgtaacagcagctctcctcatggtgttagtgccctagacctcaatagctccaaatggcaagcggtgagaacattagtatgcaggagatcttcaggaaaagtcaagtctagatgatctcccacaagtctaaacaattcaccagatgccaagttccagtgatgaggtgtacccatggaactcagagcatgtgcttggtacagatggcatgccaagaaaagtggaggtacttgcatagctgaatcccaatggcattgttatgccagttacagaagagggtgggcataggatttccaaactggccataatgtgccaaaactaacccaaaataaggcttagagtactgacattatctctgtgacagctaaattttactttcattatttctctctctctcaacaggattctggatctttggttaagcaaaatgaaactaaactgatctaaacatttctttcttcaactctgcaaagaagatctgagcaaaaccccacatatcttctgcagaacctatttaaatactagacaaatatcttctcattacataattacatacagaaaataatcacacatgaaaaattcgatatttaattaagaaaataccaggaattgtttttcaaagtttaatttgtaatctcaatgagatttgaggaaatgttgcatatttttttatttctaccatgtgagttataacagtgaatggaaagtcactgcgtgtccctgactagggaaaatattcaggaggaaaagctgcaatggatggggcatggaggtatatttttgatcttgggaaggaagttctaggtaggtggtcagtgaggaagggggagaaggagggaggaagaaggaggggagggaggggaggaagacaagattaagggatgtcagtacctctcctatgtacctcttgggggagggttgaggagtgaggggagtgtaagtgaaagtagagacaaggctgggagaggaaaaaacaaaaagcaccagccacaggcaattaaattgccagaaagtcagtgtctgggctcccggcatcaagttagctagctactctatggataagtactgaagctttaattgcatttgggctcaaaaacaacaactgtaactttagggtaactagaaaagcctctgtagagaatcgctgccatcagttaagaatggaatgatttaaaatgtctctgggcacaatgaagtgctcctagagcttaaagtgccagaaaagtgtacagggtttccctccatgtcctgcctctctcctttactgtctctagcccagcatacaccgcctgagtttctagggccatgttcctgcacctggtactgtctccttcaagctgtgtgttcctccttgtgccttaatttcccttagttgtcaatagtatcgttgtcaattgattatgttatctacctcataaggtcagtatgaagattcagtgttctaatgcaggttcagagacctgagcaggttcctgcaatagaaccagtgtaaaaaatgaaaagggctatgtgttggtaaagatcaatggttttcagaacacagagaagtgtctcaaagccagtgaagaatatttggcctaaagtaaatttctgtattgtgatttgaatagcaagcaaaatccatttaaaccctagcaagaatactatctcctcaaaaaaaaaaaaaaaaaaagtccatgcaagatgccaagctagggaatgatgctcatctcacagaagtgtagattaagggaaattaaggcacagggaggaacagagtctctggcttctgtgttagagccttttttaatcttagctttatagtgtcaaaatgtggcaagctattttaagagaggaacaatagctgggcgcagtaactcatgcctgtaatcccagcactttgggaggccaagacaggtggatcacctgaggtcaggagttcaagaccagcctggccaaaatggtgaaaccctgtttctattaaaaatacaaaaattagctgggcatggtggcaggcatctgtaatcccagctactgggaaggatgaggcaggagaattgattgaacctgggaggcggaggttgcaatgagccgagattgcaccattgcactccagcctgggtgacaagagtgaaactgcttctcaagaaaaagaaaagagagagagagaggaacaataatctgggcccctgaaaccagatgaaacaactgacaatacagagtctgaactcatgatttacaaactgagagggccatggaatgataaggaacaagtacaactggtcacagagctctgcacttaacaaccctccacacacatacacacaccaagcattcaagttaaacgttaacctactgttaatgtttatatggtagaaaacatcagatttatgccaaaatgcagattataaatctacccacattgaattctgaatagatttggaaaattgatctgcttgcctactaagtacaatttgtttctgcctgtggattctgggggttttccatcattaacacattgaggttattctgtctggcagtgatagggaacaaacattggcctatttatttcagcaaaggagttagttgctaggaaacatttcaactttagtcaggtattgccaatagactgcaaccacctgaaaatatcttagagaaattctcggttatattgactttacagagttaattagatcttagtctaccacccggtccactcgggcttctataccaaaacaccttagacagggacagtgtaattataaaggactaaaatttgttaattatagttcacgaagctgagaagtccaagatcaagtcaccaacagattctggtgtctagtgagggctgctctctgtttctaagatggcaccctgttgctgcattctcacatggcggaaggcagaaggtcaacagggacccaaccgagcccttttaaaaggtcaccaatccaattcatgagaatggtgccttcatgacttaatcacatcctaaaggccccatatctgaatactgtcaaaatgggtcttagtttccaacaaatgaatttgggggcacacatacctttaaaccatggctcctactaagcacatttctgttaaatcatactgcctgaattctttccccgttattgcaagtcacaagcagaagataatttactcgcaaaattattttttttgcaaatctatttcagtttttatgaataaagacagattcactcaaataattcacataaatgtatttgtaaacgttatacctgaggaggaaatgaatataaaaaaaaaaagttgattgatttaagggcactgaaactgctcatcaattatttaacaagtacatacggagcttctacactgggccagtagttacgctaggtacgatggtctcaataagcaacaaaaattattttctacaagatgcttaaggtcaattatacatatggaatgtttgattataggatccagagtactatggagaggggtagtagggacactgaactcagttttaatggtcaggaaattaggggaagtaacttttaaactaagaaagtttgctggacaaaaggcaagtgagattatttcaggcaaaggaaagaacataaacagaagtcacctcaggggtctgaaatgtggctaggccactggttttgtgttccttcgtgagtgaaagacatgcagggggtaggacatctaaagagtggttagatcatacagtgccttagccacattaagaagttcaggttggggccagacatggtggttgacaccagtaatcccaccactttgagaggctgaggtgggaggaggtaggaaagatcaagtgtcctttcctacacatagttctctctcagtctctaggaatcaggtggtggacttctctaaagctgcacttttttttttttttttcccaagcagcatggcttgcctgattgttctctaggaactagtctagccttttcagatgagaaagttactttgtctacacagaagttttctcatggtgatttggtatctccctcatcaccaaaacctggatacatggtagatggcctaaaattgttgaattatctatctttcaaatttacagtgtgaatcgatttacgtttcaggtcctgaaagctatcaaaataaccaaagtccatttatctgaggagatggtattaataattagttgtgtaagtaaaaaagtcaataaaagatgaagcatatctgtaaaaaagatgaatatatttaaaataaattaagggtgaattttattattttgttattattatcatatcatttatttatttatcaatcttttaagtaggggcaagggccaagtgtgggtctactattctgcactgtctttcttctataaaaatacacagtttatttttgtttcaatagagccagaattctaagacactttcaaaggtatcttagtgtagaccagtcaatttttaccatgatttttcagtcattcatatttggctcaccctttactaactcagtagcaatcaactttactgagtagacttaataagcattttaaaggaattcagattaacttacatagaaacaatcttttatattaatatttaatcaaagcaagtaaaaatatttactttctgtaactacaataatcttttgtataaactgatttacaaataaatacaaatcacttttagttggtgtagaacttttgagagagtagacgtaccctagaactagagagtcaatagggaccctcttaatgtaatagtcaagtgtattcagcataatttgagctaataattaggttttacagagagaataggaaatgtcaacccaaggagttgggtaaattaagatcagttaagagagtatctatattgactttctttaataattattttctgacaaggaaaacaatagtcaccatcaatccagtaggtaaaataatatgacacttttttatacgattcatggctccctcaagaacttatctgctgcaaaaagtaaaggagaaagcaggaaagaagaaaggaagggattaaatgaaaaggaaagaagaaagaaaaggggtttttgtttgtttgtttcattagaagtcaactaaaaaatatagaagaaatgacgaaggtaggaaatgaccatttgacagtcatcatcacaataattttattccagcaaggaaacatcggtggctgctaaaattactgatgaacatttaaggaaaagcaatatgcagtacttacattgtctcaaagtagcttcttataagatacttattaatttcaaaaaataaaatagtgagtaactttacatttactgcatgatacaattcagctgagctgcctgccatgatatgaaaaagatctccattcctccagtttccaataacaagtttttttccactcatctgaaccttcacctgaagtgcatttaattctgtatttctaccatcggtctcttcatgttgatgtaaatcttctctaagatgatcaacattttcttagagaaaatacataccatgctcctcacttccttttgtatacttatcagtcattaacatccatatctcttcagtcttgtcttagttggcacaggctgttacaacaaaatatcataagctgtcttaaacaggagacgtttaattctcatagttctggagcctgggaagttcaaaatcaaagtaccagcagatctggtttctggtgagggacctccttctgtcttggagagagccaccttcttattgtgttctcacatggcagagagtccaagccctggtctctcttcctcctcttataaggacactcatcccattatgagacccccacctttataaacctaattgacttccagaggccttgactccaaataccaccacattaggggtgagagtttcaacatatgaatttggcaggagaggtacacaaacatttagttcataacattccacccctggccccccatcattcatgtctttcttgcatgtaaaatgtattaattctatcccaatagtagcaaaatccataactcattctctcatcaactctggacttctaagtctcatttaagaaacatctaaatcagatatgaatgagactcaaggtacaattcatcctgaggcaaaatttctttccagctgtgagcctgtgaaaccagataagttacgtacttccaaatttcaatagtgggacaggcatagaatagactttcccattacaaaatggagaagttgggaggaagagaggagtaacatgtccaaatcaagttcaaaacctagcaaacaaatgccattagatcttgaggctcaagaataattctttttagtttgatgctctgtctttgagacccatgtcctgcaaggcttttttgggtgggggttgtgccctcaaagctctgcaatgtgagagtcacatccacccccaaggctcagctgagtgaattctcattctccaggctccaggctgccactgtctagcctgttgaaaccaaggcaatggctctctcccccattgaaaaccaaggagacagacctgatgacctctgaattgccctcaggattactgcttttcttatcttcaagagtagtacacatctgcagctaaatagcttgatgttctggtactgtgggctgtaagaagtcctgtagcttctttctattgaaactgtttccattgtctttagctctgtcaatctgaaataatcaaaagaatcagaattcagtcttgaagaatttattctagcaaaaagtttggaatgatcattagagaaacattggctccagaaaatgaagtaagttccagtggagtcacagattagaaaatgagtcaatgaatatacttgatgcaaatctcat

SEQ ID NO: 2868 - DNA, 1189 bp, Homo sapiens
agcatggccaggggcggggcttccctgaggcgcgccgagaggcggtggcccacttccggcaataatcgcctggtcgccgtcaggtgccggcccaggtggcaggcgcgcccgttgggcactgggggacgcgggcgcgtcaggtgaagactgggggctgcaggcgcgctagtatcttaaatagcgaagatggagaaatactcaataatgaagagcatgaatatgcatccaaaaaaagaaaaaggaccattttagaaatgacacaaatactcaaagtttttatcatgaaaaatggatctatgtccataaagaaagcacaaaagaaaggcatggctattgcaccttgggagaaacctttaatcggttagacttctcaagtgcaattcaagatacccgaaggttcaattatgtggtcaaactgcaggacaaattcgagcatcttaaaatgattcaacaggaggagataaggaagctcgaggaagagaaaaaacaactggaaggagaaatcatagatttttataaaatgaaagctgcctctgaagcactgcagactcagctgagcactgatacaaagaaagacaaacatctaacaatttggacaagacagcaaatgctattgtcgaagttttctaaagaagaatctgaagtgaaatgacatcaagagacctatcaagacctgtatccaggaaaagaccaaaccaatgcagaccaaaccaatgcagaactcctatgtgctgatggtggtcttacatttccctaagtttctgccgactaaactgtgcacacgttctcgggacctcctgaagctgcgtcacaggcactaatcaaagaacacaaccaagagtttggccttttcttcagcactgggaattgtgatccaaagcttttcctgatgaggcacaaagttggagaaacaaaacgcaaactaaacaacaatgaaacagaacagagtgaatctgctgtagctcaagagaggacgtagctgcccccactccgcatccccaggctcgggtttgccttgctgacctctgctgccacctggtgccgcacagagaaactgaggagaaaccacatcagtctccttcagcctcagcttcacatctgtgggtcaagcaaccctttcagaagctgtataatgtgggaaagctttcctctcaggaaaatgcacacatccaactttgagaagatgccc

SEQ ID NO: 2869 - DNA, 579 bp, Homo sapiens
cagttaccatggagaccggtagtaacaccagttgtaaacccaaggccaagagaccatggccacgttagcccggctgcaagctaggtcgtcgactgtaggaaatcagtactactttaggaacagattttattgcatcatatagtaatcttatcatggtgccttccgttcattatcagtgttgtagatccatttagaaaaaaggagaatgatgcagcagttaaaatccaaagctggtttcgaggatgtcaagttcgggcatatatcaggcatttaaacaggattgtaacaattattcaaaaatggtggagaagtttcttaggcagaaagcaatatcaactaactgtgcagacagagtctcgctctgtcgtcccagggtgcaagggtgcgagctcagctcactgcaacctctgcctcccgggttcaagcgattctcctgcctcagcctcccgagtagctgggactacaggcacgtgccaccacgcccggctaatttttgtatttttagtagagatggggttttgccgtgttagccagatggtctcaatctcctgaccttgtgatatgcccgccttggcctcc

SEQ ID NO: 2870 - DNA, 4943 bp, Homo sapiens
ccgggattggtgggaggatcgtgggggagcggcagctcaggacggaatacggcaatgaccgccccggtcgcgagggtgaccctgccccgggctgctgtgggggcgcaagaaccctttcactttacggcgagattaagctcagggtcaagttctgagcaaaaagtgtcaaggagcctttttgcaacctcctataatattgaaacagattctgtgccctttaaaggagataataactaacatctggggagcgctttacaatttagaaaaggcctttcacacacaggcctgtttcatcttcacaacaatcttataaaacagatatattgttcccatttcccaaataatgaaacggaagcgccgaaaatatctcctatagggctcttcaaactgtggtcaacttagtaaatgatgttgacagtggaagtgtgatcattttattttcctgcctttggaattgaagattgtaattttgcaaaaattttgttgaagatgatgtagctttggttcagagagctggagtacaatggcaccatctcagctcgccgcaacctccacctcctgggttcaagcgattctcctgcctcagcctcccgagtagctgggattacaggttccaagtctcttcttcggcctctcaaacatggtaccatccctaatgaagtcaacgggtccagcatgacaggatggaagtacaagtgtcagcacctatgtgagtcccaagaggggaaattagaaacaaaaaggaagaagaggacataggccaggcacggcggctcacgcctgtaatcccaacactttgggaggccaaggtgggcagatcacctgaggtcaggagttcaagaccagcctggtcaacatggcaaaagcccatctctactaaaaaatacaaaaaattagccaggcgtggtggtgggagcctgtaatcccacctactcgggaggctgaggcaggagaattgcttcaatctgggaggcagaggttgcagtgagctgagatcgtgccattgcactccagcctgggcgacagagtaagactctgtctcagaaaaaaaaaaaaaaaaaggaaaaaaaaagatgatatagtcaaagaaataacattaaatttcttataatttaagatgaatgatttcagattgaaaagtttataaaggtgccaaagagaaaaggaaagatccacactagatacattagaatgaaatgtcaaagtaacatacataaagaagaaattctgaaatcttctagaaagaaagaacatgttatctatgaaggaacaaggatcatattgatattagatttctcaacagcacatgtgctgcaagaagacaaaggagtaatattaagtattgtgaaacaaacctagagcttagaatttcatatttaaaattctaaataaattatcattcaaattgttatagtttgggggccaggtgtggtggctcatgcctataatcccagcactttgggagactaaggcgggcagatcacttgagctcaggagtttgagacgagcctggcaaacacggcaaaaccccatctcaaaatacaaaaattagctagatgtggtggtgcatgcccataatcctagctacttgggaggctgaggcacgagaattgcttgaacttgggaggcggaggttgcagtgagccaagatcgtgccattgcactccagcctgggcgacagagtgagactcggtctcatatatatatgagactgacaaattgatacagtttggatatatgtccctgccccagtctcatgttgaactgtaatctgcaatgttggaggtggggcctggtgggaggtggttggatcatgggggcagatttccatgaatggtttaacaccatcttcctggtttgtcctcatgacagtgagtgagttcttgagagaactcatcatttaaaaatgtgtggcacttcctctctttctctcttgctcctgctctgggtatgtgacgtgcctgctccccctttgcctactgccataattcagagtttcctgaggcctcccaagaagataagccgatgccagcaccatgcttcctgtaagctggcagaaccatgagtaaattaaacctcttttttaaataagttacccaatctcaggtattttttatagcaatgtgagaatgtgctagcacacaaatatgttaccacttaaattatcattcaaatataaaagcatagtaaagctgacattaagcctcaagcatacaagttcacagaaaatttgtcacacaaggacccacattataagagaagcagaaattcatactgctttaagagatatcagaggctgggtgtggtggcccatgcctataatgccagcactttgggaagccaaggcaggaggatcgtttgagcccaggagttcaagaccagcctgggcaacatagtgagcccttgtctctataaaaaataaaaaaattagccatggccctggtgtggtggctcacgcctgtaatcctagcactttgagaggccgaggggggtggatcacttgaggataggagttcaaaatcagcctggccaacatggtgaaaccccatctgtactaaaaatacaaaaaattagccaggtgtgccgatgcacgtctgtaatcccagctacttgtgaggctgagggaggagaatcgcttgaacccaggaggcagaggttgcagtgagctgagatcacaccactgcactccaatctgtgtgacagagtgagactctgtttcaaaaaaagaaacaaccacatgtggtggcatgcgcctatggtcacagatacttgggaggcttaggttggaggatggcttggacctgggaagttgaggctgcagcaagctatgattgtgccactgcactccaacctaggcaacagagtgagaccctgtctcaaaagaaaaaagagagagggagcaatatcagaaggtatcaaacatgtaagtaaaatccaaataaaagaaccaaagaaaagagaaatagaaactatttcaattacaactcagaactaaattcctagaaaatattaatatgacatgaaagcatgctaatatatttattttgcacgagtaataatatggatttgacaactttaaaatagggagaaaataaataagcttatggtgttatcaatcaggagacagaaattataccaataatttatcaggaattttttttttttttttttttgagacagagtctcactcttgttgcccaggctggagtgcaatggtgcgatctcagatcactacaacctctgcagctctggttcaaagtcattctcctgcctcagcctcccaagtagctgggattacaggtgcctgccaccaccacatgtggctaatattttgtatttttagtagagacagggtttcaccacattggccaggctggtctcaaactcccgacctcaggtgatccacccgccttggcctcccaaagtgctgggcttacaggcatgagccactgcacccagcaggaaaaatttaatataaaggttactaactaataaaacatggttaactattaagacagataaaggataactctaaagaataccagaacctgggcacaagggctcatgcctgtaattccagcactttaggaggccaaggtaggaggatcacttgagcccaggtgttcaagaacagcttaggcaacatagtgagaccccatctctacaaaaaattaaaaaacagccaggcatagtggtacatacctgtagtctcagctcctcaggaggctgaggttagaggatagtttgaacctaggaggttgaggctgcagtgaatcatgattgtatcactgcactccagcttgggtaacagagtgagaccgtttctaaaaattaaaaaaaaaaaaaaaaggcagctggatgcagtggctagcacctgtaatcccagctacttgggaggctgaggcaggaggatcacttgaggtcaggagttggagaccatcctgggcaacttagcaagatccctatctcttaaaaaaaaaaaaaaaaggaagaagaagaaaaagcaaatgtaaacagcatgactacctctaaggctgagggagaacatccaagggagtaacagacttggaagagatctcaaccctgaggctaaaattcagacccccttggagaggacggggctgtagctagatggcagagaaattatatgtgtaaatgacagaggaattcactggagtgctgcagatagaggtggtggtgcagctgcaggtggggatggtgagctggaagccatctactggggtgaggtggaagcttattggagagtgagtgccaatggaactccataggtgacaccataagaacaaaatctacaacaaggagatctaggaagggcagctactgcctctctgctatgcctgcagtgtctctctagtgccctctgctgataagcctaacattgcaccagctggcaaatgagaaatgttcatgggatccagatccagatcagttaactccaaacaagaaaaagaaagattgctttggactaaggagcaataaattgataactggcacagtgttaccctcccttttttgtttttgtttttccattcacggctatactgtcaatatccattcatgctctatatgtatgattattggacattctatttttatacactccctggttttcttttcctttcattgttttggggctattttatagctctgaaagttgtagaaaactaataacaatgtaaaagatttttagttcatagaaatgaaaattatttgtgtctggtggaatatagtagattaaccaccctgtggttagaccattttccatcttttaaataaatgcattctagcattccttgttgcctatttatgtgtgtttttttgaattatcctttgatctagttgtaacatcttactggttccctcattaattaatgaggtaaataaaacctatcacacatattcattttgtatttgtatgtgag

SEQ ID NO: 2871 - DNA, 4730 bp, Homo sapiens
attttttctgaaagttttatccttaatccttgaaagcataatccagtttagagttcccagtttcctgagcattggttactatggtctactccccacatcccgaaatgatgttgcactatcttctttctccttttacatgtttggccaatttaatcttaatattttgaatttgatgcttttctcttttctacctattcttcctaggttatgattttattcatattcacaaataaaaatattgcatctgtaataataatttgagacgaagccattactctaatcctgattttttgcctgcgccacagacacaaattccagatgacctgtaggacaaagcccatgtagattttcaatgagcttttcatctcaacatgttcaaaactgtactctttatctacttattgccactatctactcccacacctattttcttcctatgatgcctgctttatcaatgtcacaaaatactctattgtaaatagtcctggaaactccaagacatcattaatgtgaatgtaggaaagagatgataatttaagttagaaaaggttggtcagagaagctgccatatggtagaatataggcgaagtaaaacaggtgtagaacaaacatgagccaatttaaaatatttcttctccagggaacttaatgtttccttgagaatttatgcctgtggacagttctattactactactcaagctaccaactattatggcagatgatgaagatcatacacactttgtgaggtgctgctctgagtgatgtatatgcacttattcaattaattcttacatgaggaaactgagactcaaagacatagaataatttgcagaagtttacaagttgagacttaggactaaataacttcatatggaaagttttgtttttaagaaaaggaagaagcagatcgcaattctacaggtacattgttatttaacttcaagaagaaaagctatctagaaacagccttaaattataacaaattgttctcatctcactttgcctcctggtctcattagaactagtattggaaatcttgtcctgtggttctatggccagcttcccttaccctactgagaaggtaagtacttaccagacactacaactgacaccagctctcagatttcccctgctgccctgctatattcaacaaaaaatataatagaataaaagctaagcaaccaaccctaactcttacaccgagttaacctgtctctgtgtaacctgtttgagtatttacatatacaggtttatttacatttacatatacaggtatatgaaaataggattttaattcaaattcctaaaattaaaaaagattgatagagcatgagcaaattatgagtttgaaaaatccccaatcattttcagcaacaattttcatgtttacatatgcccctgtattctctactttatgaattataaactccttttgcatactttctctctgcaggaaaatggatgcaagttttaaatatagatttatgacttttatggaaaataataattaggtagttctgtagccttgggcaaatactgtaatttccctgcacttcatttccttatctttaaaataaaggtatcagaagagattatcttaaaatgtccctccaagttctaccattctgtgatacactataaaataaactaactaactgccatttagggatgtctccaataacgtgacatatatgagttccatttacagatgactatgccctttattgaccttgacatagcctctccagagttacacattatagtaagagatgtatatgcatttagctccatttaacattatggcatcagggaaatgaagaattggagctggaatccaattcttgatattttataatcactgcttctaaaaatctatacctagcaataaaaatgtaataaatacctttttttttgtgccacccggttaaaagttagttccaaggatgttacaatgaagctgtctgtacaaataaatctgaaaatgaaactaaaaagatcataaagaaagtgtctgtttgtatttccaagggtgaatcggcctggaagctgttcattctctcccaagcctgaaacagcggataaacgaccccacctcatgctgggaagagagagcttgggatccctggcacgtgagaaccagagcctggtgtagatcagagctctccatccagagtgtcatgacttagctgcatgctttcaccagcagggaggagggaactgatactggaggtaacaaaggcccagttttgttttgttttgctataatctcacctgataggaaagaacacctgtagatatgcaaagctgattatctcttcataaaagatggactagcctctacaaggacagtaatgttgtgcttgacagagtgacacaggccagtgatggagcagcagagtcctccaagggaccatgagaaaaacattacctggccacatgattgcgtgacaaggcaagggtccaactggaatgggggtgcatgagaactgcttttgtgcctagatgattaaaaaagggaatgtggacttaagtgagaatggaccaggccgtgcagaatgatattatacagaggaaaggaggtctttataaggtgatgcagtaaaaaacctataaaggtttgggagtatattatcagtgataacagctttctagcgtatggagtagttaatctttaagacatgattactgtgtgcagagtgaatctgagaactattgaaatgtcagaaaggattgaattgaagccacagaatgtcatgacacaaaaactgttaactactagttttagaattcctattaagaaaacagtataagaaaaacaagacaatgtctgtgtgaaacagtgatttataaattttggtaagcaccagcattacctaaaaatttgttaaaaatacaattgctgaagccccactcttggagatgatgcagcaggtgtgcgggggagctgtccagaaggtgtgtgcgcactccagattagatctctacggcccaggctcattttccttacatacacatgctatttatagacacgtgggctcatgcactgagaggctgctttcttctgagtaccgaaggaatgaatatatacaaaacgattaaaacaatcctggacacgttgtaatcacttgcaagtgttggctgtacatgaatataagcattcattcaaagacaaatacttattgtcatgcatgcggatgtgtatataaatacatttgtctaagcaaatcaggtacacattaataaagtggaagcaaggcttttcaatccctctcaaataatactttattgttcactaagctgtgaatttttaatatcttgagccctgagtgaagaccagaaagcaatcagaggtcactgcaagtagctcaggctgagattccaacaaaagtgagtcttgtctgtgacagttacacaaattacattttgcctgtcatcctgctttgaataaatatactgaaatatgagtgaagacaagatcattgttcaataagaaaaactgctttgctttgggatatttgggaaattacgtaactaccattaacatattagatctgtccttttaaatttcttcattagctccaactactgcagtaaaattctcatgtgcaatttaactgcagcattaatgaagctgattggtctataacatgcagggccagttttatcaccctttaaaacacctgaattaagatgtttttatcccaaccactgaagaaaagaactacttcaatgcatgatccctaaaaagaaaaaaaaaatggagaaagttagcctaattttactcttgataagatctttaaagcttgaaaatcacaaaatgtaatcaaaaactactttttaatttccccaaagccactgtaaaacctctgcaaattatattcactatgagtgtgattttgcaatgcgggagccacaccgggggaatgtaacatcttttggagctaggttaacgaaagtagcctgggtagcaaaaagttggcctcatgtaaattcccaagatcaacagtgtaaagaacttaccggtataaaagaagttgagatttcatttggaagctctaaaattaatgtattcagtaactactatatgtttagtgatcagtaaagagacaagattttaacaaaatttcttataatttcatgaaaatcacacaacaaataacaatagctttaacaatagaagggctgtctctcagttgtccagttcctctctgcttgctgaagtaatatggtgactacagacacccatgagccttagagattttaaaacaagttgactaaaaatgtgatatatgccaactttgacaaagaagggaaactatcaccacatgcctgcatttttgttgaccaaagctttttacttctcacttgaatctcatttttaatcctcagaaatatactttcctcctccatcatagtgattcataaccttctaaaaccttacgattctgaaaacccacacaaacacattgggacctctcccagcccttgactcactgtcagcattctcaagatgaccacaatgagcagcattgaagagccagcgttcaaatgcttctcccacatgggagtcagtattctgcagagatggataattctcagaccaccacttagcttcctgaagccagcaacctatgtcaaagatcttccaacaaatacaaacctaaatatgataaatgtatggaggagaacgtgtgggctcaaagaactcaggcaacgatgaaaaactggg

SEQ ID NO: 2872 - DNA, 3128 bp, Homo sapiens
agcccagagttactaaggaggtactccgcaaaagataaatggaaaaacaaaaggtcatgaggtcccaaataacaaggagcaactgaaatagaattatatctgccggtcacctggttccagcttactcagctgctaaaaacatttgcatcttacaactgcttatcagtgagagcctcagatgaagccacttacgtcgaacagtggttctcagcgcatggtcctcagaccaacatcaaggtcctctcctggaaatttgtcaacaaattcttttgctcccttgtagacaaactaaatcagaaatcctgggggtggagcttagcaatttgtggtttaattatccctccaagttagtctgatacatgcctaattttgagaaactctgatagagaagaaataatgcttgtcttaagatgaaatagaccatgattctagacaactcttgttaacagggtggctttggatcagatacttcatattagttgctctgtcttttaaaacttaagagtagctaccttacagtgttggtgagtattagataagtcatgtgtattcaaaagcattttgtacacagaaagctttcaaggtatgtgttctcaccacacacaaacaaaataagtatgtgaagtaatgcttatgttaattggatctatttagccattccacaatgtatatatatttaaaacaaaattttatacgcgataaatatatacaatttttatttgtgaattaaaataaaaaaattgtaaaaggctttaagccagtgtaagggattattgtactggacaggctgagtctcaggatacctgagggaagctgcccactaccccaacagcccctattactagaagaccatgaggcacaccacaaaaccccactccaatggctccagagtagacgagctacagacagccgtaggactgtggcataacctgatatacacatgcacatgcatgcacacacactgaactaggtcagagtttgtattttaggacgatgaaagtgctaatacaagaaaatgaagcagcaggtggttgaagctaaaaataaaagtctgccttgagccaacaggggacatggcaaggtgaaatcataagaaagtagaaattttaagaaaaataagaaaaataatatagagaggctaatatctggaaagaaagagcagaggagggataatgcagagttaccttaaaagaccagcaagccagtggcccacaaaagagagaagaaagaggagctgatcccagaagcaatctcagcttctgatgactttccagtgccaacttgaagccctcctattgaatgactctttcttttaagtctctgtttctttaaagccaaaaatctcagttcaacgcatttttattattatcgtgtttagactgcagaagagaagacttacattggcaaggacatagaagaatgggtcattgcctgcagttacatgatgagctatcataaaagctagagaatgggctttttccatatatctccagaagcctagtccaggagaaagagataaaggttataatccatgagggcttacacaaggaaggctttctaacaactaaatgtaatcaacgatgatgttcgcctcatagtacagtgatttctgtggcaatggcaatgttaaatttgttagagggaaactgtataaatgcctaaggtctcttcctagagtaagatttgatattctgttgaggaatgacaaaattgggtcctgaaagaatcaacaatatgggtttgggtatatctgagaatggcagcaaagagagtatccatcctccataatatattggagctcactaaaggtaataataaaatgtggcaactggggttgagatggagataatgtggctaaactggataaaactgagaggatggaaaaaattgcagaggtcacctgttcatcataacagccaagaatggaagcaattaggggactgacttcttggatttaggcagtaattttttgttattttggtcttgattgtgcatttgatgaatttctcaaccttctacccacaactttattctacagctccttttacctcaagtgggaagcaagtgttcttgcttcttacttgatttcagctttagcatcctcatctgaaaggtgacaggatcaactggaggacctctgcagtattttagagcagccttaatattggataaatcattgtttgactcagttgcttttgcccactcttttcaaggttctggcgctgtactaaactcaattataattcctctctcttgagacagaggtctccaggctgagttcactgtttctgatacctcctattagcttgttcccgatacctcctattagcttgttccctctcactttacaagggcttaattagccattataggagactctttccaaatgcaggctttgcaaaatgattagtgctatgggccgtacttcaaaaataaaattgcatttaggataattttctcatattttaaaatgttactttcatgataaaaaataatacaggaaaacattcttattgcttcaaaaaatccaaactgtactacacagtgaaattactgcttgactctgacccaattatattcaagccttctgttaataaccatttgcaatgttttatacataaatgggatcatcctgtaacttatttatttcacaatacaacatggggctctttaatgtaagcaggtaaagatctgagaataaggtaataatttttaaacacaattttacttggttcagtcatttactttttaagaacctactatgtgtttggcacatcatttactttttaaagacctatgatctactaggtactgggaaaaggaagctgcagactctgcattccagggacctcctggttcacatggaaagctataatagaagctattcagcggtactgggaacacaaaggagagcctgattgattaggtctcaaagtgtccaagagtttccaaaaacagaactgaggaccctagaacgaatgcagcttactgggtaaacactctctttgggaatgattaagtctttctcactgtctaaaatctgtctctttcctgaaagatatttggcaaaccctacacattgcatatttcctagaacagaatttgcccatttttaatcctaagtgaac

SEQ ID NO: 2873 - DNA, 26940 bp, Homo sapiens
gaaacactgtaaataacaagaatttaaaagtttgtttctgacagagtttctatctatattttcctctgcatcgtggtattattcttggaacataatatttgtctctgactcatttgagttaatttttgtgacttagcgaactccttgtctgtttctacagacttccaaatatgaaggtggattaatttttagttttattgctttttacatattgttccaatgcccatatattgccacaatcaacttctattctatgagattcaattaccgaaagcaatgtgaagatcggaggaataatttaatttactatgggagatttaagttttaatccaaatatttcaaggccatttattttcaatgtatgtcttttaatggtctatttggagatttcagcattctcaattcatacattataagaagtagatttaggaaatggccagaagaaaacttgaaggatcctaacaaggaagatgcattttgttaagtacaaaaaagatttattactcaaatcaggctacatttaatatccttgcttatcttgtggaaattgacacaacacatttttccatattttattcttcaaactccctgaagcaatctattttcagatgaaggtgaaggaggaataatgctgtcttcagcatcactgtgatttcaaacctaaaattatatttgccgtgaattctagacacatttgtaactaataagatgcttaatttaataattttctctgattccatggtgacacattcaatgaatactgggaaatttaaaaaattgcaggtctcaggtgacataaaatgataattaaatgtgtatacttattttttatgtttcttaaaagattttggggtttgacctgattaaaaacagtggaaaaatgagaaccacttgtactataatttaataaaatatcctaaaaaaatgattcagcaggtcaacatgactggttgacttatcaaatcacatgactatttccacatgattgacatgttgctttccatctacttaaaactaataagttgagtaaagttattagtaaaacaaaaaactatttgccacatatgttgtacaaagtagagcacatgaacctctataaaataaggctttagtgtttgttagaaattcacagggtaaggaaccgggtgcagatagaggttagccagttgctcagtctgccactggaaggaggtggagatcaaagctatggtgccatttatctcaaacatccacatgtaattcctgacataggggtaaatgcaaactcacctgtttcttgctgaaggagataagcacaccagaaacaacagcactgccaagcagagctgaacattttatttgaaaatgtgtacaatgtgcaagaactgacttcgtggtgcatttacggacccaaccatcaaactcaaaactagtcatgtaagagtatcccaaggtcagcaagaacaatcagaggaaaaagtgaactcaaagagtggattttatagggctgttcattgtgaatagtgatttattttattttctaaattttaaaatgtagtcccgagaggcagtacaggagaaatgttaaaagacagcattacaaataagctaaaacattaggtgtgtatagaaaagtaatctttgtcaattgctcccaaggtgccttggactgtccaaaaaactagctacgtgctcattccacttgcccacacaggcaagtcttcagtgcaccttgcagtttattcctttcatgatactcaagtctgaactaacccctttacttagctaagacatggttacgctatatctctagccctccacaccactctcttagaatttccaaagtgagcgttctcatatttaaaaactgaatcttggtttctacgtgattctaagattatgaaaacatactcctctctccctggccatgctactattttcctcagtgtttaggagtttgggctggtgatcttggccaaattatccaatttttctgttcctgagtttcctcatttattattttaaattttatttatttaaatttattttatttacttatagccacatctttctgatgcctcatttataaaatcagggtaatacaacatatttatttggttattatgaaaatttatcaagataaattttgcaaaatatttgtaataatatctagctcatagtaaattcttaatacatacttaacagttactgttgtgttgtggctgctgttgttattgtccccaaataatggatgtgtgttaacagtggtagagtggagataagacattgtactgtaaattcactgagaacttaaatgtagttatttatctctatataccttttcattaagcattgttttacacaagccatgggttctcaataagtatttttttaacagagtaaaactttgctgttgaacctaaaaatataattcagatggcaggcattttaggccagtccagaaaaagagaatgttaatagattcaagattagaatatataaagcggtggccaagatgtgtaactcagtgtgagtcataaactattcagcagctctggcaagttgatgggcaaatctggaatctgcaattctacctgctattaaaacttgatttttatgccatgctagactatgtagttcccactaaggtggaggaagtggggttgaaagggtgatgacaatactcaagtagcttaaaaagtttcaaattaaaggcagtgaaatgtttatgatggaatatgctcaaggttgtttttctcatgtttctggatatcgggttatcttttactgtcagtggtagaggctaagatgcacactttctcatctccatggccaggaatgagtagtctctcttttttgtggataagaaattgctactgattctagaagaaagcctccaggcaagtttgtcttctcctctacactacagacaatatctaggcagaaaaccgcactcgctgaattgatatgcctggtccaccagatgctaggccatccaaagggtatcagatcaactgtcagaagtgaggagctaatatttaagcaatgcatctgcttgtaatacctgactctctcacttctgcttgtgcgatcttggtaatgttatctttctgggcaaaactttgctcatttataaaatgggaataataattatgtctattctatcagattgttatgaagattaaataagtaagtcttgtaaaatattaaaatagtggttggcctgtatcagcactcattcagtaatggcaaatagaattagcttttaatctcctccagaaaaattacttgctggtaatttgattgttaaatattgtaaatcatacaattaggaaggtcttttactttattcacacttttgcattactagtcacctaatcttatatcaacaccctaatttagcactgaataaaatcaggccttctattttttatttgcagctaagtttgagaaactgtgcctggagaggggatagagcagttttcagtttcttccacatctcctatctcccctaaaataaatatcttgggcaactcacccagcccaattaaaaaggaggatttcgtgttacagatggccctttattaattatgatctaccataatttacttttaataactcaagataatcatagaaacgtagattcacaaagctgaacagggctttatgttcatctagttcagaattcacattttacacttaagtaaatctgtcttcatttggactccttacttaaaccacttgcttcccctttactttgagggagagagtttgacatgggcatcctgcttcttagccattgcttgcctgcctgtgcttccatttacttatccagagagtgacagtgttacaagcaattcaggatgaggacgttaatgagcacactttgccaaatgcatggtgcttcacctaactcaacttagccattgtataatcttcaagtccataggcacattttagcaacataaatcaaggtgaaacatgtttgtttccaaaaaacaatactattcatgtaaatattaatctctcattgatcttgaattccctggaatttattaatttgtgacctagcctgaaagttccctgaattttacatttccttatcaatacctacatctatatataattgctgtttgctatctgaataattgggcctcacacattacaatgtggagggttttcagttcagatttggtgtaacataatgaagaaaaaaatgactaggcatatcatgcatgtaatcctcaaatagatgacaaaaatccaattcagtgtagagtaactgcacacaccagcattaacagaagtccctagtacatacaagacaggcctctagccagaggaaatgtagtggcccagatagtgaaaatgacaactttggcctgaggtaaacaggcagcatactgttacattctagacacaaggcaagcagctatcgagaactgcagcgtttttctaaagtgtattcatgcagttttaggatatcatgacttttcagaaggagggtaatgcattctgataccaccatcttagaaaagataagagattacggctttacgtgcctagaaaataggaaaggaagatgttattattgtcttaaatattgaacacagtgtattttcacattgtcaaaaaataaaatatgcatattttgtgtgcatacaacacactttctaatagcaactgaacacatcaggtattatttaaaaacttcctctaatttgcaataataggcgataatgggattttcaagattaatatgctaaaccattgaaatgatgaagcagagcatacatatccccttgtagtggttatttagagatagaaaacaaatgaatattacttttttttactgtatatataaaaggtttattttctggcactgattcttcttgctaaaatactgtttaaataaatcaatgtgtagggataatggctaccatccaaagaccactatattaacatttatattaagaatacaaatgatacaagataattaggtagtttcattttgatatgtgaatggccttgcaatgctttgtaaaacacagacagacattactactgcgtttttataaatcacagatgcagaataatacatttttttctaaactacagggcatgtactctttttataagataatatttaattatttttcattgaaaaataaaaattgtacatatttaccatgtacaacatatggttttgaaatatgcatgcattgtggaatgctaaactgagataatttacatatgcattaccttatatacttatctttgtgtgtgtgtgtggtgagctcacttaaaacctactctcttagcaattttcaagaatacaatacattgctactaactatagccattatgttgtatatctattgaacgtattcttcctgtcttaactgaaggtttatattatttcgccagcatctctccaacaccataatcccaccccaccattctactctctgcttctatgaggtcgactttttaaaaatccacatataagtgaaattatatgacattagtcatcctgtgcttggcttctttcacttattcaaatttcctaatgaaatagctgcactattgttctttgaattatagtctttgttgatgtcactgtgcaatactacaaagaattgttatgaataaatgggttgttatgaaatagttcagtggaacactgaactgggttcagttcagagaaagaggttgttacgaatctttcactgactccttaattctcaagtctttatgagaagtagctctcagctatagctgccaaccatattagtataatctggaaaaaaaattctttaaatacctacaacccaatctcacttaatgttcatttctcagaatattagaaaacaaaagatacaaaaaataagatctgagttaaaacctcaatatattactaataccaaggataagtcacttaatattttaagcaaaacattaatctgtaaaatgggtttcctaacttgccaaatgctaacttcttatagggataggtttatgtgaggattaaatgaggtaagggatgtgacagaacttgaaaaagcacaaattgctatgcaagtgtaaggtcttattattgtaattaaaattaacgtaagaaattgaatgactactaagccagtccttatgtgcttctaaaaaaaatctgggcaatttatcaacatatctaaagtaagtattaataagcagagggtgtatgtagaatgactgaagaaaagatcagaatttagggaaacaatgctatttgaatggagactgtatatgtgtgggtgggggagcacttctcagcagaaaactgcattgccccatacaggaaagtcttccaagcattacttaattctagctttttattgactgagctaattttcaactctataagtggtaggtctctagtagacctttgaattatgtcttgcatagtagaggttcaacacacttcctttccagtctgtattaagaccagttttgccaccctttacatatttctttcaacattcctgatctataaatgtgcctgcttatacagtcctctttgaaccagttataacatgtgtctggcaaccacattaaatgagtagatattaaaatgtgtttattttaaatctgtatgagagttacaattttttccttttctgaaaattatattttaacagcaccaaggaagaaatgtcagcgaaagagagggcagtcaattatcatatgaacaagcaaaactacaaagaaaaagacatgtccctgagaacaaaggagaaaaacgatttggagaaatagctcaggggtgtctggtaaattgaaagaggttaagaatgtattgcatttagcaaccaagtaaccattggtatctttacaagagtattttataacatattgaggttaagtacaatgcagactttagatgagcaggtgagaagtggcaaaggaaagcatcaaagcaagcctaccttttctttaacttttctttttctgaaacttactcttctgtatctgtaaaaataataaatgctcactgtaaaaaaatacaaaaaagtaaaaaaagaatgcaaagctcttctgaaagtatactgacttgaacatctttccatacattcctctaaatgcatataacttaaaataatggaaccataatgtatctacctactattaggtacgtaacttaattttgtttcatcacttaatcttcctagttaaactttttgtatttatttcaattttgacagcttagttatgcgtcctcctggcaaagaaagggaaagtaaggagatagataatttgaatatatgtacatgcttctcttattcttataacactcacatctgtatgacagtttatagttcacatagtatcttcccatgatttattttatttaatccttaaactctatgagataagacaaggaggcatttttgtccttagttgacaatgaaaaaaaataaggattgatatggtgaaatatcctgctcaaagtcacaaaactgttactcaagtccttcattcaacaaaattatgccagagaccattaaaataaaaatgattagaaagtgatatttgctgttctctctgtaattcaaaatttattgagagaaaagcatataaataagcacaagcaaatcattcagaggtcctataggagatgcctaaacaaggtaagagagagtagtcactttttttgttgttgttgtttgataataggctatgccttgcaaagcaaaatagaataattgtatcattaactggagagagagagagagacagagagagagagagagactccagtttaaaggagatctggtgagaaatggggtaatgcgctccttagggacttcttcttgagatatgtacttacatagaaagaaataaacttgatgtcaagattttactgaatttttgtgaacaagcagagtttgtggacatcttttcaaggtaaaagcctgtcatgtagacaaaatgaagatgagttagagagctttaccaaaacactataaagtatgcatgtcatgttcttcaatttcaaagattcatgctgttcattctaactcagaaaaacaggcaattgctaaagaaaaattattttaagctgaaattttcagcaagctcacagtaatttcaggtatcttcataatggtagagagggcaagatgcatcaatatgtaaactggctcaaagactggagaaattaatatttaagcaggcgactgaagtctaccctgttcactcaagaagtgaagaggcaataacaggtaatagaacccagcaaaaacaaggtgccttgtggaggtcatggaaatggaaaagaaaaccagtgaaataaaaaatttcatgaaaaaggttctagtctgaactgagagaagccaatagtacactgtagaattggattcagaattgctttcaaagttttattctcctacttggatatgaaattttttttttcctttcaaataacaatatggacttctagttttcagtttagcatgtaggaaatttgaaagtctttgttctaacagtaagtaaaaaacggaacaaaccgtaaaagcaacaactcttcttagagtcatcacagaaatgaggtcacagggcaaaccactaaaccccaaaatggagagacagacaagtggatgcaaaaaattacaacttaccaggacagaaacccataatcaaaaacatccttagaaaccaatgacatagtagggaaaactgaactgtaattgatgagttgctggaggcttagattggaaaagttggagagttgaaaactctatggaaccaagtaataggagggccctgacacttttgtgagctttacttcttagagctctctatcaggtttttacagtgcagatgcgagaaaattccctggtgtttccagcatggtaaaaatgtactcacttttaaataccccagagcattctattcttcttaacgaggcctgccctcaagagaaaatatttcaccagagcgtaacctattgcgattttatcagagcccagctgacctgaggaagtacataaagcaaatccagccctctctagctttcacatgggtgaaaggaaatagtcaaattcagcctgttctagcctttcaaatgagagaagggaaatacacaactctagccaccccctccgcctcagccatctggtcctacttttgagtgggaggaggactgagaagcactgatgaattttatggttcaggggcataggctcactaaaaagactgcaagttaattataggactacaaaacagccccttctctccacttcaccaccacatccctaaagacttatttactgcagttccctgtgccctccttcatgtcaggatatccagaaaaaaattgcaaggcaatttaaacacagtttaaagaaagagcaagattcagaaccagtctcaaaaatggcagggatgtcggaattatcagaccatcaatttaaaaatactaagattaataagggctctaatgtacaaagtagacaacgtgataacagataaatagtgcagaaagagaaatgaaaactctaagaaagaattttaaaaaacggctagagataaaaaacacagaaacaaagaaagcctttgatgggcattagtacactgaacatgagtgaggaaggaatctctgaacttgaagatgtcagtaggaacttccaaaattgaaaagcaaagaagaaaaaaagaacaaagtatctaagaaccatagacaactttaaaaggtgtaacatagtcagactttcagtaacaacatggttgaactcaatagcatgataaaccaactcgataaaattgatatctgtagactactttatctaacacagtagaatacatattattctcaaggtcacattaaataatcatcaaaatagaccatattctggaccatggaaacagcttcacagaattaaaataatataaattattcaatgcctactctgaaatcacaatggaattaaactagaaatcaataaaaatgatagttggaaaattccaaaatacttagagattaagcaacacacttctaaataacacatgagtcaaagaagaaatctcaggacaaattaatacatattttgaattaaatcaaaatgaaaacacaactaaattcatgggaaataacaaaagcatacttagagggaatttgtagatttataaaagaagaatttataaaagaagaatgatcttaaattaacagtctaaggttacaccgtagaaaactggaaagaaaaagaacaaattagatctaaagtatgcagaatgaaagacataataaactgtagatcagaaatcaataaaaatgaaaattaaaaaatcaatagagaaaatcaatgacactaaagtctgattcattaagatcaataaaattaataaatctctagccaggctaactaagataaaaagagaagggagcaattaccaatatcataaatgaaagagggtatattactgaagatctcatggatattaaaaagataataaaagaatatttgaaatagctgtactgtgtcaacacattcgttaacctagatgacatctacctattccctgaaagacacaatctaccaaaagtgacacaaaaagaagtagacactctggatagcctatatctactaatgaaatagaatcaataataaatgcccttcaaaacagaaatcaccaggctcatacggattcacaggtgcattccaggaaacatttagggaagaaattttactaattctctgcaatcttgttcagaagataaaagcagagagagcacttcttaacccattctataagaagaggatcaccgtaataccaaaatcagatgaagacattcttaaaaaaaggaaattagagactaatatctcccgtacatagatgcaaaattgtcaacaacattttagtaaatcaaatctaataatgtatacataattgaaaaccatgaccaaatggaatttttctcaggtatgcgaggaaatttcaacatttgaaaacgaattcatttaattcatcacatcaacaggccaaagaaaaaaaatcatatgatcatattaatagacacagaaaaaccatttcacaaaatccacactattcatgataaaaacattgcaaactatcaatcctatgcagagaagaaaaataaagaaaaaggaaaataaataaaaagcatacaaattggacaaggaaatgtaaaattatatctgtgtgcagatgatataatttagtatgtagaaaaacctaaaaaaaatccacgaaaaactgttacaacaaacaatttcagcaatgtttcaggatacaaaattaacagacgaaatattaagtgtttctgtacactaacaaagaccaatcagcaaaagaaattaagaaaataccaattttagaaataaattgtcagtataaaaattacagaaaattacaagtgttaaaacgtggagaaattgaaacacttgcacactgttggtgggaatttaaattaattcaagtactatgaaaagaatatgaagtttcctcaaaaaattagaaaatggaattagcatgtgatatggaaatcccacttctagtcatatatccaaaagaatttaaagtaggatctcacagaaatatttgcacactcatgttcatctcagcattattcacaatggccaagaggtagaagcaacccaaatgttcactgacagatgaatagatgaagaaacatgatatatacacacaaagttatgttattcagccctaaaaaagaaaaaaattctgtcacatactaccatatggatgaacctccagaacgttatgctaagtgaaataagccagtcacaaaaagtcaagtactgaatgattccattcatatgaagtattgaaagaaataaagatcacagaggcagaaagtggaaaggtttttgtcatgagtgggaactgggtgatggagggtgtaagaggaattagtatttagtgggtatagagtttcagttttgtaagatgaaaaagttgtagcaatttgctatgcaaccatgtaataataaacactattgaactatatactaaaaatattaacaaaatacatttaataatgtaatgttatgtgttttattaccacaataaaaattagtcaactgctttcctatataacaataataaacaaatgggatttgaaattaaaaacacattaccattgaaaatacctgctctctcaaaatgaagtacttaatataaatctaaaaatgtgtgcaaagtctatgtgagaaaatttacagaactctgattttaaaaactaaagaaaaattaaatggagaggcatttcatgttagtggatagaaaaactcaatgttttcagtatgtcacttttttctaatttgaattttagattcaaaacaatccaaataaaaattccagcaagttattttgtggatatcaataagctgattctaaagttaacatacaagtaaaagtaccagaacagaaatgcaatattgaaggagaacaaatttgaaggactgacattattttacttaaaggcttattagaaacctacagtaattaggccaggcatggtggctcacgcctgtaatcccagcactttgggaggctgaggcgggcggatcatgaggtcagaagatcgagaccatcctggctaacacggtgaaacaccatctctactaaaaatacaaaaaaaaaaaaaaaaatagccgggcatggtggtgggggcctgtagtcccagctactcaggaggctgaggcaggagtggtgtgaacccacgaggcagagcttgcagtgagccgaaatcacaccactgcactccagcctggggtgacacagcgagactccatctcaaaaaataaaagaaacctacagtaattaaacagtgtaacattggcaaaataattgacagaaagatcagtggaaaatattagagagtttagaaatagatctgcacaaatataatcaacttatttttgacaaggatcaaaggcaatgtaatggagagaagatgggcctttcaacaaatggtgctgaaacaactggatatgcacatgcagaaaaagaaataaatctagatacagaccttacacacttcacaaaaaaattaactcaaaagggatctcatacctaaatataaaacgtaaatgtaaagctcctaggagataacatggagaaaatttaaatgatgaatatgctgataactttttagatacaacactaaaggtaggatacatgaaagaaataattgaaaaattgaactttattaaaattaaaacttctagtctttgaaacacactgtcagcagaatgagaaggaaagcaatagactgagagaaaatgattgcaagaaacatgactggcgaagggctgctatccaaagtatacaaagaattcttgcatctcatcaatgtaaaaacaaactgattaaaaaatgggctgaagacataaaaaaacacttcaccaaaaagacacacagatgaaaaataaacatgtgaaaagatgcttctgtgttttcaacatcatatatcattaggagattataaattaaaacaatgagataccactacatacctataataattgtctaaattcaaaacacaaacagtgtcagatgctggcaaggatgtggagaaatagcaagcttcattcactgatggtgggaatgcaaaattgtgtggctactttggaagacaaaacactttcttacagaactaaatatatttctaccatacagtacagcaaatgtgctcctttgcatttacccaaaagagtagaaaacttatatccatgcaaaaacatgcaaactgatgttgacagatgtttggcaacataattgccaaaacctggaagcaaccaaaatgtgcttaatcaagggaatggataacatgccttagtacattccaacaatagactattattcagtggttaacagaaaggagttaccaaccatggaaactcccatgaaatagtcaaactcatgtcgtgggggtttgttgtacagactacttctttacccaggtattaggcccagtacttcattagttatctttcctgagtctctccctcctcccactctccacactacaatagaacccagtgtctgttcccctctatgtatccatgtgttctcattatttaattcctacttataagtgagaacatgttgtatttggttttccgttcttgcattagtttgctaaggataatggcaaccagctccatccatgtacctgcaaaggacatgatctcattctttgttatggctgcatagtatttcatagtgtatgtataccatgttttctttatccagcgtaccattgatgggcatttaagttgattccatgtgtttgctattgtgaatagtgctgcaacgaacattttctgcatatggctagccagttttcccagcaccatttatggaatagggagtcttttccccattggttgtttttgtcagctttgtcaaagattacatggtcataggtatatcatcttatatatcagctctctattctgttccatttatccatgtccctgttttagtacaagtaccatgctgctttggttatggtagtcttgtaatatagtttgaagtcaagtaacatgatgcctccagttttgttgtttttgcttagtatagtcatggctattcaggctcttttttggttccaaactattttaaaatagtttttatttttctagttttgtgaagaatgttgttggtagtttgaaaggagcagcactggatctatagaatgctttgggcagtatgggcattttcatgatattgattcttcttatccatgtgcatggagtgtttttccatttgtttgtgtcttctctcatttctttgagcagtgttctgtaattctcattgtagatatctttcacctccctggttagctgtatgcctccgtattttattctttctgtggcaattgtgaataggactgccttcttgattttttcttggcttggctgttgttagtgtataagaatgctagtgatttttgtacattgattttgtatcctgaaactgttgattgtttatcagctgaaaaaattttgggcggagactatgaagttttctagatagagagtcatgtggtcttcaaacaaggatactttgacttcctctgttcttatttggataccctttatttctttctcttgcctgattgctttggctaggacttccaagagggcatccttgtcttgtgttggttttcaagaggaatgcttccagctttttccctttcagtatgatgttggctgtggttttgtcatagatgactcttattactttgtattacgtccctttaatacttagtttttgagaatttttaacatgaagggatgttgaattgtattgaaagtctcttctgcatttattgagataatcatgtggtttttgtctttagttctgtttatgtgataaatcacatttattgattgacgtatattgaaccaatctttcatcccatggataaagcccacttgattgtggtggataagctttttgatatactgctggattcggtttgccagtattattttgaggatttttgcattgatgttcatcaaggaaattggcctgaagttttcttttttgtgtgtgtcttggccaagttttggtatcagtattatgctggcctcataaaatgagttagagaggaaagcttcctcctcagttttttggaatagtttcagcaggaatggtaccagctcttctttgtatgtctgatagaattcatctctgaatttttctggttctgtgctttttttggatgctaagctttttattactaattgagttttggagtttgttattggtctgttcaggaattcaattttttcctggctcagtcttggaagagtaaaatatactgtttcataagcatgttattgatcagcatttaataatcaatatttatattctgggaggagataaattacctctctcatttttttttctgcagcacatagaagaatacctcagacatataaggttttccatttcattttaatacataaatcagtataatactcattacactaatctcacatgtatacttatatgtgtattttagataattctgtacagattaatgaaaagaaaacatttatttattcatccacttgtgactaaggtatccatctgttcaacaaatgtttattgaaactatattgttccagacattataatagtaatgaatgcaggaatggacattgtcttccttgtgtttttagtataaccacagatataccattaagcaactattaaaacagagagtgataaatgctataatagggaaaaaacaggtgctgatacccaaaagccctataggttaatttggagtttcagagaaggtttttaccaggaaataataagttgacattaagaacaaaatgatagtaagaagttacccaaactaaaaggtagcagagaagcacatcaaatggccatcccacatagagatatgttgaatgcacacgaaaaagaaagaacaatgaagagatgaaggggattgagtgtgacgagatcagagagaaagaggtggctagacactgggcaagtcatggcttgactatgacagactctataatcaaatctggaagtaaatattttaccctaaggaaagtggacaaagattagagtataaaagcagaaaaacatatagagacagggtgtccagtaagaatatatgagaatattcttgagttaaataatattagctttaatggaaatgttggcaatgaaaatggaaaataggaaaatgtataaataagtagaaataaattgaacattcgtgaacaattaatggatcaaagaagaaaccaaaaaaaaaaaaaaaaaaactaagcccaagttagcagaaggaagcaaataagatagattacagtagaaataagttaaatagagattagaataataacagaaaagatgaaccaaactaagagctagtttgttgaaaacatgagtaaaattttaaaacatttagttagactaagaaaaaatagagaagacacaaataaataaaatgagaaatggataataaacctggccaggagagaaagatattagtcctgaaagtaggaacaggaagcagttaaatcccagatgaagcagcacagctgagtgactttccctgcttgcctcttttccctgcctgagaaggaagctgagagttttttttcttttcttttttcttttcttttcttttcttttcttttcttttcttttcttttcttttcttttcttttcttttcttttctcttcttttttccctgccctgggacctgatagcttcactgatgaattctaccagatatttaataaagaattaatatcaatcttttttcaaagtcttccaaaaataaaaagaaaggaaagaagactttcaaactcatttcacaaggctagtattaccctgatactaaagccagacagataaataatttaaaaacacttacaggccaatatctgtcatgaacatagatacaaaaattttaacagaataccagcaaactgaattcaacaaactattaaaaggctgatatactgtcatcaagtgggattgattcctgaaattcatggatggttcaatatacacaaattaataaatgtaatacaccacattaatagaatgaaggatgaaaatcatgtgatcatctcaatatatgcagagaaagtatttgataaaaagcaacatcctttcatgtaaaaaattatcaacacattatgtacaggagaaatgtacctcaacacaacaagcccacagctaatatcatactcaatgttgaatgttgaaagctttttttctaagatcaaaaaacaagacaagaatttccccacttgcaacttcaattcaacattgttctggaagtcctagttagaggaattaggtaagacaaggaaataaaaggcatccaaaatggaaacgatagagtaaattttttctgtttgcagataacatgattttatactaagaaaatcctaaagacttcaccaaaacactgttagaactaataaatgaattcagtgaagtcacaggatacaaatcaacatataaaaatcgattgcattcctatgtactaaaaacaaactatccaaaaaataaattaagaaaaaaattcattgaaaataccactcaaaaagaataaaatacatagcaataaatttaataaaatgaatgacatatctgtatattgaaaattctgatattgatgaagatttaggaagacaaaaataaatgcaaagatatcctctgttcatagatcagaggaatcaatattgttaaagtgttcatactacccagaaatgtaatctctatcaaaatttcaagggcatttttcactgaaataaaaaaaaaaaccaaatcctaaaagtcacatggaaccacaaaaaactaaatagccaaagtcgtaagaatggcaagaaaaacaaagctggagatatcaaactgcttgatttttaaatatactacaaagctaaagtaattgaagcagtatggtgctgccatacatatggggatatacactaatggaataaaacagaaagcctagaaataaatccacacatttatggttaattcatttttggcaaaggtaccaagaacacacagtgaggaaaggatagtctcttcaataaatcctgctggaaaaactgtatattcacatacaaaaataatgaaattggatctttatcacacactatttaaaaaatcattgcaaaatggattgaaggcccaaaactgtaacaatactagaagaaaccttagggaaaaagcttcaggatattgatctgggaaatgtttttttggatatgacctcaacgtacaggcagcaaaagtgaaaatggacaaatgggattatatcaaaccaaaaatcttctatacaataaaggaaacaacagagtgaaaacacaaccaatggaactgcagaaaatatttgcaaaccatgcgtttgatgagggtttactatacaaaatgtataagtaacttaaaaatttcaatagcaagaaagcaaatacactgattaaaaaatgggcaaaggagcagaatagacatttttcaaaagaagacatacaaatggacaactggtgtatgaaaaaatgctcggccttactaattagggaaatgcaaattaaaaccacaatgagatattactttgcaactgttagaatggctaagatatatacatgtgtgtaaatgtgtatgtatgtatacagaaacctgggtcaatgtacactgagtgtcaaaagtgcctttttttggccagttaaatgaccctttgtatataggctgtgtgtgtgtgtgtgtgtgtgtgtgtgtatatatgtgtgcatatatatgtgtgtgtgtatatatatataacacaacagaataccatgctttacatgcttaatcttaaacacaaagaagtcttaaacacaaggaaatcttgtcatttgtgacagcatggatgtacctggagaacatttttgttaggtgaagtaagccaggctcaaaaagcaaatactgcatgatctcactcatatgtggaactaaaaaaagtcaaacttacagaagcagagtagaatggtggtcttcatggtctggggtgtgggaaaataaagtgatgttggtcaaagggtacaaagtgtcagttatgcagagtgagtaaatcctggagacctaatctataacttgatgaatatagttaatacactattatatgtttaaaatttgctaaaggagtggatcttaaatgttctccagatccccacacacactcaatggtaaggatcttagataatggatatattaatcaatttggttctggtaatcatttcataatgtacacttgtatcaaaccattctattatacacattaaatagatacagttttttgtcaattatacccaataaagctagaaaaaaaaaaagaagatgaaaatcatggagttttgagagatataggatttacaggttgacttgatgtggatatacaaaataagagagaagtcaaggggagctccctgtttctggctttgacaatgagctggatgctagtacccttcactacaaggagaaatcaatatgtattacaaattagctacacaggaacgggttgacatcacatttgaacctgttgtttgtgtaatacatccactggtgacattgaatgaagggttgggtttatggttatagagctcaggaaatacagattttggagtcttagccttatacaagaacactgaatccttagaaataaataagatattccagataaagcgtgtaaagcatcgcaagtgaggctagaaatgaggaattgagaatgccaaatgtaaagtgagttgcaggagaagagcctgcttttgaagaatctgtgaataaagtgcctcagaatacagagactataggagggaaacgtctgcagtgatatttgcttgaaacaagttaacttttactttggcttatgaataattggtgtccctgtcaagagcatttcccatgaattaattatgagagaagtcacacaacagtagttccagaaatatgtgagaattagaaaatgaaggctgtaaaatgcaacaagctattgaatggacaggaatcttagaattttaaagtcaaagaaatgctgaccacagttaagagatatcagaagagaagaatctgtggttatgcaaaatagttatacaacagttatacaaaggccagctggctcttattaaatagaaaatgagggaaaagtggaggaatggcatgcaatattcaaaaactcctgttgctttctacaattatcattgaaagtcacatagtacatccttactaatgtttagtgtcttgtccttatgtgatatttgtaagagcatggctcctttttctgtattattgaccagccttcacattttatttgggagtataatttaattttataagacatgtggaaaataaaacttttaccaaatagtcttttaagaatctaaatggatacagttaactgtttccaacgtgaaacctcactgattaaacaaacatgtattgagtgactgctaaatgccaggtactgaacacatagaagaaaataaagcattttttaaaaactaaacaaacaaataaaaaactgccccatggtgttaacatacaaccttcacttataaaattttatgtttaccttaaatttcatgtagtttcataaacaaatccattaaatttcatgttatgtgatgagacctgtcatttcttattcttttccctaaccctcaatatctcatacagttctctgagtaaatggaattaatattaaaatgacctacttaattattaccacatttactaaaatattgggaattaaataattaaagatatttactaatatgagaattggattggtttcaaatatgaagtagccatatcatctgactatattttatgtaagttgagctggcccaatttgtgataataaggacaaaatctcagagatcctctaagggagaacgcagtaatctttattaattccccatctttgattcaaccattttgacttatttttcctatttttagaaattttaaggaaagcactttaccataagttgaccctgattagtaccacttttccttatgtgattctccatgaagttacagaaaggacaataataattattaccatttactttcactgttattttacaatgaaacacaatctgtgaaaataaaaatgaaagtcctatctaaagtaaatatcttctccctgctacaatatagattgtggtttaattttcaaacatatattttaaattcatatttgaagtgaaaactgttttttgtttgtttgtttgtttgggggatgcaaaatttagtagcacaaataacctttacatgtttccaatgaactagcatagatgagtcactgaggtaaaagctgtcactattgagtttgtaccaactctactgtaaacatagaaaggttataatgtggtaatatattgtggctaaaagacaaagtttagcaatattatgtatttgaaagtttaattttagtttagtatatttttcatttcataaatttgaagtaaaagtagaaaggaataatgataaaatgatgaggttctcaacacttcaggcaatttggaaattctctaattagcaataattgcagaatcagcgcttactacacacttgaaataaatgcctctttaaacaaactacaatttaaatatttctcatacaaatatagaaaacaacgttgtcttaaaaggaaataaaataaaaacgtactgataagctgctgagttaattgctgtgttcaaattatcctatctatttttacctttaaaaatgtatgccctactcttttattaccatctgcagagatgaaaaactataatttttgcacttgaattaaagccatgctcacctactttaaaaataataactgatacttcatgtctcatgatatcaaggaaaaagtagaataaatccatattaaattaataataacataattaatgtatttatgctaccataccatattaagtgttttgagaaaagggacaaaatacttctagtttattgttttgattgttggaaggatccagaagcaaataatttctaaatagtagttttttcttatttcttaatttgtagtatttactttttttcattgtggttttgattttaagtttattagaaatagaaattataatgttgtgtttcagggtgtatgtaaggtattaattttagcttgttaaccaatgagtgcacttttctttttcctgcaacaacttgctctctcagctggacttctttctatctaaccagatactttcaagatctgggagcttcaggttccttgctcccttggctttgccgttgataacttcctgtccaatcctaccaaagtctggaactggaacatccaagggttgcccttagacgccttctctactgagaatggcatcatcatcaagcgaggccataggaagaagtgtttaaactataaactgaggaggagaaaatatctaggaaaagagaagaaagttggcaaaaccatggtctccttcttcctgaatttgtaacttggcctacaaagaaagcatcagtcctactacacaggaagagtcaacactcggaggaggccttctgcactttgtcctctccttcttttcactcctcataatgggaaagaaataaataacaggatatccagtttagactgaggatcagagaagtcctctctgaggaagtgcctcttaagatgatggctgaagaaggcatatgagttagcccaatggacaatgaaaggaaaattactgtattacaagcagaaaaaaacaacatgtgaatgcctggaggccctgaggcccttagactctggcagttacggttgttgaaaatttcaaagatggtgtcatcgtgaagaacatctggctcttgatcccagtgcttggtcccacagattccattcaggatgctatgtgacataaacaccaggaatgtgctgtctgaggactggtgctctgggctggcagggaagctcggtatgcgcagattgagcacacatgttgtagctgacccatttgctgctgtaattgaaagttcacacagagagcagaaatgtggaggaaatgcaagttacctgttcaaccgcctggcttctcaccctcaccgtaacagaacacttataaaatgggtgagaatttcgggtggcagcgccaggaatatctctggaagcatgcgatgagttgtgtgatgaagatggagccccttgtgctgtctctcctggacacgttatctatgatgatacagatgggggcttgagaaataactggaattatcccactttacagaggaaggaatagaggctccaaaagatgaagaaactccctcatattaccacagtgagtaagcaacaaaaaatggccactaggctcccaagttgtttgcagattatgccatgctgtctttcaccatataataaacaaaatagatgaacacacaccaagtttcagtgatagaagatgaaaaaagtgataaaaatctactgtacaggatggtgccaatagtaaccaatactgtattgtaaacttaaaatatgctaagagggtagattttatgttaagtgttattttcacatgcactcgtggaattataataataaacagagaagtggaaggatcttttggaggagagagatatatttgtggcacagattgtggtgacgatttcaggagtgcatacttatctgtaactcattaagttgtatacattatatatgtaacattatatatgtcaatcatacctcagtaaactggttttaaaaaataagacttaaaaatatacaaattaaaaatggttaaatgtatactccttaagataattacctagaagtgaaatactaaccagtgttccccaagattagacgtaatgagtcccaccctatcatcttctacttgttttaaagggtatccacagttctagtagggcatgcaatggcactgctcatagtggaatcagatgggaaatatggagaataagacttgaaattgatcatttgagaaagggaagccattcctggaatccatgaaaacactacacaaaacattaaatgggtttgataaataacagaatccatcatttgtgtttaaatggtgtgtggtgaatgggattccttatgttgtgttgctttaatatttggtatgcctttggctttaaattgtaacacttataagaaaagtacaatttttaaaaacgtgggtgtgggagggggaaggaatctgttttcacatcacatctaagatcatgtaaaatatgggagagcacacaacattccctcggatcattgtttcttagggattcttgatttggtagaatcattcaaaggtagcctcaggcccacaaatcacttaataccaccaaaagacgtatacatgaggttgaagagcagaaaacaatgaagtccttctctggtatgtcttgcaaactgcatcctccaggttcttaggtgactgtgaagacatgactcccaaagatgctggacagtctctgacccactgttccccatggtttgctgcagagacaacaattttctacacactactgtgcctcctacagtatggctatcagaatccccttgttcttttttaatgttctttctaactagtttcatacacatagacccatacacatacaaacacacagacacacacacacaaacacacacacacacacacatacataccactttgttttctctcaagtgtcattcaacagtgtgcctagtgataatgaaatcatcttgtagttaccagtttttagaaaaattatttctgttttctctttcatttgaaaaatagctcccaagagctatgaatcaattggtctcaaaatcctggcttcaagtgttccttcagctttggcctgaaggaaagcagcccatctgggtttgcctcatcatgttcagttccacacattccccccaggatgccatgagacatgagcaccaagaacgtgctgtcggaggacttgtgctctggtcaggcagcaaatgcccacagcaatgacttcatattctggaaaagagcaatgtctaactttagtcggagaagcatcacaattaatggggcctcctagatttaccatgagcgaaacaagaaacatatgtaacatctgggtcatggcgcttcacatagtgcttactcagtgatgacagctgttttatggtttcatatttccttcttaatggggctatgggttgccattttcttctctggctgacacaccgtcttctttatatattgtatatttttatatgttactcatttccctttttcttttccatctcaatctttctccttacctaccaagagtcatgtgttataaatgcatcacaccactttctttgtaaaacccatcccagtttgcttagaatcaaatcaaacttctggtctgaccatactccacccacatactatgtcccttctcctccaaacttgagtcatactggtcttctctttgtgcttctcatgtgccagtttcattttcagctcagctctttcacaggtagcttctcgtactttgaaggcactgcattcatgtctctccaaggttgtctccttctggtagtccagtccaacccctgtgttatctccccacggaggctttttcagccaacccaagaacatttttccttaccctacaattctctgtcatgtttcctttttcttttttcttactcttggctttcttgtcactcttatgtagacacacatatatgcacacctgttctctgaagctgtccgttttgcttataacttcactgtttctctctactgtaacctagatggatgccgactgggaacttcctgtctcatttacagacctactcccaatgctaggaatagctttggtcaccaatttagtactcaatatttgttttaagactgtactcctctttaacacttattactatataattttatggagaatcttggggctgcatcccaatcaccagactttgaatctcaatcagaaatgtgaaaactcgtgccaatcatattttgtctagttttatggaattgaggacatttggagcaaaaaagagacataaatttaccaatctaatgctttcattttttgcatcacacacacacacacacacacacacacacacacacacacaaggtagcagagattgttaaactttgttgagcttctataaagctaactagttattagaaggatgcgtgttcaatatgtatgagtttggggtggctgaggggttgttaccctggctgtcagattctcttctacatccacactgtaacccagatcctcaagcagcttcttcatctccatgatggcaaagtcagccccatttcttggaggcagatggtcaaactctttattgcatatgatgagaaccaggcgtatgcggtcctttctctcctttattggatagatctgcaggaggtggagatgcagtgaatttaatttattcaggtttcttttct

SEQ ID NO: 2874 - DNA, 7158 bp, Homo sapiens
actgcagtggcagacagcaacttttattttccccagccaccatagccccactcaatatgacatttagacagatgagccagcaatacagtagttacatgtgtctgggatttgttttttaaattatatgtaccgcttttaatagcctgattacagctgttcagtaagtgatgcctctagactgaagaggaccgaaatgagaagcaggccagctaagagggctgggagcagcacgttccccttgttattgccagctagtggggagagaacatatggccactttacaaagttaagaatcacaaacagcagacaagaatgaatgattaatgctggagttcctggagtatgggccaaagaagttcccccaaaactattgtgaccatgaaatttggaagccaagcataggataccaggagaggttggatagaagcaagatttatcagaattagccttggaatctctgactcaagtatggactatcatcagccattagcaccagacaaaatgcagccactgacaatcttctgggatgccgctaagtatacttgacctaacaactaccagtaaaactttctgacatgtgctttgattctagattatcaactaagaattcagggaaacattctactaaataacatgtcctatgtaagtgagataattataacagcctcctcactaggttatgggcccccaaatttgtacttttcagatctttcttctacgttgcagtcagacacagatttgatcacgccacaccattgctcagaattctttggatgcaacttactgcctataggatgaagaccacactcaggcatttccttgaatgctgacacaatcctaccccaacctacctcacgatcttcctactgcatgcatgctcccttcagatctaattggctttttttcactaatgcctgcacttgacctaagtgaagattctgaagcaggagagaaactggttttctaggcctatcttgagtctcttttatcattgaccatctttcgctaccacaaaagaatcatattctattgcacaagacctagtgggcctcatttaagattttgaacattattccaacaaaattcctaaaattttaagtttgtacttatatcataaagctagaccttgcatttaaaactcacctttagaaaacttgctttaaaaaaacaaaaacaagtaattttgatgaatttggaaattctgtgacttaatcttatctgttatctgagtaagagtttaagcaacagtgacactggaaaataaaatgatatttatgtataaaacaatgataatactatagaatgtcatctttcagggtaacatttgttgagttacagaactgattcattgattgcactaaagttataccattgaataacttgcatggagggaaaccagaattataaccacgggtaaaaattgatatattagaggtgaattttggaagaaataaaaatgtagaaggcaattataaggggagcacttaaattaggtatgaatggtttatgctattgattaaagcattttaaaaatcaataaaagaacactttgtaccaagtagctttcaggaactttcagggaagaccatttgattcagttcaaaagtcagaagcctctgccctaacaggtaaaaagcgtggttccatctcctttttaaaaataaagcaaataactacaatttagagtctaaaatcaagcattaatgatctgctccagtcattttttaaagaagcaagctatattaaaaattttgatacttaatgtgaaaattatatttttatttatattttactacatgctgttatcttctaataacaattcatgcctaatttatgtgctccccttctaactgctttctatttttttgcttcttccaaaattcatccctaatgtatccatttttacctgtggttgtaattctgatgtcccttcttgcaagctattgaacagtataaattttattatcatttttaaaatttttttatgcgttgatattaaatgtttatatttgtaaagtacatgagatgttttgatacagcatgccatgtgaaataaacacatcatggagaatggggtatccatcccctcaagcatttatcaacagtctaactgtcatgcagttataaacttcttaggagaaggatctcttgtgttatataaattataaaatttaatgccatatccttgtacaaggtaggctaacaatgcctactttgaattgtactatattcattcaagaagctttttaaatctcaggctttctgactctttgttctgcatttctcccctttcaactaaagaatatattttataggtgagctacaggtggttgtatgtatgcatctgtcagtcttattcctaggaacccattcgtgatagctctgccacatccatttgacaataaacgactcaagttcaagaacgctaactgctttcttgtcaacttctctgaaagtatgtttaaaacacattttcctgactcatacatttagcttagccaggtcaccaccaggcccggccttgaaagcagcagatgttgacgggttaataaaaaaaagagtatcatgagaagtggtgaccaaagccctctgctcaaaatctatcctaaaaactatggctgacatacttgtgaagtatattaaatgagaacctttcttgctatctaatttgggctgaaattccagagccaagaactctaagtaccctcacattctaaaatgagttgcagagtccttgcaggcattcacagaaggagactccaaacagccttggtgactcctaggtatcacctaccctaggaaaaacctacactgccagagtttggtgcagcaggacaatgggtggttcctttggaaagggtgacctcaaagaagactttggttctcttggactttgcatgaaagtaacagccacaggacaatgtgaatccaacaaataacatctgtggaagtggacttccagaattcaggcatcaagtcataagcaactggccaaaagaggcagcacctatgttggaaaaagtcagtgagaagtctcaggaaatgtgtaacagtgtgtgcatgtgtgtgtgagtctccaaaaacttccccaaagattcagggaagaaggcaatgatttgaatattcaataaaacccaaaggtcacttctgtctcataaatctctctctgaacctgtttccaactttggagaagccagtggcccaggatgttggaaaaaaaaaagtgtggaaaagtgagtggggacattggtaaaagttgaactgtgtcttccctaagatagggaagcaaagaaatcagaaatgttcattcgaatgagagtttgggtgtggaatattaaacagaactactctttctattaactaaaatatgttactgtttattcatacctgagagtgactggaaaagctagaggacctgcaagagataactcatgggtagagaaaaatgaacaagcagctccaaatgatattgaaaaaagaaataaagcacttttggaattttgtctctaatacaccagtttgttccataaatttgttgtatttatttcttagttttgtctaatgcttggaaggcactgttaaaaaaaaattatctatgctgagccatcatacctgaactatcagaactccttcagttgcaaaacaaaacaaaaaacaactcaaactagatttaaaaatagacaaatgtcttggtccacataacttatatggcttcgtgcacaattgaatccagtggctaaagtaaaccattaggattttcttactctgtttgtcatctctgttggctctctttatgtctcctacagatgctttcctctctgtgattttgcatctgttattcctcagcaacaaatataaactattagagaactttcttggatcatgtgcctatcactaatgcaatcactggaaacaagagaagggggtctctgattggccacctggtcctatgcccacctctatgatgatggtggcactggtggcaccatgactgatgttctcaccaaacccacatggagttgtggaaaagtggatggctggaactcaaaagaaaagtgaattgctgtaaccagagaggaaggtaggcaaaaacaacagatattccctacaattacctaagcttgttgtacattacagtgcatagctagccagctgggagtctaggattaagcttggatttctgccctcaatgagtaaaaatatctgggtagaaaacagaagattgcagcaaaatttcccagattatgttctatgatgttttaagaatagattcacaatttcttttacactcttcccttccaacagaggaccattattctgtcctcttgagggtgggctggacctcatgactcacttttgataaacagaatgttgtcagcatgatactatttgacttctgaggctaagtcattaaaaaaaggatagtttctgcttgtctctctcctatcacttgctttgagagaagccggttatcatgtcatgacgactcaagcatcttgtggccagatccacatgtaaatctttctaaactgaaatcttttgccaaaagtcagcatcaacttgccagttaccttggaagtcaccttggaagctgctcctcctgccccaatcgaggtttcagatgactacagtcatggtgagcatcatggctgaaccttatgagagagcccatgctaaaattatccagtaaaactgcttctaaattcttgatccatagaaactgtaagaatagtaaatactgattgtcattttaaatcactacgttttagggtcatctgttgtgcagtaatagttaaataatacatgggtatcccccaagatgataacagatgctctatgaaacaagtcaggtaagtgtggttaagcatgttttagcagctatctttatcatgggacttctcagaaccttaaaaggtaatataattgtcagtttccagagggagagaaagagagagacacagagaaagagagacagatgtaatatgcaatttcttaaacttctttgacaaaaaaatgcctttatttttcatggaaaacctattaatatctctgaaattctagtgtttctaggacatttgaaaaactctagactagatacatgtactggagaagattacccgggacatttttgcttcttaaagagcaacatcatatcttaggtaaaaatccgaataacagattaacaggtccaggattaggatgacacaagtgaggtactcatctcagtaaccacatttaaagaaatgacaaaaagctcagtagtcaaaataaaaatactgtattgcaacatttttttaaaaccaaaatttatgtatgaaaatccatgatgaacaaaatatcaaaattttaaataaaggctaatttaaaatcagtcaaatgttatttcattggtttgtcttatgatcctgcattagtatgcaatgaaaacagttatttctgatcagtcctgattccttgtccacatcgtgatcacattcccctccagtcaggttaatttaacaatagtgtgcaaagagattggcaatacagtgttttacatatattcacttttagaaatgtagtttctattaacttttgcacttggttcaagttatgaaaaaaatattttggtaagtggatagaagcgcgtagtttcccttttgcttaggttccaacagggctcagaagggcatcgtaggccagtaacctttccagtcaaggtacattatatgatataggtatcttgtattctgtgggagtaggagtaggagttttcaggttttctcgtaaagttgacaccacagatgggcttttatttctgaagtttcttaagcaggatccatgacatcatcctgaagctttgagtgaatgtaacacagggcagagagttctgatgaaaaagaaatatctagaacccataaggagatcaagcctgatcagcagcaccatagacacgcaaaagcatcttgcacagcactgtggattaaattttatggtcttccatgcaaattcattgcacaacaaaaatagtttctcatttgtctgtttgttaattcacaaatgaaaaattaccacacagacatttttaacattgaaatgatgccttttttgtctttttctttctttcttcaatctcctttgtgggggcccaacatgtttcacacacattaaaaatagaggtttgcttggtttctcttttgttttccagattaaaagcaaaaacaaaaacaaacctcttataatataaaaggatttaaatcaccaccaagatatgaattacatctgcacgatcagcctcctgttgctatgtatttgataaaacagaaactaatttcactacaaatggtggtttctcttcaggtgttatttcactgctcctaaagcagtgtggtatatatgaaagttattttaatttttttgaatctgtttagtcagctctttaaaatctcctctttggtgaatactacatagtgaaatataggatcctttggcttgccttattttcaaacttaaggtggaggagaggggtctgaacatcgtgacaaaaagagctttaatgtaatgcataaataacattacatatactactgcaaaattgcctactcctctgcagcaattcagcactgtggcatctagttttttagccttaccatatggaactaatcttttctcaagcaaatgtcaaatctataataatcaggtcagtgctgttcatttctcctcccaaccagtactcacctcttgctgagaaggttgagaactagctctgctctaattacaggtgtccatgaaagtttctctcaccttttcttattcccttcaactctctctgacttgtttcttatccccaaaatgcatagtagaaatagtcctgtcactcagaggttaataaacttcctaaagagttagatagtagaaattttaggctttgtggtcatatgacctcagtagcaactacttggctctgccattatactgctaaagtaaacagataacacaaaatgaatgggtgtggctatgttccaataaaactttatttataaactttgaactttgctgaacttactttatggttctatctttgctaaaatggagcagtccacagaagaattaactctttaactaccaatcagtattattccttacagagaactgaatttaacaagatgaccattcagg

SEQ ID NO: 2875 - DNA, 912 bp, Homo sapiens
cgcttaagggtttcaaaatgaagggcatagattttttcattctatcaacccacaaagagtatagccagcatactgaaatgcacattggttgaaggttaaggacttctacaactatctctgctcagctgaaagcggataatgaacaagaacatcaatttgtgcaataagcttttgactaggagataaagtcttggaatcagctttgtgggggcagaacgaaaaagatggatttgatgtcgtgaaatggcaattctaaaactcaggagatatgttggtgtttctgagctcttactccagtgtccacttgtccatagaatcacctttcacttctggggtcagaggacagctcctggaatgatctctcatcttacggcaaaaagatacagtaacttagcagtctgcaaccaggaagaagtcattcaccagaacctgactatgttgggaccctcatccctgacttccagcccccagaattgtgagaaataaatttttgttgtttatcatatacccagtctatggtgcttttttatagtgccctgaactgactaacacatacctcaatcttatactaggtccttcctttgaatatcttcaaagccttctagaactttttttttcctatcaaattacttaataagtcttcattttaggtatactaatacagcagctgtttgaaatatatatatcacatgtaaaagcatggtgttcaaattgagtgccagaaggtttttactcatgaagaatggccagggaacagtaaagttaattgtaaaagacataaatgaatattcattattttacctaattatggcatacatatgtcaattgaacattctgaccataagtgaacaattgaacgtaactgaacattcattgttttacctaattatggcatacatatccaaattatat

SEQ ID NO: 2876 - DNA, 3467 bp, Homo sapiens
gttggtgtcacccatgatggtcccacctctgtcactggccatgaccagctcatccaggtgacactcaggctgctcctgtctttttcagctcccaactctacctcttgccccactgaggaaagctggtggtcggggctggtgatcatcattgccgtatgctgtgcctccctggtgtttctgactgtgcttgtcatcatttgctacaaagccataaaaaggaaaccactgagaaaagacgaaaatggcaccagcgttgctgagtatcccatgagtgcttcgcagagcaacaaaggagtagacgtgaacaacgcagtggtgtgagtctgcaggccctggacccgctggccagagggacaccttggtggcactggtggacatgggaaagcaggtggacatgagctaaccctgagcttgtccaggacttcattgcctcacaggccctgagcctcccgaaggagaaaccattgtcttcccaggcttgcccctggtcagcctgcgggcccaggcagctcggacaccaggctgagcccggcgcagcacctgggcagtgtccccaccccaggccctccacatcctcctccctgtctggtgtctggtctgtcgactgcccccagctgctgtctaaagcatgcgcactggcgaagccagagggatctgtctttctactgtggcagggaggcttccccctttagccaaaagaaagatggtccggagcccactccctgccggaaaacctctcctcctcccaggaagcctgcctgctccactgttcacattctcaacagaagccatcggcacagccagcagacagacgtcccctttcaaaggtgcttcccacacatctgttcatcgccccatctgcagttgttgtcaatcttcagggcctgccttctccctcctatccccactgacaccctacaccctaggctcctgactgcctgccatggagggctgtgagtccagcctgcagaatcccctcctgagcagacacaggagtgcgtttacactcgggggcagtgtctggccttccgggggcaaaacgactcactgaacccgcagcccagggccactgggcaagggcagaggccactgcacctgtcctcagactcatccccacacttgaccccataggaactgatgcatctgtgtgagccaggccctgccttagtcagcagaggccactacttgtgccaaatccactgtgggcctgctgtaccaggctgatgctggccaggcgctggatgtcccccacagtcccctgaggcctgactgttgtactcaggccctctcccagagtcctccatcatctccccattttaccctaccccgagccccagtcgccaagaaggaggtgttgttcttccagggtcttcctttcaatgtctgtttccacagtctcatgctatagaagcgctgagccctccagcgtggttggaggatcaagggatgaaatgggacaggaggagaggggtcctccaggctggtgacccctgccctgttggcctgtctcccaagtggcagccttccctgtgggccacatcaggaaacccacggagacagggtgattttgcatctcctggaaaatgagtgggacactcctggccccctggctctccccaccacccctacatatgtgctcagaaggagcccaatgcattgaatggttccactgtcgagccctctaagacctggtttgcctcctaaacctccagtgtgctcctctgataggtgtttaagctacaggtgagactttgaagtccagagaagacagacacacctgaaaaccggtccccatttgggccgaaccttaaaaagcccattgtcccagagtcctagtgcccacggagctgtctgtgtgtcattgtcctgcccaggtcatcaggtgtgggctgaggacaggcccagggcataccctcccataaaggggttttcttctttcctcatttccttctatttgaggacttgtttggggtttagatttgaattttgcttcccctggacacctgggcatcagcatagtgccaccccctgctcctgacctggccagtacttcacagtgctcttgaggtgcggagccagctgacaaataggccagagggtgtgggccagcagcaggttaaagggggaaacccagcagaccccaccccagggcactctcccctactgccttcagccttctggtgcctgttgaacccccaagctgtgccctaagcagacccctgggcaggaccctagccctaagcacacaccaccctgtgctgcaaccatgagaaagtgcccatgccttgggctgtccagaagctcaggagtgatcagagggcaccttctctaagaggggaggttcctggctaagggaccatggagtggtgggcagcctgaaggggctgggcacagcccagctttgcgcacactcgcctggtcccatcattccctaccttggcttaaacctaggaggcctggattttgcagttagcctaatcttccagccccaggcgaggctccctggtgaggaatcagctgagccatcaccacgttttggggcctgtatcctcttccctgagccgctgacgcatccagggctctagtctgcacataaattccctctcagctgggcttgtaaaatcccttctcaccccagttagcaaaaatcaagggaagagcctagtttttttaaaagattcacttaatatccaccccccacctcaagcccaagaccgcccattcaaaaaacaagtatacggcacagcaagggagacccactagattttgagcttacagagacataagggtacttaaaaccctgccggcctagtatttgagcttagaacttttatttaaaatgagccggcagtctctagacacacaccgatcctcaggctagtccgagccctgaggtcaagaatgaaatgcacttcccttctcattttctcaaatagatcttttccagccgtctcacagttgaccccaactttggaactcagatcataggatctcccagaggtttcaggtgttcctaagaagcttctaaaggaagttttggaagaaagactaataggtgtaaacatataaacatatatattatatatagctatatatatttaaagagatctctacatatatatatatatataaatacaactactgtactctctgcatctgtacaaagtatgagttaaactgcccaggtagtgtgagatacgtaatgcatgaatgtgaatatcctgaaatctgccttcttagcaacgtgccgcgtgtactggagagaggacagttgctcctgggagttctctcaatgggcaaatgtacaagttgatgccgtcttatccaccaacaagccattaaggttggtttcctgctgagacttttgtaccggaagcgagaccggcagcactgggggtgtccatatgccacttatgaggaagaaagcaccatgacttttttattttcaataaaaatatagagatgtc

SEQ ID NO: 2877 - DNA, 6984 bp, Homo sapiens
gtataatttgggttgttcacaaaaatcatcgtgtttgtttggcgcattcaatttaaaagtataactcaactcacccattcattcagcacatttatggagatggtgtgggaggcagagtgctcagcctgaaataaaacaatcagcgcaaactcgctaattgaacttcatttaaaacggttgacatttttcttacaaataggttgacaagctgctgaacctaaggaatccagcatcttttgattcttgtgggttgtattggtgagtctgtttcaggttactgggaggaggcaggtctggcttgtctttagtgacaggcttttgttgcaaggatgcgagggaatgaagggtgcagggaaaccgtattctccctgggtcccagggcttcccaggttggactctgcagaaactgtgactcagtgttgtttgggtttcaggctgagcttgaataagctgccctttcagtatgcccttcatagtcctgtatccccaaagagcatctgattgtgtcagcttgtctttgttcagtaagaagtgaccacatagggcagggcgtccctccacgccatctctgaagcataaggtcattacgacaattaaacgagttaaatggagagtccttagaacagtgttttattcaacacatggtgagtggtgaatcaatgttgtcattcttatgaaacaagacacaacgcaagaccctaggatgagagtgggagagtgcaggaacgaagtgtaaaatctaaccaacgtttgaatattctgattcaacctcatccagatataaattgttcaagagcctgctctaaaggtgatctgggctttagagtggaggcaagttcagaagagaagcagcatgaccatctcttaggtttctgccttgggatcatgggcccaagagagttgcaccagcctgaattggttgacaacacaattcatgatgtatattgacaaaaaaaattccacttatacatttagattctgcaaaatgttgagttttatttgatctgaaccatttgctagagagtatttggatagattcagatgagggaaggaaaagaaaatggctttgccagcgacgtgcagtgctcagcggagctcgggggagtcaggctcacccagtgctcagtgccccacatagatcacctttgtggagcacatagtatgtgctatgtgtgagcccctcaactctcacattctgaggggaggcactgctattaatcccattttacagagggggaaactgaagcatagagataaacagtctgacaagagccaatgttcgtacccagcagtctgacttcagacacttttgggtctcaagagtctcgatttctagttttaatttaacagcatcactgtaattggtgaagtcttttgttcttctttagatctttggaagaatgctcagcttcatgatgtcacagagaagcacagttgattgtgctctacctcagtgtcattttgatcttccatgttatgaaaagcgttggtccgccaaccatgaattttacctgagcccttctatgcgccactcacagtgccatgtgtaaagcaattgtatgccacccccatcctctgcctgacattcaggaattttacagctgatacattgtttagggtatctgcgtttcctttttctatttttctatagaaaactgattccaaatcacaacttttttttcttcccccaatcccaacatgtatctgtaaatgtgtaattgttgtgagtcacattgatacttcttttagagattcctgtgtatattccaattcttgaaagagacctactcaaaagattgcctcatggacaaatggcataacagccttaaggatcttaaggaaaagcaaaataaaattaaaaagacttctgcccatgcgtattgtcaatcatggacagagatgttaaagaaaaagtgctctgttcttttgcaagaccttggatccttttttctggcattcttgggtcattttcctctaagtcaagtctttcagagtatttagcaggcagctgctgatagtatttggttcacagaggctgctgatgatgagaaaactttctttgtggaatccaaatgcctccatggaaggacagcttctgcgcagacgatgctgaaaagagctgtttgaacttcctttatccttatattccttatgtaagctcaaggacatttgtttgtttctgtgtttgttcttaaataatgttttaagtattttcctctttgatgtaagagcaacacatacttattattgtggggaatttagaaaccacagaaaacgataaagaggaataaaaaaaatcattgaaaattctcttctcccactattaacctttggtatatttccttttggtctttttttcttgcttattattatcattagtgtttataatcattataattacgtatccaggagcagataaaacatacaatttcatgtctagttttttccaacattacttaatttctccaaaaacatcatttttatggctgtgtaatagctcataatgtgagtataccataatttctataaccatataccaattgttggaatagtttaggtcgttttcagtcttcacaatagagtatttaatgtctgcaatatgcttcttacataaaaggatatagttggtcagccgataacatttggaaattaatacttcactagagagtatctgcaaatgacttttccttctcaaactaatttgctagatagaaagatgtaaatgtttatatagaaagctattgtctagcttatatctatctccatcttctctgagcatctctctccctatctatactcacatacccacaaatacactaagttattataaatgtgtatttatatatttagtagtagcatctgcttcacataaacattatctaactttgagaaattaaatgatccctgcagagttccaaaagttgggtcaattatatgtgtgcgttattatttattctattatttgctacaaatcaagctcagttgatcatttccatgtcattagaagataagtgtatctttctgagggctaagggtcatgctgagctagaaggttgcaaggctggagaggaagtgccttctctccagcgtcagcaaaggctgcggacaagcagggcatgaagcagggcatggagaagggtgagccagctgcccagttggctatggcactgagtgtgtgaaggagggaagagagaaaggagattgtgctggtgaggagagtcacacaggaagggcctaaaacctaggcctttggtgtgcacttcactctgacagacagtgggaagccacaaggcttgagcacggaggagagagaatgaggttggctttagcagaagtcatctggcaataggatatgaaatgaattggagcagagaaactctggaaagacagactctggggagtggatctgcaagagggaagaagaccaatacttactgagctcctgctgagggccagacagcatttcatgtaaactatctcattttaccgcctgtccatagagatgggaaaattgagacctgttgaaagtcacagggcagaaagcgacagagacagtgttaaactgaaaactgaagctcaggctcacttgactatgccgagctgcctgggttcaagggaagaagggcagagtcagagcagaggcagcatctccaggggccgagaggaggagctgcaaaatctagttactgtagaggcaaaatcaggtgaacttggcaacctatcagaaatccagggacaaaaaggaatgaaactcaaaatgtccctgagatttgggggacagacagattgcgaggatggtgatgccattgtcatcaataggggatgtgccctttgatagtgaagatgagaaactgggttttagaagttctgaattagaggcacaggcagaccactcaggttagcatgtccaatcagctgtgagagatgtggatcagaagcccaggagaaagattggcaccactgatggagatgtgatagacataagatgcatagaaatgcacttctgattcatgtaagttacaaatatatatgaatgaagctaaagcacaatgtaatattataagcttatataaatgtaaactctcacctttcaatagggagaatattctttttaaattctttgttgagtcataagatctgagagccagaaggagccaggtttctgctttcttgcagttccaaaactttgagtcttgctgtgtgttctcttgtgctgagtcttctgagcaggcaggacagtgagttccttgtttagccttgttaacttcctcaagaacatgtggaggacacaccagtgagtccgtcctattcatagacatcggaggtgctgtcccaagtccagagacattcccaccacctctacatccaaatcctacaagcacggaaggccctgactctttttcttttccagtgacagagaccatgtctccagaaggcagaaataaatcttgaacttgggaattattttgtgctactgagtaggaggacacaggaagtataaagactccatgagctagtttcagagaaatatcttgcctcttgctcctttaggaatcacctggagagcagaacaggctggctatcaatatataaacatcttgccttaaatattttacccatcatactttaaaaaatccacgatccatttagttttattccaacttggaggtaaatcaaacacaccgtttcctttgggagaactgaaaaacaaaggctttgcccaaatgtttctcattttgttctggattttcacatatctgccaatgaccttggcctcattagtgagcaccttattcaagcaggcttcgatagcctgccacagaacaaagacaacatcaagggcagagggagagattggcacacatggggctaacggggtggggatgcttgtctcttgtagaaccagacacagagtacataacgagcatttacttaacaaaagacccaacagcaaaacaccggcaaaattcaacagtgactgactacacgtgaagcatgaaaaatgtttccagtcatgtgagacgcttcaagcatagaaagcaaaccatgcaaaatggaaagcgttggaaaacataaaagcaaagccattagacatcacttttgaacaaaacaaatagaaaagcctttctcatcatctgcctgtaagtgagctgtgtacagtgcactgtcgacggttcctggcacatagtaagtgctgagtaaatgtcagctccttcctcccttgctacctcatcatccaggagagacactgtgggctgctagtcattcatgctcctaccaaatggaatagatggattccttcatcccatagagatttagagcttctgctatgtcttagatgctgtgagagacacaaagaagaaaaaaatgcagcctctgttctccaaacaattggatgactgcctaagatgtgggagaacagtaggaaagaacacaacaagagaaccccaaggctttctggaccagcggccttctcaagacagaagggctggtgtcttacccatctttgtctcttcagggcctagaataatacctgactgagagatagacctcagtgaatgaacaaatgaatgagtcagtgaatgaatgaatgaatgggcactaagtgaggggtcccacccacggtgatgctacatgattggcacttcttacagaacgggtgattctagaggagctgggagtgacttgggaagaggaaaggtgcctctcacctgtaaactcatccacttttctccctaccccccacctagcaagctgtgttctctcttgtttcactctccactagcgccttccactgaatgtgcctgtgtgggtgtacctgtacattgcgtgtctgtttctaagcctttttgagcacttacatagcagttactttgtgccagcctctaagtaatatgcaagtataattctcataacaatcttgtgagataggtactattattagaccttctcagagctgaggaaactgaggcccaatgatattaaggtcacatgactagtaagaggtagatccagagcttaagtccagacagtctgactccaaagcagtgtcctttaccgctgaactctgctgtccacgtttatcaagtagaaccaggaagagcttccctcagtttgcctgtggtctgctatattgacttggatgagattcagagcatgggaaaggttaagtcccaggtattaggttcatcctctctgctaagtctttctcctcttcatagaaatatacttaagtcttacatcctttataaaaaagagaagtcctccctgactctgtgttccatccacactcactgctgctccatttccctcctcttctctccagccaggctacttgaaagcatactagttaggagtgactttcacttccttacctcccactcatccccagtaacccaatgaaattgacttccactaaaagagcccttgacaaggtcacaggggacctcttctagttataaatctagtaggggccacgcaggaaaaaaaacatgctgtagtagaaaccatgcttcctatcattagcacaatgcctggcacacaatcagcactcagcaaattgcagttgaaggttttatgatcttatgtcttatttgatcccagtaacattagccatcagtgaaacctgttagttccttcacttccatggtgacccttatgctaggtttgccctacacttttaggtcatctgggttcattctccttctcttcttcttcttatcccttaaatgtcggtattcaaattctattcttacccttcttatcttctcactttatgttccatctctcgaaaagcaggcattcaatcctacagctttaactacgtgattttcaagtcagtatctcaagtaataattgctcccctatgtgctagacttgtacagccagtgccataaagggcatttccaattaggtgtgtattaggcacttaacgaattaaacttgacaaatttctcttctcttatgagatttgtccttccatgc

SEQ ID NO: 2878 - DNA, 6021 bp, Homo sapiens
ctgcgggagctgcggcagctgcggcctctgggatggagagcaatacatcatcatctttggagaatttagcgacggcgcctgtgaaccagatccaagaaacaatttctgataattgtgtggtgattttctcaaaaacatcctgttcttactgtacaatggcaaaaaagcttttccatgacatgaatgttaactataaagtggtggaactggacctgcttgaatatggaaaccagttccaagatgctctttacaaaatgactggtgaaagaactgttccaagaatatttgtcaatggtacttttattggaggtgcaactgacactcataggcttcacaaagaaggaaaattgctcccactagttcatcagtgttatttaaaaaaaagtaagaggaaagaatttcagtgatgtttatactaataagtttgctagtacagtgtcagttatttaaagtggtaatgcccgataatgtcttttaaatgtttgaggatgttttaaatacatgcattgtcttcacgaagaagatgtaaaaataatgaacaataaattgcggtggaaacctcttcttcccacttgccaattcttgagaaaaagggatggtattaaaaaaatgaaaggttggagttgtatcaagataagaatgtattttattaggaatttagatatgaattttacaaccaagagctagaaggtaagcatttggaattctttatttcctattcaggagttaactctttatctcacatagtttttaagtggtaaggactgatatttgatttctctttaaaatttaaggcttttgctgatacacttgtgaactaggcaggaatatcttatacgatattgtgaaaagccttcacactttgtacttgtagagtaatagaagtatattaaatttttagcatggaatgaaatttatcttagagaaactaaattactcatttaatgacttaatagttcattaagtcattaatgacttaatagttcatttgtcattaaaactatacctatgggcagaaattaaaaggagaagatttcggcattgtatgaggatgaacttttgaaacagtgtagaaatgtactttagttggcatgggatggtggctcacgcctgtgattctagcacttagagaggccaaggcgcaaggatcacctgagctcaggtgttggagatcagcttggtctacatagcaagacccccatatttacaacaaataaacaaaaattagcctggtgtgatggcacatgcctggagtcctagctactcaggaggctgaggcaggaggatctcttgagcccaggagtttgaggttttatatatatatatatatataaattttgaggttttttatatatatatttttggaaagtagaactctccacctcacaatttaacttgagtacatttcatatatatatacacacacatacacattttatatattaaatgtacttgaattagattgtgaggtggagagttctgctttccagaatttatgtgtattttatttatttatttattttgagacagagtcttgctttgtcgcccaggctagagtgcagtggcgcgatctcggctcactgcaaactccgcctcccgcgttcaagcaattctcctgcctcagcatcctgagtagctgggatcacatgtgcccgccaccgcacctggctaatttttgtattttttagtagagacggggtttcaccatcttggccagactggtctcaaactcctgacctcatgatccacctgcctcggcttcccaaagtgctgggattacaggcatgagccaccgtgcccggccttatgtgtattgtaatacatatatatatataaattctggaaagcagaactctccacctcacaatttaactcaatttccaagagcctttgaacacttaatgtgttcaatactgggaatactattcaaactgatttcaattcagctaaacttagcaaacaagatttatcctataggaagtcttactttacaatgattgaagacgttcagtacttcattaatgaaatcgtctttccagcttcctatcaacaagaatttttaaagtgcctactatacaaagcattttcctagttgatcccacagagtcacttggggcagattaccagatgctgagaagaaaaaacccttcatcagaggtggaggaaaaatggatttcaagagtgcttctggtttttgtcaggatggaccagagaatctggaacagtcctgaagaaaatagctggtggcttccttggccttttgccatcaatgatgcttcttacttggatttaaactgccattaggaaacctcttgatcaagaatttagacaagaatttcattcccatgtgataatttaggttataacactagaatggaacaaagagtagaatgtctttagttctttattttgcattatgtcataagaaagttcttgctatgttgtaaaatcgttgttagattcaggcttttggggattctgaaaacacattttgttagagttgaagtctattacctgagaaaggtaaaattgtgtcataattgttcatcatactaggtattaagggtagagacaagttacttcaaggtatagaaacactgaccagtactcgactgtgaaaaacatctttacctttagcattttttttttgaaacagtctcgctccgttgctcagactggggggcaatggcgcaatctcagctcactgcaacttccacttcctgggtacaagcgattctcaatcctcagcctcctgagagtagctgggactacaggcgagcaccaccacacttcgctaattttttgtatttttagtacagccaggatttcgccacgttggccaggctggtctcaaactcctgagctcaggcgatccgcctgccttggcctcccaaagtgctaggattacaggcatgagccactgcacctggcctgtgaagaaacatcttttatcaatgcttcctagactggtaggacatagggtgagaggcgagtggtggttcgttcttgattatgttcagatcttgaaagaattcaacattagggagagaagccttatcaaaagcctcaaaaactctactgaaggtaatatgatacctgattctcactatggctttatttaaaatagaagaaataaacccttctaatatctgcatcttagtcttctgaattaaactcattgactaataaaagatttttactttggagggtttagcactgcatcaaaaaggaagcagatctctcctatttgttaaacgctaaggaatgaaagaaaataacaataaatctgacctctttttgtcatatggcacattaaatatctttgaaaaaaaccccaaaacaataataacaaaagcttgccgctctaaaacgtttaaaatatcggacacaataataaatttttaaaaatgcaaggctaagcaggttttaaaaagtatagggactctccaagaggaaaacaaaaccaggagcagaatccaaggatatagggaagcactgaagccagcagctcccttactgacagtgccaatcgtggaatgccaacagctttagttttaactgtatgcaaggggctggttacaaagctgggggttaagggagaaagatttagataggagaccacagcataccaccactaaatcttcagttaaaaaaattcgtaatatactttcagagcatagctgatgatttgccaagacagacaagcgttcagatcactaaaggtgtaaccattaggtaggtgacttaacctcccagaacttcaagtttcttataaaatgtaggtaatagtactttcctttaggatttactttttgaggaatggagataatacatgtaaatctttcagagtggtttttaatagacaatacataatggctatcattaatcacaatggttcaggtatgtgtgttttcttgtggacccatcagggttttccaagattcctgcctgtacccagccaagaatttagggggcaggggaagcctctggggtttcgtgttgtcttggatattgatttccatttcttctccctttccataccttacagctggataaaagtaagataatggtgactaagaaaaacttgtaatttttttcctcagtccttatttttacattttttatttacatttttttttttttttttgagacagggtctccctctgtagcccaggatggagaacagtggctctatcatggctcactgcagcctcaaactcctgggctgaagtgatcctcctaccgtagccttctgaatagctagggctacaggcacatgccaccatgctcaactaattctttttagttttttgtaaatatgggggtcttactgtgttgcccagcaagatccccatagttacaactttttagttttgaactcctaggctcaagcagtcctcctcctttggcctcctgaagtgctatgattacaggtgtaagccacaatgcccggccctttattttaagatctgaaatacgagctgtttactggagttcattaatataaaaaactaggccatttttcactttatcattagataatcaatttacattttaattgccaaaatatctgtaattgaaaagctgttgaagaaaaaaagggatcttctgtacctggattttactgtttactgataaaaaattaccatttgaacaacatcttttaaagtcaggttttcttcataaggtttaatattgttaaaatttattaaatctagtatgtataatttgtgatccttcttgtacaagtgttgaaatgagtgctgtaaaatcaaccaaatgttttgaagttttggtgaatatattctgatgtaacttgctttcagttacccacagttcagatcttagaacttttcagaaaatttttatgggaattgagagaaaaatgtctgcaaattggcactgaaacagtgtttttatttgcatagttgactttttgtgtttggatgataacttttgccaaaggcaattttgagtagatcttttcacaaaagaatcctattttaaaactttaaataatttgttttcattaaatctaatcattttgttataattgaattccatgggtaaagaatctttaacttcatatacttttaatacttacataaaactagatacattaaaaggtcaatattaattatcaaaacttaaattttaccttgttcaaatacaagattactaaaggctttagattttttaaggcatattataaccttaacattcgtatttcttgaaagagatagacagacacttgtttaatgtgcatagagtttatttggtacatctatcaatttctacaataactgaccaaaaacagttcacacagtgtccacctgcactccatgtctaaaatgatttatttagtagggtattttgcaaggctagaaaggagagaaaggatttcacagtatcagtgaaaactgttttatcatgaaacaaatgtaatacattaatatattcattcattctctattagaaaacagcaaaattacattgttagttgtattatttacagtgaaaacttggaagacttgacaaagcatcagttagtttatcaacagacctaggaagctccctgtcccctcctttcagggtcctttccttggaaatgaaataaacttaaatcagattttacataactttaagcaccagcttgacaatttaaagttttatttcagttttataaaatactcctgctttgaaaggcaaagtgaatgtaaaaatgtgaatgtaattaaacaagtcactggcctggaaactttttattgcaatagtctttatgttttactactatattcacttcttggaatgaatttgcttgtaggtttgaaacaaaatatttgccttttgtcttgaaaaattcccttaaaaaattaattatttttggaactgtacaactacattttcattcgatgttaaatatgcaacttggtccttggatatcatgttacaaagtccaacctgttggataacttgttatagaaaacaataaaaaaccttaaactatcataaaatattact

SEQ ID NO: 2879 - DNA, 1427 bp, Homo sapiens
gcagagatgaaaacatcagtcaggctctggggaatctgagaactctggggctggtgctagctcctctaggttcagcatgacccacagctaagcagaggagcggaaggatggttatggagagtggaagtcctagacaagaatgaacagtttacagccacttgtagaactgtctgtctctttccagtatctgaactttgacgatctcaaagggcatctctgggaatttttgagtgtcagcgtgccactcaaagggtggcgggaggggcacctagcagtcagtgcagcaaggcagacaggacccgcatgccagcaccctgcctgtctgatgacactgattccgaaaggggcactttctcatctatttcctgctttggaaaagggcactccggtcattccagtcaccgaaacaagagattttggaaattcatgccgggcagagtgctgggcatggggaatttggtggctggcaagacaagccgcttctgtcctcaaggcctgactctgaggccaaaccatcactgagtcagggcccccagagccctgcatgttgaccaccgtgtggatggacaccatgtggatggcctctttcaacatcttctaactcagctttctcctgcagccagtgagctctctccagagataagtgcagtcatgcccttaccatctaatacacagcagtttttcatcactgacagaaaatgtacaaccttaacccatcatgacttacagccctccatgtctgatcgtagccccaaacacaccatacctttcacatccgcactgcatccctgcattgtaccaccagccagccaccttcctcctcccttacccgctgggggatttgcacagtcgctgtagaccccagcctctgtgtgaccactactttgaagacttcctccttcaccctcttaggaatttagcctttctcacctaatatttgtctccgctcattgaacatgaagtcatggtttctatgctggttgttattctttctgttatttacagtgttttttttgttgttgttgtttttttttaagaaaagagtgtgttagaaatactttatacacaccacataaacttgaagtctctctgaagaaacgtttatggtttagaaatttatgatacgaggtttaagatagtctatttcatctgatgttttgcctttttctcatgtcaagtgttacctcactgttatgaatgttgccacactggctttatatagccaccatctatcactcttctgtttgtttagtaaacatctatctccatctatctgttatctatactctatgaatctattgcctatctgccagtcacctctcatctacctatccatctcaatgtttgttttgactcatttgaaaataagttgtcaacctcacaaccacaagaaaaagaaatcttgcttccatctcaatcccttttgt

SEQ ID NO: 2880 - DNA, 4119 bp, Homo sapiens
gactatcagtgtgcagatatgcatttagaagtggcctctatgggataaggtagagtcttgtctggagggttgatacctttaacatgacactgtagaggaaagcagcattgataataatagatattggggaaagactaggttggaaaagaaataagtgacaccagatgattgacatacaacatgaagattttaaagcctgagttgaaactttcattataattaaaaaatatatattattatttgttctggaagttgttattgttgttttgttgttgtctgttaagcagggtttttgaagggacctgattcttacaggaggagaaaggagtttactacagttaagagtctaagagaaaaatctagggtggatatagaataaagtttcttcctttggatgcaaaaagaagaattttggctgatcactgaaggatatacttaagccagttagaaaataacttgctcccccaaagatgaaggatatatagaataagaagccttgagctggtcagttaagcaggcaaaagaaagagaagagagaggtgagaaggcaggaaggagaaataaacgtggccatgaatgctgaaaccctctgtatacttgtaatttgccctatttgcttgatacttgtaccttcatattcttcttgcagctataaaatcgcctgagcactttaaaggcacagatgagtgcaccgtgctggaggagatcaggctggcaaggaatgaaaatcatcagtgaaaggccagggaagaaccccgggtgcattgtctttagataagaatctctgctttctgaaatgcaagacagacagatattgaaagaatagcaaagccaactggttcatcctaagggctatgtttttaacatagatgaattactagtcaaggagagggttacatcaggagggttggaagggaatggagaaaagattcagaagaatgagcctggaaatgaaaattaaaacaaagagatgtcatttgtcaactaccaaattggtgaagacttacaaagaattacagtacccagcattttctaggataaatgaagaatgggactctaatttatacattactagtgggaatattcatcagcacagactttctggactcaaatttggcaatgtgtgcagaaagccttaaatacgtgtactttcaaagccattgttttagttaggattagttcagctgcgtgtgatagaaaaccaacttctaaaatgactgaaacaagataaaagtatatttctctttctctctggaggtgggcagtccagggctggtttggcagccatagaaggtgatatggacccagagacctatatctttttgttcgatcgccccagcaaagtcttctcatatcctcggtggctcctttggctccaaccatcctgttagaactctgcctgaggaagaccaaaagcagactttacctttaaataacactttgaaaagttgtactttactacacttttacttctagctcaatgcctagagcttctggttgaaaaggtggctggaaaaaaatgtagcctttatgtaggcatccatgtgctcagcaaaatttcagtgatcaaataataaaagcaaggaacaacgagtgagagcagcagcctctgacctattccacttttatttatataaggaagtactcagaaaacaattcaaaagtgggtatacacacatttattgcagcactatcataatacaaaaaaatagaaatcacttaagaccccaaaaaggaagtagttcaataacttataatacaaattataatacatacatgtataggatactctatagccattaacatggtatataaaaggaccaggagctgtggcttacacctataattccggggctatgggaggcaaaagcagcatcacttgctaagaggacttcaggaccagcctgggcaacatagtgagacccagactctaccaaaagttaaaaaaaaaaaaaaaaaaaaaaaagccaagtgtggtgctgcgcacctatagtcctaactactggggaggttgaggcaagaggatcatttaagcccaggagatgaaggctgcagtgagccatggttgtgctactgcactccagcctgggtgacagagctagaccttgtctctaaaacaaacccaaaccaaacaaacatggtatataactgaatttcttgatgtgaaaaagtaattgcgatgtgttaccaattgaaaagcagtttacaaagtggcatggctactatcattcatgtttgtaagaaaaagtctaaataaataaaagtcagaatagatatacgttaaaatgataatctctattgattggaggaattgttggcaattttaattttcttctttgtactttgtaatttctgaatttgtcaccaatgactataaatgtatatttaaaaaaaatcacacaccaggattctatacctattttgcactgccaaagatacacctttctttaaaatcttgctatttctcgaactatcacagtatttgctcctccttccacttttgactgtttccatactaatcatttctaaataaaattaacacatcaatttccctataagaacaactcttaccatactatttctgttaaaccataaatactctggaattgcttcttgaattaaaataaataaaattttctttccttgaacttcaaagtttttcacttgatactcaaaacctactttgttcatttcatcatgccaatgacatcttccctgacaaatgtgttattagctggtctcaaatacttccagtctttttctgcttccaggtctctatgtcagaaatactcttctttctctatctttcaatgttaaaatccatcttccataatctttaagatccttctcaaatagtgtctcccctgtaaagcaattccagtagatgtaatctctacaaacttttcacagttgcaatggttatcttcagtattatgtaaaagctattttgaggcttgtcttcttccttttgttagaatcttgcaaattctctgaagcccagactttaagttattcatctttgcatcctccattatacctatcacagaacttaagtacaataggacctcagccagtgttccaggaaataaattaaattgaatgaaatttccatacagtgataagaaggagattactgctgcccacggggaaaaaggagaacagaaatgggaaagccgtattgagaggatgtttgagaactgtgaaagacagaaagcagaccagattgccatgcctaaaccactttctttgaagtttatggaagcaccactgcatttatgccagaaggtgaaagtccagaacaggtgctttttggtttgagaatgagtgttctacatactggcctgtaaggcagtgctactccaagtgtggtccacaggctggcagcaacatcataggggagtatgttaacaatgctgattctccagccccagctccggactctgttttaacggtctatccaggcatgaattctactcaagtggcctgcccctcagcagaagttggacaggtgcttatgttgcaattaacaaaaaggatacatgctgggtcctgcagtaaatgtctcccttggatcatgaagtctttttaccatgttactggaacacagaagggtactattgagaaccaactaacttggagccgtgtatgagccactgggaatagactaaatgagataatcaacgtcttgatctcatattctttcattctacagaaggaagcaggcaacaggttgcaatacgaagtggagttaaagcaactagaaggaagtgtcagtaaccaagctgagagaggctggaaggaaaacaattcatgcagcagaaaagaaagccttttgagcactgtgatgtcagaaggtgacttggaagatgatctaaatgttaaactggcagtgaagcaacccaaccagcaagttgcttttgctgttgtcttttccagatgcgcagaggttgtagttctgctcccctccccgtcaggtttgtgctttttgctattctctaccaagtcatgcatgtgttcacctctgctcctttgcatagcattctccatttctaaagctcgctccttggcactaacctcatttaaatcaaacacatttctctctaagtccctttctctatg

SEQ ID NO: 2881 - DNA, 9689 bp, Homo sapiens
gaatctttgattaaagtcgtaatcgttgccgattcagtaaggagggggagttggatgtcagaccagacagggctgtgagtgcagacacacggagagagtgggttcgggtgcacacacagactggcccttactgtgttagacacacaactaattagtaccagggtctgcacaggcctccactcccttgagtttgatggggctgggggccaggcagtccgcatggctctggcagtgaggatgggcaggtagcaatttccccaactgagaaccctgggccttggcccatccccagatctgcaggtgagggactcgctggccgagcctctgagccagtgcaacaccccatagattggggtgaactggtgtcaaggcacgatgccactctttgagcttctctcatctgattccctgatggaagtgcccctctcatggcatgggtgcttcttgcaaatcttccacccatgagaaagtcactgatcagaccccagcatccgctcccctcagagccctaaaaacccctcagagccatcagaacagatgagaatttatgtgggtacaggggcctaactttgggaggggggagctttggttagtggcccgaggaggggagagacaggagagagtaaaatatcattttaaaaaggaagtgaaggcacaggcatgcgagtctataacgagaaggacaatttatgcccaggcacgagcgcagtttgacatggggataatgcaaaaacgtaggtcattgtggatgacttaaaccttcagcagctgaagaaaatgtatgaaatgcagaggacattacacggttggcagccccgcacatctgcagagggacaagtgaaatacagtgggccattctttaccataaactgtggttgttggagatgcagcccagagaaattgtaattacagtgacaagacgaatcagcgatatttaaatattcatgaacaaagtctggggtgatcaatctatctttattgtctgcgccttcactcctgtaataaataagtagctggagtcctcacctttcatcccccaagccccccactttggatatgaaaggcaagatggttattctccacaccccaacctctcatgctctggagatttaagagtgggatcctcaaaaaagaaaaggcagttctctccaagtttcatagacccaccatttcctgggtctgttctggatcctccctgtgcgatacactgaggctacaaggatgggtgaggcttgcttcttatcctggtggtgcttccatgctggaggtatggtgggcaagccagtagatacagcatagtgtgtcagcaagctgacaagtatatggtaccctgactctagagccagacccaaacctgaatcccaactcagctccttacttgccgtttcaccttagggatgatgtggaagcatctcatttttttctcaactgtaaaatgagactaatatctttctttaagtttgttgccatgatcatctgatgcgatcacatcacacatctgagtgctcaggaaatgtagcccattttaatgcgaaagtggcataaaaatgataccacactaataacagaacaaaattctgggcatttcttctctttggggacacagaagaaagtgtgattcattctgcctggggaactaaagggaagcgtccacgcgggggtatcatatgagctgggctttgaaggatgattaggagttcaccagggagaaaagaagaaatcgagcagaggaaacagctatgtaagactgtggaggaaggaaattggggactgtagaaggtgtttgggggacaatgtgaagttcctcaaattggagagatttctttgaaggttggggagtcaggctggagtgactttcacccttaacctaaaggaaggggagaagaggtcatctgagaagcaagatggtgaggtctcatgtatccacaagggggcttgctttctggggactgctgtccatccctgaaccaaatgggctctctttcccaggactggcccttgccccacagatgatcatggggccacagtaaagtatggtcatgtgtgaagacaggtattgcttgtttattcaatggaggtgtggccgtggatccttaagttgtctttggaggtggtgaatacaggccgtcgcatccttctcatgcacagaatgtgccctactgtcccctgaagagggggcagggagaggcaaaggcctgatccagccccttgtctccacaggcgaccacccctacgagtgtgagttctgtggcagctgcttccgggatgagagcacactcaagagccacaaacgcatccacacgggtgagaaaccctacgagtgcaatggctgtggcaagaagttcagcctcaagcatcagctggagacgcactatagggtgcacacaggtgagaagccctttgagtgtaagctctgccaccagcgctcccgggactactcggccatgatcaagcacctgagaacgcacaacggcgcctcgccctaccagtgcaccatctgcacagagtactgccccagcctctcctccatgcagaagcacatgaagggccacaagcccgaggagatcccgcccgactggaggatagagaagacgtacctctacctgtgctatgtgtgaagggaggcccgcggcggtggagccgagcggggagccaggaaagaagagttggagtgagatgaaggaaggactatgacaaataaaaaaggaaaagaaaaaaaaaaacagaaggaaaaggaaacctggtagctttttggccttggattctctctgggctccagatgacctggatgccaagccactgcccctcctctgggggcctccaccctcctctcccggctggaggtttgcctgattttctgggatggggttgggtattttgttcactcaaatggtggcacatttttctccttccttcacccagaccttcttttatgtgtccagaaatggaggctagaaagcaggtgagaggtcctctggtcagagccacacggtctgtgccggccttcctccaccaagacccccaggagatgaagggagggaggaggtgagccagaagggcgctcccctgctgatgggtctgggctgggtcactagctgctcaaaatggcagctctagtttgctggcggctgactggggaggagaagggctctgtttctcttcccaccactcagcccacctgctgctttcctctgctttgccacatctgggtgtcccccggtggtctctgagagcctcaggacccctgcccctcctccagctctttgttcccagcctccccttgactcctgtcctccaagtcccaggggagtcccagcccctcagggacctggcggtgtctccatccttctccggttccctagtgggatagctgcctctgacttcagggtccctcctaccctcagccttctgagaacacaaaacaaatccaataccccaccctagtccagcaccatcgtgagcaagattcctgctgcgctgcttccaaaatggaaaagcatcacaactaaatacctaatatcctaccaaacaaaccacagtccctacgtagccctacttcagtcccaggagaaggaatccatgaatgggctgaggttccgagggtaggttgtggatgtctttctctagaggggtcccacacctggaaaagaggacacccagcccgtgggatgagggaagctgggcaagggagaaagttgttgagtcacactggggaccccagatgtagtgagctcagcaagaaaagccaggtccagagagagtcgcacagaattcctgactcacagcgcccctcggtccacagtggagaggaggaggaggaggagcagaaggagggggaggagctgcaggaggaggaggatttgaaagcgctttggccttgtgttatgttttgcttcttttctgtgtcccctgttagcacattgtacttgaattacctcagttttttgtgacctcatgagctttcttaacctctgtatctctttttcggttggggcttggaggaatggggagggtgttcttttctgtttcttgtgtaaattaatagttgtttttatagacttcagctggtcaagaccctccccgtgcccctggagaccagcctcccagctggcaggaactgtgcaggaggagttgatactcaggatctgaatgtgagggccgaggagggcgaagagcgtgggtggggaggggatgttgctttggggtctcatggtccccagagggcactagggagtcacttttggctccgctggtgcatgaagtcacctgtggccaccatccgttccgcctaaaacactctggagagaatcccacctttcttacaatttgctgggccattgaggtttgagggcctgtgtttggatccttgcaactgtgtggtctcacctctgtgcgtgcattctcattgccagaattggtctattttcacggctggtctttggggaggggggcgggatccagcctttgttttgttgtgttggggtgggggtgttgtttttctaaaagctacctcttatgtttgtccagttgttcttttgttcctttcccgcctcccattctgctgctcttcctccctcttttccccaacctcccccgaccctcctgaattttggaaagcacatttgcaatattcgtgtttgctttgggacggaccctccgtttcatctcatgctttatgtgtaagagttttttattattattttttctttcctttctctctctgagaaagttgtggctgcgttttgatcttaggttttacaaagtggtttagggaagcggttttggggagaaggatcacgaggaatgtagggaagccggagggatgggtgctgctgcgacgacccccccgtccctcggccccagccctcctgccctccccttcaatctcatccaccaaatctgaaggccttaaaattgtgtgttgggaggatgtgaattgggaggacggtgtcactagactgtggattagggatggtaaagtagggaggatgctattttgcaactatagtaacgacttagtgttttggaaaggaaaagaagttaaacttgaaatacgtgactagaacagttgtcatgtttataatgtgaaaagggtgaaatcatttgggggaggggccgtctgtaagaaatcattatgcactatggcttcctcctctggtctgggaagaagcggggactggctggccctcaggggatctgtaaatcccagaaaacagtatttttaacagcaagatgtcattcaacattggtggggaaggaagagaaaaaaatcaaactattccatagaactagctggccccctcactcccatgcccttcccactcagcctgggcccctccccgctccattcataaaagctgagagggttgagctaatcttcacaaattgtaatatttttgtagtatctgttagttccttcgtcagttctgcagaaccttgccctttccttttgtaatgtgaataggaagacaaaagacaaaaaaaaatccaccaccaccaaaatatccctttgtacatgtatgtgcgtgtgcgcgtgtgctttgtgtgtgtggttgtgtgttaaatcatgcagtattgtcgtaatctggtgttgcagcaatggatggtactaaatcagcacctggatgccccacccaaccccgtgggccctgcagaccccagtagggaggtatggggagagctcaggggagtgtggtttctgagggctactgtctggggacacctctgaacttactgtaccttcctctccccatgaagacacctgaatagagtctaacatgcctcttctccaacttcctacctacaacaacagaacagttctaatgttgcacggcctagtggccagggggcaagctaagaggctgtctggaggctttatatgtgtctggagttaaggggagaggaggagggtagacaggggtctctccccaggtgggatctgaatatctgtcctcccctcttcttcatgccacctgactccttcggccccctggctgcctttagctgtggtactgctgacaaccctgcttgctactgccttatccagcacagtgaaaaacttctccagcctggcaaggccacgttggttaatagtccctttcccatgtccagctcctacaaatatgtcccttaatgcatttggtgacatttacacctcatgtgctctttccctattcactccttcactcattcaaagcattaaaatcctatgtatatataggatagacaaatatatagatatatagatatatatatatatagcaagagattgatataaaatagtaaatatcattgctgctttgggctgctttggaggaggaggccatgaatatggggaaggcagatctggggtgcaggggtaggtagggaggctgggggacccagtgattcagtacaatccaagggatgcaacgcgggcttgtttaatctttgtgcctgaacagtttttccatgttgagaaaaaaaagaaaaaaaaactgctgcaatttttcacaagtgtatggtacctttctggatgctattggtacaattgctgtggatggaagagggccattgagcttacctccctataggggagagagcagaggtggggcagcctttcgactctgtccatgacggctggcagggtcagggtagtttctgggcctgcttcccggcaagccgagctagggtgaaaactgggggcgcaccaggatgtgagacagaaaagcagaagatgagactctgttcattcacttttcctaggcccatcctgtggtcatctttccccctcccatcatacctcctccttcctggagcctctgccggcttggctgtaatggtggcacttacctggatatttcagtgggaggatgaaaggcgagactcaccctacgcggtgggacagatggggagaggaaaaaggcagagatggccaggagaggggtgcaggacaaaccagagaggttgggtcaggggaaaagggtggggagaaagaggggtgcaggccctgcaggccggttagccagcagctgcggcctccccgggcccttggcatccaacttcgcagacagggtaccagcctcctggtgtgtatcataggatttgttcacatagtgttatgcatgatcttcgtaaggttaagaagccgtggtggtgcaccatgacatccaacccgtatatataaagataaatatatatatatatgtatgtaaattatagcactgagggccctgctgccctgctggaccaagcaaaactaagccttttggtttgggtattatgtttcgttttgttatttgtttgtttttgtggcttgtcttatgtcgtgatagcacaagtgccagtcggattgctctgtattacagaatagtgtttttaattcatcaatgttctagttaatgtctacctcagcacctcctcttagcctaattttaggaggttgcccaattttgtttcttcaattttactggttacttttttgtacaaatcaatctctttctctctttctctcctccccacctctcacccttgccctctccatctccctctcccgccctcccctcctccctctggctccccgtctcatttctgtccactccattctctctccctctctcctgcctcctgctgccccctccccagcccacttccccgagttgtgcttgccgctccttatctgttctagttccgaagcagtttcactcgaagttgtgcagtcctggttgcagctttccgcatctgccttcgtttcgtgtagattgacgcgtttctttgtaatttcagtgtttctgacaagatttaaaaaaaaaaaaaaaggaaaaaaaaagaaaaaatgaatttactgctgcaggtttttttctctctccatgtgtcactaagtgaagtttgtgccttctatagcaaagagaatattttttacatcctactaacagtagatttttttgtagtgaacattttttgtatttttatttataagtctcataagaaaaatagcaatgttcagttgtataccttgaatctgcagttagaagagaataaagttaattcagttgtctctcgcttgaagcgtcccacctttttattgaagtacttggttttgttttgttttttttttttgttttttttgccttttcttgtgtggggaacatggtagaggaattaagatttttgtgtggggactgggaaaaagaaagctctgtattacacatatttagacttatctatgtgtcacttttatgccacatttacaaggcacagatgcactgaataacatttttctaatactttttagttaaaaaatgttaaatacgttaatatcgtatgatccttggtacaatgtgctaggtaggcacttttattcagcaagaccaccatgtaccagttactgttgtcggcgctgggaattacagcaaaggacaaacagacaaaccctggccgccctggggctaccatgcttgagtcggaatccgtggtaacttgctcaggattgcacggctggtgagcagcagtcagatcctgataccaggccaggttccaggggtctcacgtcttctttagtctttagagagacattttcaactgactccttagtggctaagcaagcttcagaaatttctcaacaagaagcttccacacaatcaaaggttctgtagcagccaagagctgttgcattgttaaaggatttcactcaatgggtacgattccctccctgtctcatctccctgtgtctgggccatctggccccctcttatcggggatagaagcatcgccctatctttagctgtaaaaccaaagccactcaatcctagacgtggtgcttcagcacctctgcctgaggccgtcctcactgcctgtctctcctcaagacccaagccatgattgtcgtgctgggtcactccaagacccgggtctgtctgaccctggggttgctgagcagaaaccgcctggagctacccctaccaccggacaatcttcccaggaggaggtccagcccctagaagttggctttctcctctccctctttgccgtctgctgtgctttcttgacccctcctgcccctcatctttctcccaatcttttttctctcctttccactcctcccctctcttcctcatctgtggtcttttctcctttctttttgcttttgtttctctgtcccaccttacctctccacatatttctcatctgggaaaccagtccttaaccaaattctgtgttttgattttgagcagtttcccccaagccgtcctgatcctggcggcccctgcctcccccacactctactccaaccccctcccccagctcccctcccctccctcaggcctcagctttctcttgacagatgggagggcagtgagcactccctctttaaaacaacatttaatcgccgttttctgttcttggacatcaaagctggggcttaggcgctgtgctggggtcgcggcggcgcgggcgctgggggagaggagacggtgtgaagggagacctgctgattgacatcggctctggccccactatctatcagctcctctctgcttgtgaatcctttaaggagatcgtcgtcactgactactcagaccagaacctgcaggagctggagaagtggctgaagaaagagccagaggcctttgactggtccccagtggtgacctatgtgtgtgatcttgaagggaacagtcaagggtccagagaaggaggagaagttgaga

SEQ ID NO: 2882 - DNA, 976 bp, Homo sapiens
tttaattttttgtagagacaaggtcttgctatattgaccagactggtctcaagttcctgggctcaagcaatcctcctgcctcagcctcccaaagtgctgggattacaggcatgagccattgtgcctggctgtcatttaatcttcgcatctactctatggtgtagataataggaattagtatcatactgccaattatgatcacgggatctagaggcagctgatctgtgttcaaccccaggtcagcaaaatattggctgtgtggccttgggctagttactttacctctctgagtcttggttccttcatctgtaaaataaaaataatcacaccagcttaatagggctgttgcaaaaaaatcaaataaactgtatgcagaaggacttgttgtatagtaaccatttgtttacttccacttttcagatggagaaacccagtcctagagaggcaagctgtagtttgggaggtcggagttcacccaagaacaatctgcagctgcctctgcctttcctcttgttttaaaggaggattatgaggcttgcatacctactgcaccaacccatacgaagtcaatgaacaggatgaggccaagtcaataatacagatgaagagcagtacaaccatgtcttcatgccttactgaaaagcaaagatgtattttatatctggattttctttgcactgataaaacgatatcagcggtatatagtgacttgggtgtcactgtatgcatgttttttgaaatcctaaaatgaaatgtatttatctcccaatcatctattgaataaaagacaattgcttctgatcccaaacacttctcgtgaaagcttttactcattcaattcgtgtaacaatgagttgaccaaggcagacaaggaccctgtgattatggccctagattctagagggggaaaatagacaataaacaatgaatgcatgatggaattacagtgacagtgttctgaagacactaagtaaag

SEQ ID NO: 2883 - DNA, 5628 bp, Homo sapiens
ggacactgaggctcagggagctgggtgatgtgtcaaaagttgcccagctgcagagtggcaatgctggaatttgaagccaggcttttctgattctgaattccatgttttcttacttgcctttttcttctgctccagcttgcagtgcctcggagaggtggcgctggctagcctgggacttccaacatacagcctacattgatggcctgagacttgtggcaaaaaagactttcaaaatctaatttgctcacatacatgaacacctgccaggaaggaatttgaggcctttgttctaaacatggaaaagctgagttcatttgccccagagggggcacctgcagggaaaaggaaaaatggttttaaccctttccttgagtcagaaaatgaggccaccagattctcctttcatccttcaagtatcagaaaggtctgtgctgtgaattccacagatgagattcattgcaagatgtgagggcagaggaaatccatggaaatgaaatccacattcaaactggatgcatgcgttcagcaactggaagctgagttcatatttcattgcccaactaccctgaccacttgggaatcgcaggtttggaaggacccacagccattctgtggaaatggatctgctttcaggaccgaatctcagacttcttggggaaggtttcagtggctgcctttgctgtgcagacctggagatgggtctgatgatcggacacctgaattatctgtgtggctgagtttcaagaagacctgctggggtgaaatgaaaatggtgcctactagaagccccagtggctttgctggtggagatttgctcctccactggctcttcttgtagacacacgactgctacagtatcaagggtctgatgcagacatgacaatgtcaagaggaagaggagagcctcgctcttcccaggcttttgcttttaagagcagaaaaactttccccagagttccaccagctcacttctcatcttacttctttggccagaactggcccttgtgcccatattgtcagtcaaatgccgacaaaggaaaggggccactatgagtggtttagacttggattggatttgtccttattggattgtccttaagtcctttgaaaaagaagtatacaacagaatgaaatcttgactcagctttcaagaataaagagggtgagatgactgatggatggctagcaaaatcagatgtgggctctgtcctcatggagcatacagtcagaaggggaagatttacctaattacactaacaaacttataactgtggtcagtgttctgaaggaaaggaaatccagttgtatggtaacgtataacaaagaaactgaactaggatggagatgggggtggtaagtgtagttggggaagccagggacatgatctgtaagatggctggcctggattcaaattccactccacttacttgctgtgtgattttagattagtcgcttctcctctctgagctcaacttcatctataacaatctttcctagggttgttaaaggattgaatgagccactctatgtaaccacttgacacatattaggcacttcagtggctccttttccagattaaagaaggagaaaacgtgtatgtttggagttagcacaagacaggatgattcctcatgtttgttttggaaaacaagtcttaaactcacagccatgacagagtctgacatcatcagacatcaggcgtgttaagaattgcactcttaattgaaaatgtccagagtttgtgattaattgcaatccttttcagatcctttccctaagaatttaatttttctccccacccacccggaggtcaggcttttaatgtaacaagtacaatcaatcttccactgaagatggcctctctctagtgcaagctggagcaggactcatctggattagaagcctagacggtttggagtcacctggtgaggtttacgtgcacagctggggcccagcctacctaattaggaccagagagtggttgagaaggggaccggcgcgtattctaggcgccctcctccagtgtctgtttctaataatggcagaaagtagcagaggcggcggggtgagcttggagcgtggtgacatcatccctccagctgttttacacatctgtgacatggctcattaggactctcttaacacctcatccttccctgctccacacagctccagttgcatgagaaaaggtgctcttgcatgtgaggggccccaagactggggctgacttcagggtcaaagattcgcttgggcactctaccagtcatcagaattttcacagagacacccccccaacacacacacccgcagcatgcgctccttgaaagtgctaatagcttcaatatgaggctggcacttctgcatgactgttggtgttcagggccagcctagtcttggggagtaggccatctgtagcagctgcagaaatgtttttgcttattttgagcattctaagtttttcctagccatgaataacaacaatcgaataaatcatcccacagtgtgtaggatggtcgtttttttgtttttttttttcagcaagaacaacaaaaaatgacatatcatgtactatggataatacacataaaaaattccgccatatttataggcagcagttaactaactatatttagatatttgaaactgtcttaaatcagatgaatgataaaagcttcctggatttcagtggaaagcctaaatgactaaaccaaaaaaaaaaaaaaaagttttattactatgaagtatagtgcatattctgaaataaaagatatgtgatatttataaaataaaaagagaaactttgtcaatagacagcatcatttaataaagcagggtcccagatttacagacctttgtttgagttctaaaatttactaggaaggagggtgcaggggtggaagccgttcattgtagctctttaaatttcctcacttttgaatggagatgataaaatgcccctcacagggtttttgagaggactaaaaatataaggtatggaaagtgtttagcattgtgcctatcacaaagttagtgcttgaatatattagctattgtcattaatactattgctattcttatttcttctacaactgttattgttgaaatgcgaagtcaaaatggtacatttttatcaactattaagtgctatcatgtttcaattaatacataatgttattgattagaagatgattatagtattgtctctaaggaagaaaaaaggctgcctgttaaaccatggtttaacaaattctggagtacgggcgcagtggctcatgcctgtaagcccagaactttgggaggccgaggctcacgaggtcaggagttggagaccagcctgaccaacgtggtgaaaccccatctctactaaaaatgcaaaaattagcctggcgtggtggcgcacgcctgtaatcccaggtactcaggaggctgaggcaggagaattgcttaaacccagtaggcggaggttgcagtgagccgagattgtgccactgcactccagcctgggcgacagcgacagagcaagactccgtccgccccccctcccgcccccaccctaaaaaaagaatcaaattctggaaagcatcaatcatctctcaggcctttgaaaatgatctaattttgtagatcaaaccctctgtgcttgcaggtaggctcacgaatgcagaaagtgcatgctgtgagccatgctgtacacctcctcattgtccatttctcttctggtatctctcaaggtgtgtggtcaggttaagagattgagacttaagccaggcaggtgttacttcctctcaccatgacaaaacctgggacaatgagaagaggatagattctttcctcccgagggtgctgaggcaggatcagaatctctccctcgggtctgaaacagatcatatagaaggttcaaagctgcaagaaccattctgaaaccataagaatcctgagaacgaagcccacctcatgctaattgtggagaccaagcttatttgagtttacttgagcccttggatccagccgtgcctgaagactttttaataacaggaataaaaaattctattttggataaagcactttgagttggattttctattacttgcagcttaaaagctgaaatggtcctatgtgataagggaatgagacgatgattttgagcatttaatctaacaagaacaacaatactgtgcctgaataccacaacagggaattaggtgttgccttctgacagtatataaaagaactcatttctatcagtttcctgtaatacccatcagaatttctgtctcagaatttaattttctgagttgagctttaatgccatacatggacagtcatatggaattccagaatgtatttattataaaaatatcactgaagatattgttacatgtatcactcagtggtgctttcataagtaaacttctttcagaattcagtattaggagaaacctgagagaaggatatactcttctcctcttctgaaaatatgtgaataactaatcttacattcctgaggctgggtgtggtggcttatgcctgtaatcccagcactttgggaggccgaggcaggtggatggcttgagctcaggagttcaagaccagcctagggaacatggagaaaccctgtctctaccaaaaaaaaaaaaaaaaaaaaaacaacaccaaaattagccagacataatggtgcacacctgtagtcccagctacttggggggctgaggtgggagaatggcttgaatccaggaggtagaggttgcagtgggatgagatgatgccactgcactccagcctgcagaacagagagagtctctgtctcaaaacaccgaacaaaacaaaaaacaaataaacacaaagaactaatcttgtattcctttttgctctggctggctggaagctcagaaccagattaaaaggtcaatttcaagttattcacactaccttgtgattggttcatcttccttttctttggttcttctgtgtatcacacacatcacatgtttttgttttataccaccccaaattcttaatggaagaagcatgttataaacaaacaaataaaatgtgtccataattattaccattgtaaaagtgattatagaagagaaagagctggtaactacgttaacattttctctaagttgaaactgaaaaagtaggcagaggctctcaaatccaggtattgctatgaattataggagctttgcattttcattcttctgatccacacagctctctgtttaatctaacagctggggtccctgaggagatgaatgctttgctccgtggcccaggggtaaaaaagtgatatgaatctgacgggctttggctgcttacttgctatcatgggaccttggacaagtcactcagcttctcttggtctgttttctttggtgtaaaagaggaaatgcttgctacaggaagctgtcgtggagagtgaaggagattccggatgcatggtatctagcacagtgtctggcagattgagcctccaaaggccaggctttgtcttccttatgcagagtgccacctgcttttctgtaccaggggcttctgtctctttacagagccacacagagtcggatgtgactgctgcatcatattggattgcactctggccttgtgttggtcgatctttac

SEQ ID NO: 2884 - DNA, 6030 bp, Homo sapiens
attgggaggggttgcctctccctgtgtccacacatatgccttgagttgctcttcagtgaatatcacttttcctttcatgttttttctacatgctattatctgtatgaaatgaagaccaagaaaggatgggaagaaggagaagaaaaattttgatttatctcagaaactatactccgaagtgagagtcctggttgcagcatccttcaccgaagcacgaagcagaatcaagctgttgccatgaagcttgtttcaagagctcagaaatactccagggactcctttactactgcttttcaaagaggcctttttttctctcttctccttttcctgcaaagagggttatatccagtgctcaaggacatgggattatcagcctaaggcatgagtacatgctgtggaaacagaaatatgtatgaagggatgtatgaaaccacagaataaatggaatccacattcttgaagtagctacaactctacttgagggaaaataatgcttggcttcaggtatttggaaatactgcacattcgggctaagaatgagatgaccattttctcattttcaactaattatttcaagataccaaaacaaaacaaacaaatgccattggtgagtacctgctatatacaaaatgagctgtatgtagtgaagtggccaggaaaggcagagttcacagccataggtagggcaggccctggccaccctttaggggagcaagaaaggtaaaccaggtggatgaaacatatcctatagcatattgtaattggtaagtggatgcaagtggtttcttagcaagtcagaggcatcgggctgtctaaaagaggtaagaagattatactgacagagaggtggagcaaacaatgaggtgtctgggaggaagcatttgaagagctgcaaggaggtctgatttatggtagaaaaactgagtccccaggaactggggaagtgactggcaagaagaggacagggcttctagtctagaggaatcaaggcataggacatattgcttacctagagattcagtcaggggtatgggatccagcctgggtatagtttttggaaggctgcttacttgattgggttggagtgggactaacagcaagtgtgatttgatgctgacccttcagtactggcctgcgtagcttacaacagttaccctgtctaagaaggagattgattccagaacccagaataaagcagagaatgcagatggtggtcacatgggttcaggtaaggagtaaggaaagtcactggcccttctccaagtgctgtgcaggtgcaaaagttatttaattttctgtttctctcttgaatgaatatgctacctatttggtggtataacacgtaaactcattcatattaaatgtcaatacatgctttaatgttttaatcaataaatgtactaaataatttaaatttacaagggattttggaaacagatccaactttaagcatggcaggaaattgatatttggacaaggaatgttagcacattcttagatcatactcagatttaaggtaagactactctatttttcaaaccaatctaggtatataaaaccaaatctagttagaatgagaatactaaattaaacataagtttgttattcagatattccatgtagaactgtgggatgaagtgcaatcagctgtgactggttggaataaggacctgccttatcccatggagagttagagaatctgttccaacaaggacagaaggtccaggtgggaagagctctggaaaacaaaactctctgacagcgctcttgaaagctctgctggcatcccaaggcacgtagatagtacctatacatctcatcaggaacatggatggttctctgctatcagctgaagtgctgtgaccacaaaactgaaaattcccattctgtgtccttgccaataaagaatgtccatcagagcacgcccagtatcctagctccttatccagactgtgcttctcaatgtgacaaggaagactgcaaccctatttgcttctgataaccttcctatgactaaggtaagacagccttgggataaagcaagttttgtatgtggcataaaagggaaagagaatgagcctgggcacatcaaatacttctgaagtctcctttacatctgaacttatgaaaatgtgagaacatacatttcccaattgcttgagccaatttgagacaggatttctgtatgtttgtttgtttgtttggctttttccagcccaagtcctttatctggtacaaatgggttggagagattagtaactgtaattgacattcctatcggatgctgaaacaattcattagaaagccagggatatgagaagattgtctggagaagggggaaaagtggaggttggtgcaaaaggcaccctgtgtctcaagaaccttagcaacagttagccagtacagtttcacggttgcagtaggtggggaaatggtaagcatatgtagtgtttgggttagagggtagagaagaaatgcaggtaactaacatttattgagaatttagttcttggcactgtttccatttcagatatgttactacatttttgcctctcaacagcactaagaagtacatatttaaagagatagaaacttgagactctgagatattaatattcccacaattactcagctagtataaaactcctctcccatccacagtgcctctaagttccttaccatctatagcatagtttaagaatttaggaagtcaaaaaagtacagaatacatgtttaaaaggggtccatcaaaggtgctaacatgaagacgatgtattgttatctcccaactctaaggaatatttgctaattcagaatagattcagaataaatcattcctgaatgcttcagggtttttgtgctaattgttttaatgtaatcatagcagaacaccccagatattctaaatacttatctcaggactcagttatctgaaaagtctcatcacgaagacctgtacatgctaatgcttggtaactcagggaagccttcttacgtgaccaacaccacaaagccaggtggagaagatcccagaggtctctggtgcttgatgtgtttctctaagttttgctgaaataatttaaaaaaagatgaagtgggagaatttagagattattacttacataacatcataatttatctcctttgccaatatcctcttcttcaaagcaaagatttttaaagatgagtgaataaagattgattatacaaggttctggggaaggagggtcaagatggtatggtttgcatattgtatcactttttttccccctcagaatcattttatttacttctaggaagctgggagtgtgactctagaacaacacagatttaaactatgtgagctcacttctaggcagattttttttttaatcaaagttacaccccatgtgcctgcctctcctgccttcctttccaccacctccatatctccatatacaacctgagacagtaagaccaatgcttcctcttcctccttctcagcctattcagtggaacgatgaggataaaggcctttctgatgatccccttccatttaatagtaaatatattttatcttccttatgatttttaaaatgacactttcctttctctagattactttattgtgtgaccacagtatataacacatatacaaaagatatgttaattgactgttaatgttattggtaaggcttccagttaacagtaggctgttagtagttaagtttttggggagtcagaaattgtatgcaggttttcaactgtgcagggggacagagcagccctcaacccccaagttatttaaggggtcaactgtacttcttccataaaatgtctgacaaaaataaaaatctaaaaatatttactttcaagtttttgggtacttaatcattgacattgtaaggagataaaactttccctccaaaggtttgatgattaagtttattaaataaactgacagtggacagactaacagaagaaaaggcatacaaatgtattatgtgcctgagggcatcaaaggaaggaaaagtgagtaccccataacctaataaaatttaaaagcttatgtgccctcctcatagggaaggtgggggggggcatgtaagcaacatagagaaagttaacgattttgggggaagataaataggtaatagtttgtgacaaagattggttgtttgtgacgctgacctccaaactcttctcttgtgatacaattagtcttctctggttgagattcctggggaggacactcatgacaattgtggtttttggaggatctatctttaggcagctaaaaggaagttcagagaaagccccttcctatacttcgcaggagaaaaaagaggtaagaggctttggttctgttttagttccaagcacttggtatgtcaaagcaccatacttaggggtattgttttctgagtcctaacaacattgaatatttctttgcaaatgaattatctgatgtgtttccattctggtgtcctatttttaagaacatcttaatatgttattttctttcaaaaacttcatggtgcaattgcatgatgaattaacaataaaatgtttctccgtgatatatatatttgttgctgttgttgagatggggtctcactctgttgtccaggctgaacttgaactcctggcctcaagcaatcctccagctttggcctcccaaagtattgggattacaggcacgagtcactgtgcccagcctccttgaccttttttataaggagcattagtcaaatttaattttgaatgcactggaaagttgtcctaattaattcggattaaatattgcctgatcatatataaataacctcttactatgtttgaattatgttaaaaacttactagaagtaaatcatgatttattagataaaaaagtagtatgatgtcaaaataacataaaacaagtacaaaacagattttaattctgatttatatgtgcttttttaatatatctggagtaggtacttagcaatttttggccctctggaataaaatataataattcatttaatcacatgctagtttttattgaggtctagaaaatgtaaagtacttgatcaattgattttacttttaaaattggttctttttaagtgctcagagtttaaaacattactatctgcgatgataaatacaggtcttgccatcttgatattgattgtttcagtggaagtgggtagtgtcttgtaggtgactgaaaatgaggcaatagcaaggaatacttgccctcaaaggatacagatggttgtaaatcctcccaggggtgcactcaacatatccatctcttaaaagtctgcttccaccctgacctccctaaggggcccaacagttgtgatgtttctgtgtgggaattgtattccatcttcctttctgatggctcctccccttcccttggccacttcagatagaggtgcaggacattgctgaagtgagcatgctcactagttggtacagcataagtttccaggagcatagagaatttgaacaaaattttaagattcatttttcctattgctaaagtcacatttggatcatgaggatcttcttcctttttttattttctcccttattatttttattatcttctcatattcctctccacctcattgcacctttcctctttaatttccttgaaattacttggtaaggcagttggtacatggaatatatattttacaataaaattataaatggtggttaaattctatactagctcatacatggatttttttcaatgttttttgaaagtgagccttatttagttagactagaaaattaattctatgcaaatatatatatatcccagttaccagctggccagtaattttaggtatatggacatcctagaaagtgctagttccatggggcagtaagtatctttttcaaatatgagtaaactgtcttaagcaaaggagagaaggaattgagaaaaatgctgaaaataaaaggaggtaatatttttaggttgaatgatacattagtagatggtgtttaaagtcttcagaatgtattgcctatgtaactgtaataacc

SEQ ID NO: 2885 - DNA, 1288 bp, Homo sapiens
gttgtttaaaagtgtgtagcaccttctccttctctctcttcctcctgctctggccatgaaagatgttcctgcctcccccttcaccctctgccatggttgtaagtttcctgaggccttcccagtcatgcttcctgcacagcctgcaaaaccatgaacaaattaaacctcttttctttataaattacccagtctcaggcagttgtttgtagcagtgagagaatggactaatacagcattatatgtgatcaataggtatggggttatatgaaaaaaaaaatccaaaatttacaatatacaggaaaaagatgggtgacattctgtaacaccctagcccaagtattgtttggtaattatttagtactgacccctaagtacttcgttgactcactgagaatgtgcatagtaacatgtagactttgcccagtggagatcatttctcttaagcagaaaatataacctcaaagtttatggtttgtgactttgtaggacattagtttgtaactatcaccaagtttattttagcagacctttgatgagctgactgtagaatataatctccattccttggagatataatctctcttatatgctataagaaagaattctggccttcctaccatcttactgattccgccactatttagtgggttgaatgagatctttcatggctgtttattttgtgtgtgtatgagaaccttgcttttaagttttttggaaaattatatgttattagctgttgttgcattttaacaatttagccatggaaatttatgggacttaaattaggcttgactcatgaaggccacgttaaggaaaaccttggttgtttttctgtttattgttttctcacactcctaagcttctttttaagtgatgtcagtgactgatctcagtgctgtcaacttctagccttggctctctattctgtaccaagtatcttatattgtacttcatttgcattaggagatcggagttctttaattaggaatggaatgcaacagatttggacaagtcaaggacaagagctttagagagaccaaagagtttttcactgttaaagtgtccagtatgtagccgagaaccatatggagaacatcaaatacagtggaacaaatgtaactgctattgatgtcacactttgtgaagtagtctttgttgcttaaaaagggtgacatctagtggctaaacatgttatttcaaataaataatatcgaaataacatttcttctcatggtccactcattcactctttaacaagtattttgaagtatatatgtttgaattatgt

SEQ ID NO: 2886 - DNA, 14244 bp, Homo sapiens
gttaaacggcatcttccttggatggtctcaggatcacagccttctctaaagaagtattcctctccaaagagctgcaggccttcaacagccttattaggtccggaggcgggggcccccggggcgactcgggggcggaccgcggggcggagctgccgcccgtgagtccggccgagccacctgagcccgagccgcgggacaccgtcgctcctgctctccgaatgctgcgcaccgcgatgggcctgaggagctggctcgccgccccatggggcgcgctgccgcctcggccaccgctgctgctgctcctgctgctgctgctcctgctgcagccgccgcctccgacctgggcgctcagcccccggatcagcctgcctctgggtgagtgccggggacccggggacgcgggccgggggaaggaaggctgccggggacgtgcctcgtgcggaggtggccgtgacaaaggaccaaggaggggacctgtcggaggcacgggatccattaggaccccttcttttttcaaggcgctgcgcggagggagggagaggagaggggagctgtggggccgctggcccctttcttcagttttctttctgcgtagggatggggtctagcccgctctgtcgtcccccctagttcccttaggaggatgcactttcggcggggtccgcctgcccatctacttgtctttgatgctgaccagagccgaccgcggtgccgcccccgagggcggctcggggtagagggaggccactgcttgcagtcctataaacactggggttctggtattcccagcaagtcgcagcagggccgggagctgtggtgggcgggcaggcgcccgatcctccctctccgcccctccatccctggcttgccagtgcagccccaagccccagcatggagagacctccaggccctgggagcgaccagactgcggatgggggcagctctgggcgctgacattcccaagtcctgggagcgaacagactgcggatgggggcagctctgggcgctgacattcccaagtcctgggcgcgacccctcctcagagtgacctgggagtagcatcctggttggctgggttcctttcctggtcctcacatctgcttctgtggccacctcctgtttcagccctccgcccttccctctccttttcccttccatccggttgcttctccagctcttcttggggcacttgggctttagattcagagggtcctggatcccaagcccatttcttccactgggcaagtaagtgccttctgctcccagtgccccacctttctcatctgcaaaataggcagtcgtaggtgccttgcaaggtgtgttactcgggtatgaagtttataagtgcccaacagatgtatccgcaagccctttaacttgttggttgtcatattgtatgacttggaataaagcatgtatgaattagaggttacagactgaaactgtcccagacttccatctcctcacagcatccccacctctaaaagcatcctgtttacaaagggaaatagtagaatcagcacttaaattaaggcagggccctagcggcttcaagtaaccctacctgaacccctgtctgaaatactgcagatgacctgggttcaaatgctacctcagccacttagtaaccatgtgaccttgagcaggctacttaaagtttctgggtcttgatttcttcatctgtaaaacaggtataataacagaacctacctcaaggtagtgaggattaaatcagctcgtgtttgaaaagtcgttaggacagggcctggtacgggaaccgctgaatgagtgttactcagctcagagtttacttctgtacatcttgcccagatctggggtgattctgcctggggttaggacagggttggggtgttagtttgactgtagccccttgggtgcttcagcttgtgaagtcaggatgaacaggtgtaaccagccccaggcctgctgtcttgctacttctgttgtggccacaactccctttgccctcagaccctctcatttttgggagaaggcagggtgagatgggggcagatgctccaatggactccacttatggccttgggaaagctgggccagctcatgggaccatgtcaaaagacggtaggtttcatgtccaactctggaactggatgggacaatcacagggtagctagaaggcaaaactggagagcagcgaggggaatcgaggggacctgcttcccgaggagcagctagaatacttggttattattaccaatgcagctgcaggacctggtccacttctacaagcccgtgactgttcccaggcttctgtcacgcaccagcattcacctgtcagggctgccgtaggtgggcttgcattttgtgcattgtaccaaggtgcccagctgagggttgagaggacctgaaatgcagtccacactcagctctccaacctaagagtcctggagcaaaagaccccttctgctatgttcttggggctaggtctgcccggagtggcccatttttccagtcccaccaaagccctggaatagtgtagtggcacctagctacctgaacttgtgagcacgtatctatagtcgactgagttgccactataccctggagtgccccctctctgggcttcctcctggccctcatacccacctcctactcttacctacgtgcaggtcctagggctggctgggagtccgagaggggaatgccctggtaactgaacaggctcacccttgagtgtggcctaaggcggtttcctgcctcatcccagggggctcattagatgttcctggcagtgtgcccatcctgggcaggctcgtggtgaccatgggacgccgggcccagggccctagtgccctcccttgcatgcatcttaggagaaagagtcatggaactggatattacacacccctctttcctcctgccactcactcctctactgaattcccacccatgccccgtaaggacccagatgcctagggacagtggggctatgtctgtggtttaaaacaaaatcccttgaagtggagcgtccagcttgccctgcatctggggtccttcatagggaaccctaattattgttgatgaacagcacattcctggggtgcttaagatgcagggagccgatttgtggcctcgcccagtggccagtagggagaggaggatgaggggacagccactgggggctccacagtcagctggaaatctctgaaaggaacacttcaaagaagtgtgtggaatttgggttctcttgcgttggaactaccatgcagagctccaggaccaaagcctcggtcaggagcaggagtggtgctgagtagaaacaatggcgcccagtgcttcccagcctggccacgtggggagaaacaaaacacgcctcctctcatggccctccaaagtctttttgggccaccttatttggacacttaatgggagttattattattgttattttgagatggagtttcgctctgtctcccaggctggagtacagtgatgccatctccgctcactgcagcctccacctcccaagttcaagtgattctcctgcctcagcctctcgagcagctgagactacaggtgcccgccaccatgcttagctaatttttgtatttttgtagagatgggatttcaccatgttgtccaggctggtctcgaacttctgaccttaggtgatctgcccatcttggcctcccaaagtgctgggattacaggcatgagccaccacatccggccttaaagggagttattaattccctcctgccccagaagtgccgggcgggaaagctctggacgcagtatttctgaagcagattggacagaaatctgcaggcctgcaaactgcagtcaacaaaacgccattgagcagagagaatggagcatttggcacaaatcagctgcttgccctctggccctggaggaggcagccagggtcaaggctgccctgggaagccctgatgctggtcgcttgttgagccctcagcccggttactggcttccctccttgacatggtctcaactggacatgagcctttgtccccagctctgtcctatgggccagcatctctttggctctgcagaggtgagtggaaggcgctctaactgcggatgctcagagcctggctttgtaaagtagcttgccacccttactaactgcacaaccttgggcaagctcctggccttctccaggcccattttcacattagcaagagaggaataatggccatcttcacagtgttctgagaggattacatgaaataatgtatgtaaagtgtttggcatggtgcctggcacatgctgcatccgtagtaaaaaggtagcttctgctctggtgtgctagaaaccccctgccagccttgcttggtgaggttatttgcatccatttttgtgcacactggtggtatgcaggccctctgctaggtgccaagccttgtcaggcttagtgcctgccctggtagaaaagacaaagcaaggcccccaggagctgattggaggtcattaccaggggtcctgcttaattatagcccagttattaagtgctcctgattcagccttttcaaagtcctcctttgcctgaagaacctcctctgcatggggctggaccatgcctctccctgcctgcccttcactggttctgctctgccttcagcacaacccacatccagctggtgttgaaatacctctgtgccaacccaggagagcgctaaacttgcacaacttttggggcatatctggatataccagcatgttcatcctctaggcaagagacagagggtggcacggggcctggagaaaaggctagactcgggtcatgtcatcaatcactccttcctttatcttcttagagcctgttgcctctcactccacccccatgggtgctcaggctggcgcaggactcagggggcctctgatgtggccctccctggggatcggggcaacaggaacaacacaacgcgagactcctgtggtcgaggcctgccttccctcagattagctttttgggaagtctgctcccttggactgcattctccatgcttttccccagctggtttccctgcccctcctcttcacattctgacctccctgtgctggatgtgggacagctatcctgtctgtaagataagataattaaaagcctggtggctctttccctgctgccaccaagtcatgcagagacggaggctcaggctcagttgcgttcaagattcggcttcacccgtaacccactgccatggccgaggaaggcattgctgctggaggggtaatggacattaatgctgctttacaagagctgttgaagacagccctcatccacgatggcctagcacatggaattcgcaaagctaccaaagccttagacaagcgccaagcccatctttgtgtgcttgcatccaacggtgatgagactgtgtatgtcaagttggtggaagccctttgtgctgagcaccaaatcaacctaattaaggttgatgacaaaagaaactgggggaatgggtaggtctctgtcaaattgacagagaggggaaaccccgtaaagtggttggttgcagttgtatagtagttaaggactatggcaaggagtctcaggccaagcatgtcatcagagagaacttctaatgcaagaaatgaagaaaatatctttggctcacaaaaaaaacaaaaaaagcctggtgcccacagcggctctatacttattagctcaccatcgaccctcttctgggcactgaatactggaacactaaggggtggctcctgccctgtggcagagatggtcacagaagagtagagtggctacagagtgatacacagaggtggagtgttctgtccagctgctagagttctgcctcccaggcctgtgatctgacttgttgtgcatggaagctctattctgcactcctggatccatctggaagcccatcctgtagtcttaacaggcttccgagaggtggggggcctgtggcgagggggtttcagtggggatggtaggtaggagacagaagccatcattttaccatactcctaaagaggagccaaattagccaactcgtgtcctcttttttggcatcttttggcccatcctctaggaagggggccaactggaagagcaaataaaagcggccattgcggtgcactccctgtgtgccaggcactgctgttggatgtggaagtgcattgctttatctcatgcagatgaggaaaccaaagctcagtgaagctaactcattatcaaggtcatgcagctatagaagagtttgggaccaagccttgggccacagttctcgattcagcaaccacattctttccattagaacagctgcctcctgcttcacctgtgaatcgtacaaaagcagcaagatgacccggctcagcccttgaataattgcaggttatatttttccatctgttaaagaaatctgttgaggtcagtctctggacggggcaggggatccagccgaggcccctggttgcatggccatagttgggaagagggcagagctggcagacatgtggcacacaggagactgaggcacacatctcagacagaagtttgcaaactgaagggtagtgggccacagccagcctggagatacattttgtttgacttccaagttctttagaaaaattttaattaggccaggtgcggtggctcacgcctataatcccagcactttgggaggccgaggcgggtggaccacttgaggtcaggagtttcgagaccagcctggccaacgtggtgaaaccccatctctactaaaaatagaaaaattaactgggcatggtggcaggcacctgtaatcccagctactcaggaggctaagggaggagaatcacttgaacctgggagacaggggttgcagtgagccgagatcatgccattgcactccagcctggaagacaagagcaaaactccatctcaaaaaaaaaaaaagaaagaaaaattttaattagttgctgatatttaaaacttaggaaattttacataaaaatctaggtttccagcttttctgaaggtctggtaaggttggacccccattccgtgtagcagcacgtgtctggggcctaagtcttgcgtgtgaaaaagggctagagtaaaagtagaaggcaagaagcaaggggaggagtagggagcatggggagaacccatcttgattattgatggtcactgacccctaatctttgcagagctttgcactgccacgtactgtgtttatttagtcttctcagcaatcctgcaaggcagccctctcaggactgagaatttgttcggggttgcacagtgggtcagtgatcaagtgaggattcacacacatgtcttgtgccccttccagtccgtgaagcttgtttcttgtctccctaccatactttcagctgtcatacttccacctgtcatacttaattctttttttctttttcttttttttttttgagatggggtctcactctgtcacccaggctgcagtggtgagatcttggctcactgcaacctccacctcccaggcttaagcgatcttcccacctcagcctcctgagtagctgggacctcaggcatatgccaccatgcccagctaatttttgcattcttggtagagacagggtttcatcatgttgcccaggctggtctcgagctcctgtcagctgttatacttctatgtgttcagtgcttttgggaggggtcagagtggtagcagtgcttctcagacacacttttgtgagtgtgatgcttcaggacctccacgttgccccatttttatctggggcccctctctgggctggagcactctcactgggactgtgtcattcatttgtttagtcaacaaacatttatggaacaactgctgggagctcacctgaccagttgatacaaatatgaataagacatggtcttgatcttgaagatgctgtcagcttggtggaaaagaagagcacaaagaccgggcgcggtggctcacacctgtaatcccaacactttgggaggccgaggcaggcggatcagctgaggtcaggagttcaagaccagcctggccaacatggtgaaaccccatctctactaaaaaaatatatatatatatacaaaaattagccgggcatgatggcgggtgcctgtaattccggctactcaggaggctgaggctgaggcggaagaatcgcttgaacccaaggttcaaggttgcagtgagccaagatcatgccattgcactctagcctgggcgacagagcaagactgtcttaaaaaaaaaagagagaagagcgcagaaagaccctcctcatcatcatcaaacatcaaacattgccatcatccgacagtgtcaccagtgcactacaagacgtgtgaacaggaaatgatgggcatacggagaagggcccttgcccagccggggatccaggaaggcctcctggaggaggtggaactgagccaagtctcaaaggatgagtgtgagttagtcaaaaggaaagccttctgggtggaggggacttcctgaacagaccggagatgagagaattgggcccttgagttgcagttccatgtcacttggtcgaaccaagaggtgggtgggtggcaagcactagcaagttaggagcttggacgacggggtgctattgaagtttttaggcagaacagtgacggctcccagagagccctctggctgcagcatagcagctggcctggagatgggaggctggttgggaggctgctgtgatggtggcctaggtgagagaggatggtgccaggctcaggactgcggtagtggggatggtgaggggaatggatttggaaaatattgagagaaaattggcaggatttgattatagactggacttctgaggaaggaggatggtgagacacccaggtgagtggtgccacacacaaacacaaaatgccaagccagggagtgggactggaagggggcggtgaggtggtgggaggcacccacagaggcccttctgcactgtggggtctggtgtgttggaggaagatctgcacttggatgaggagatttggggatcgccagcatccgcgtcattgaagtgatgagcatggacgtgtgacccaggggcttgaacggagttaagaagagcagggccaggagcagacagacctagagagcaagaacattcaggagcaaagcctgaggcaggagggtggtcatcaacacagatgctgcagccaggtggcccagggtcgggcggcatccccaccactcctcccggggatgacttgcacctgaaacagaggtaataaaacacagcagccttgtgaggatgacatgacttaatccgtttaaagggctgagaaagtgctcacatactttagctctttgagggctagaggcccagaaggcatgtgagggagacacggagtgatgcttgagactgggggcacaggtacctagaggacggggtggcgtggcccgtgtctggggtctgtcagcgaggcgatccctgggctcttggcagggctggcactgctgaacgtggggctggctgaggcccaacttctgtggaggagtgagtggaaggtgagaggcagagatggcatggggtggctgttctctttgggagcttgtctaaggcaggtggagggaggcacaaaagtttctagaatggacattggaacaaaaactgctttctgacaggtagagttggtgacataggatttggtctctgaggagatggggtgggaagttgaggttgtttatgcctgatgaccccgatttccttggaagaagtggagacatctataaaagcaggaaggcagacccagggcagaggccctagaagccgggttgttagaggggagccagcccctgagcagagggactgagcgtgtccctgtgtagacctgtgagcaggcaggcggcaggcaggctcctaaggtgacggcagtggtctgtgcacccatggcacaggccctaggtcgggactgggactgcctgggggttctggcagaggctcttcgtctgcccacttggggctgtagcaatggctttccggggcatgccccaggagcacagatgctgtgaggccaggttcccttgccctcgttgccactttcttggtgacctcagtccatgggaggacccttggcacacaatacccccaacctctgcccagagtccctggtcagggactcgactctggcactgggctggtgtcagcagaatgtggccccctcctccatgctccatgaggaagaagtggctgccctgcccaacacgggccgtgtggaggaaggaagtgcacccaggttggcagtgtgtcccagtttcctgctgactgtggccccgtcagcactcctgccctggaggtggggctgctgctggggtaagtgggtccaaggttctggtgacttatcgtgacatccctggggacgaagggctacaacagcctttcaggaggctctctggggacttgtcccgcccagacccctctctgagagtgggggaggccactggctgcctccttgcattggaggccccttccccaccgactccacagggaagctggtgttttctggcctgatcctgctggggcctgtagagggtgggatgttagggccaggtcagcgtcttgctgccgtgcccggagccacagtagagagaaaggtggggtggggttctgagtcacagcgctgctgcagctagctggctggcctggggtggggactaaccagggtggggatggtgctgagccctattcctgtctcaccccagagagctccaggcttccggctgagtcacagggaaggaggacccttacatggggctgagggctgagtattcccacatcacttcctactcagaaccccacttcctactcagaaccccacttcctggggtggggagtggggaccctgcaggtgactcttatgtgcccattccatgtgccgtctccctccagggagggacagggcagccccagaccagccccggtctgcctttttgaaggatgatctgcctagtgggatgcactggccttggtgaagcccctggctgaagcctgtcggggtggagggagagggttcaccctgaatgggaaaaccggccgcagcctcggcgtgccctgctttcttcatactggactaacccactggatagatggatttagaggatgtccgagcagcacaggcagcccaggagagcgagcgagacactctttgacacaagggagagcataaaagcttaagactgaccccaaggtgcgccagcccctcgcaggaagtaaagtgcagaaacacctccacccctgcacaaagagcacctaggagtgagtgcgcaagcgtggacaagccctgcggtaccgtgtacacacacacacacacacacacaccacaggcaagctcaggcagggtccttcacagacgtctgcagtcactctggaggtgacccaagcacctgggcccttagacagtaacaccactcacaccgagcacagaccagctcgcgcccacaacacgagcctgtgacacgcaagtctctgtttctgagctgatgccgtctggctttggccatgagaccctcgtgtgaccaggtgcgtgcctaagttagaatcgcccaggctaagttcgtgaaccccctggatgagggaggcccgactcccgcaaggagccctgcccttctgccagctctcaccgggccggattttcctgcggggcttttggattttgtttttgagtcactcattgagtgttggtcgcgtgccagacaccatgccacactgcaaaccatgtgcaacgttgttttagcaaagctgtctcagtaaatgtgggttattatgtatattattatttacatacgtaatctcattttttctaataacaaccccatgaggcaaagtgttattattttccccattttacagataaggaaaacggggctttgagaggttaagtggcgtgtcctggtggcacacagccagtaagtggtagaggatggctttgaacccaggtctctaactctactctgcacaccatggctttcagtctgactctcagggcagagagatgaggcaagtgtggaagggaagccccagaaggggaaagcctggttaaggggcccttcacccccctctccaaggcacattcccctttctgtccctttgtcgtttcattcactctactcccagcatggctggagggcttgtggctggctcgtttggaggcctgggctgaaccagggactggctggtctataggtttcccctccagccggctgcactctgtagtgcccgaggcaggtttccaccccttctcccaggcgtaagtgggattgagttgccacctgggactgaggcttatctctgactcttggcatttctttgtctggacagattccaagggcggtctgctgcccagacttacagggcctgcccaggtggaaacgctcttttgcaggtagataagcacgggcaaccagcttatctgaaccagcccttgcttccagagaactatggaaaaatccaaaagataagaagggaccgcagtgtctgtcttggtctcactcctcttgagactcctgtgatctttatatgtctcattcctcccgtgacatgtatgagaaactgcagctcattgagacgatgtctctgctgcctgacagaagggcctacttgagggccgggctcggtggctcagccacctgacccccgtcatcctgttaactagtgtcacccccacccgagggcttccttccccatttgctgccaggtgtaaagctgagcttcggctgggcgcggtggctcaggcctataatcccagcactttgggaggctgaggcaggcggatcacctgaagtcaggagtacgagagaccagcctggccaacatgatgaaaccctgactttactgaaaatacaaaaattagctgggcatggtggcaggcacctgtaatcccagcttcttgggaggctgaggcaggagaatcgcttgaacctgagaggtgtaggttgcaccattgcactccagcctggacaacaagagagaaactccgtctcaaaaaaaaaaaaaaaaaagggctgagctgctgggcgtggtggctcacgcctgtaatcccagcactttgggaggccgaggcgggtggatcacatgaggtcaggagttcaagaccagcctgaccaacatggagaaaccccgtctctactaaaaatactttgccgggcgtggtgacatatgcctgtaatcccagctactcaggaggctgaggcaggagaatcgcttgaacctgggaggcggaggttgcggtgagccaagattgtgctattgcactccagcctgggcaacaacagcaaaacaccatctcaaaaaaaaaaaaaaaaaaaaaggctgagcttcccccaaatggctgatatgtgttcctccttatggacattgaggatggagtagcttcatttcccatttttctttggccaccaggaggcccagcactaaaggctcagcccttctctaccagctgtgcgaagactcattgacctactcgtgaatttttacttccttgctgatggagatgtttttcttcagatttgggttttctctgctcctgattttaatgtttatatttcactactttcttttcttcatgtctccccaccctttatggaaccaggctgggggtatgtaaaaacactccacaggtaaacacacatgaagtcatcttcacagctgcttgattgggcgtgttgcactttttgcttcctcagcttcgtgagactgtttgtgtggtcataacccactggtccgctacaacgtgcctgagggtggtcagggtgctgctctttgcttgtttttgtgttctcatcagctgcttagaattttaaaaataatttctctccaaaccctttagttacccaaagcataaacagtaccctggtgggtaagtgtgtgtgtgtttctttttttttttctttgatttatatatttcacattatataaggataacctgcttattagagaatctaaaaatgataacaagtaaaaaagaaaagaaagctacctgtaattctaccagggagcccatgttttagtgttttgtgatacatccttctggatttttttcctatgcttatatttttcccacaaaaaatagaatttgaccatacatactaaatataacctgaattttcacttcatggtagataattcgtgtctttccttgttgttattctgcaaaaacaaaagctacttaaaatgtgtaccaaggtctgggcgcagtggcccacacctgtaatcccagcacttcgggaggctgaggcaggcggattgcttgaagccagg

SEQ ID NO: 2887 - DNA, 606 bp, Homo sapiens
cagacggaagtgagcgacacactctgcgtcctcgcctcaccagatggagaggagaaaacctatggtggctgtgaaggacctgatgccatgtatgtcaaattgatatcatctgatggccatgaatttattgtaaaaagagaacatgcattaacatcaggcacgataaaagccatgttgagtggcccaggtcagtttgctgagaacgaaaccaatgaggtcaattttagagagataccttcacatgtgctatcgaaagtatgcatgtattttacgtacaaggttcgctacactaacagctccaccgagattcctgaattcccaattgcacctgaaattgcactggaactgctgatggctgcgaacttcttagattgttaaataaaataaattataataaactgttaactcttttcagtatttaatacctgtagttcagttagtaactttttcatatatagcatgttgcctgtatgcagttgaactatataaagttcattgcaaagcagattatcttgtttttttgcatagcaatcaaagttgaaatttgtttgctacatcaacaaattaaggacattttcacaaactgagaaataaacaaatatgcca

SEQ ID NO: 2888 - DNA, 2632 bp, Homo sapiens
cagaaaggaggctatcttaaaggtgaaacatccataaataaagaggcagctcagaacgttcctgggtatggcaggattttgcaggatttggatcccaggatttgggcttattactaagccattgtatgaggccctagcagagccagagcatgaactgctaggaggggtttgcacgtaataaaccatacctgctgttcttatattaacaatcagggttagctgaactgcaagttcaaaagatttaccaacaggctatctggctacataatttcaataaccccaactactcaagccatttgggactccatcaaagggtacctaccaagtgtaacatggttcctaacttcctgggacctttaatagctatcttattcctactaatctttggtccttgtttgtttagcttccttgtagtttgtgtcttctaggtcgcaacagttccatgtcaaaatgatggtcatgcaaggattccaattaactgctgccttggattcagactcttttgatgacccctgctgggaacacataaaccaggcagacagagatttccatgccctcactaggcagggccatcacccctaatcagcaggaagtagatacagaagactaacattctccctcattgacccttaagaataaagggatggaaatctctgcagtggggaaaatgagacaggaataatacagggtggtcgcaggagaatagaaaattccaggcagcagtttcacatgactagcaaaaggaaactgttaaaatagctgcagaagctacaggctgataagactgtgaaaaaccagggtgtggaccaagctggctaagaccgactggacaaaacatggcactggaattgatctagttttcacctaggacctcattatatgctcattaacacattaaatcacacacccacctagcaccatatcagtacgggaacacctataattggtataaaaatggatatcatcacagttctgagatatcctcacctttttttccaggattcttcctggctaaagaaacccataaaagtggaaaactcaaactccacagtgcaaatatctcttgagtctgcctgcactaccctttcttgaatgtgtattgataagactgcagttgacattttaagaaatttaaatttcaacctgaagtcaataaggacacctcagaagttttcaaaggaaggatggagtctgttgaaaagaaccggttggtaaaatgagaaaaaatggattgaaggagacccaagtgaccacctggtaattacttcaacagcagagcgactcatacagccggcagtccactttgttcttctatagatcctgcctgtggtgttggatctaacagcttcttccctgacccaagattatgaaggatttctcctgtgttctcttctaaaaattttacatttaggtcctgggctttctctgctagaagaggctgaattcctggagtacctagagtacagagctggtgaatgacctcttatctccctgctctagcctgtcctatgtaacttggtcccagccacctctcctgtggacttttccttcttctgagcttttccagatgctgggctgagcacagattctggtttgatggcatctagtctgcaggaaaacatagtttggctttgaccagcacctgatagactcttctgctcttttggactagtcttctagacactaatggcagtggaatttgaccttctggtcttccttttatgtttgctaaaataaatgaagccagtaatcccaacagataacccagtattcccaccacatggctcaggactgcccccattcgaggtctgtgatcctgagcatctttcaccaacaaatataccactactaatcattaaggtgacggtttactgaaatcctgctgaatactaagccaggtgctggttgtttcacataacttatctccaatcctttcatcattctgcaagatagtaattagtattgcaatttaacatttaaatggaggcccagagaagttaagtaacttctcaaggtaacacagcacaacacatcattagcttcctttcataccttttctttatttcttcctgattcttttctccaaatgtatctctaaggagctctccttagccctgtcctcctctctcttgatgatttcccctgtattatactttcttctggcttctgctcttatatctatgtggatgacttctaaaatggcagttccaacagtggcccatctacgttgtccaagaaaggcctttagaagtcccattaatgtcttaacatatcttaacctatcacttgtctttacccttaaacctgctctttctctgtctttgagaacatgtccactctctggcactcaagttcacagtcttggtattcttatgggcagattctccttttcactcacctactctgacactcagtcactaagtctggcccttctcctccattctcttgatggtgagtcctattcagtatctcattatctcccacctggctgattgcaatagctttcttcaaatctctctgctgttattctccttgtcctcctccttcttagaccctgtggcaagattttgtcttggaaacacctccttgcctcaggagccgctggtagaccagcagcctccatgatccagcc

SEQ ID NO: 2889 - DNA, 11713 bp, Homo sapiens
atataaactgtttagctgaacatataagccatcttggtttttaagggccttagttacgaagatgagattatcatggaagcaaactgtagaactttgaaaattttgaactcagtaatttatctaatctgtggttttgggtaacaatcctagatcacaaaattcatgagtttacttttctggaatctgcttagtccttttgatctcctatcaatataaattaaatgtctatattgaacttgtttattatacatactttctaagaaggagtggagcactttgcaaagaagtcatatacaaacagactggtaaagcagaaattaaaagagaaagtaaatatgataaagagaaaataggagccctgtctattcccaagtgagagaataatttttattaagtggtacattatgtaatggaccagttctcaacagtggcttcgtaacgtacacataggcagagttcgtatgacaggttttacaaagacctttgttcaaagtagaaaaaataccactgaagcactaattcaatgaaggcaattatatgggaagattaaaatgatgtagtctgcatacaaataatctatgtcagaagtgggacaaagagggagatggtcacagaccttatgtccatggatgcttgtctgtggaggcatggcccagttcttatatttgtaaattctagtgcagtggtagtatattggaagaaagaggggatgaacacattatctatttcttgtgcattattcacccttgccaaagccctgctagtccatagaatgcccagtcaatattcactgttattcaatgataacgattattctgggttatctagtgatcctatgtgcacacataaaaatctaatttctccacccatttgtcaaattgggtattagttgtttacattgcagttcaagtggcctttatttgttgttgcaaaattagaggtcctgtgtccaagcctcatgcgtcaccatttgatgtgtgttgttctgagatctgctatgcgcagtgacatacccttgctccatgtgctaaatataagaatgttgaatgaaccctcctttaccaacgtgatttgtgtttgtcgtttgctcacaagacatagaaaatcttggcaatatctatttgggtgatgccacatctttgctcaagtgcttgtggccatgtgtcatggttgtactaggggacaaagaaaactttaagaagagagtagtgctgatatccagtaaacttgcaatgatgcgtgctcatggaggcacagatcacatgggtgacaaaaatccaccattaatcctcaaattctatttttaaaatttgataagaaaagccatttgaaaaaaacattatttttaataactaggaactgaatgaactgatttagagctgacttactctgtgttttatcaagggggtagttacaaaaaaattgagtgctaaaatgctaaaagactagttaatgacttggatgagtactctttgaatatgttgtaactaattgtatataatagcagcatggaggtaaaagtgttaccatttaaaatacatatatacacggctatatctcctgtagatttagaggattccattacaataaaggtgctgctaattcttcagtaattgaataaaatttgaacagttcatcgttaatatccctgtgcctcagtatcctacaatcttttgtgaaataagtacatatgcccttttatgcagtgtcacagcagctagatttaccattccattacacaaatgtggctccttaataaactgctctaatatgtctttccagtgctggattttgatagcttttgctaaatgcagataagagttaaatgttctttgtccctttgtttttattcaaatgttttccttctaaattcattttcaaatttattacagaagaaaagcaatggggcaccaaatggattttatgcggaaattgattgggaaagatataactcacctgagctggatgaagaaggctacagcatcagacccgaggaacccggctctaccaaaggaaagcacttttattcttcaagtgaatcggaagaagaagaagaatcacataagaaatttaatatcaagattaaaccattgcaatctaaagacattcttaagaatgctgcaactgtagatgaattgaaggcatcaataggcaacatcgcactttccccatcaccagtggtgagtgttgtgtgtgtgtgtgttaagctttagtgagattgaacagggctatgttctgcctatatgcattaagtcaatcagaaactccttaaattgaagcctgcatatggtcaccatatcatgaattctataaatctaagaagctcattctagcttgagaaaattgtacttattttatattgcagtccttgtgcttttcaaaaaggtgaaaaatatatggaaccacattttcttttgacttattttcctgcaagcattttaaaaagaaaaaaaaataaaaagattatccagaattatctctcatgcagacttagcaactagaaacaacatgaagttcacagatttgctaacagtgatttttaaaaacacatcttagtttccttttttatgatacaccacatgaaaatacgtggaaggaaactggttattttttgtattgctatgctctaaaaccaaaaactaatccaaatcatagtctaaatcaaatttaaaactcatatccttcattctattgtattatcaaattgacttaaataatctcatctttaaggtacctcagatataagtattgtcctatttatattgttcaagtaggtattttcctacagacaagctaagatttggggtaaaaaaaaaaaagagattatttttgcacaatttgcactttcattccccaattcccagctactaagtttctttaattgctgaattctgggttccaacatgtacagccttttctctgtttgataaatgccaccattgttttctaaaaatggttgtgaggaacagatgaaggctctcaaactggcagctaatgtgttcttggcatcttctttagagagatgtgatctcgtacagcattccccctgaacagagcagttaataaatgctgaaccattttcgagatgcttcaggaaacatctcaactaacctttctaaatgaattgtaatcatccatcttttgagaataaacttttgcctccctgggatgaaaagtgtctataatgacgctttctttagtgtttaatgcttataatggacttgatcactactgttggtaacaaccaaaatgattgctaagagaaactaaccacagtaaataatatttaaggtgatttttaatcatatactcccctgctactttaagatgtcttcttgaaaagggaagcatgaaatgtattagttttcttttccttctataatggaaggtgcagattttaaagttacatattggcctgtgagttctagtaatggtggtattttaaaagcacactctttcacttttcagtggcatctttcaaattatttttcacttactgaataatattttttactgaaaatctccttaaatgtctaaaaccagtttacagccatgtctgtgcagtttattttattcacttctctgagtttgttctctgtgtaataaactggccctttggaagctacctggggtaagtaaaagaaggcaagttcagaggattaagtgaacacatttatgtgaaagcaaatgtaccggcacagtcccagaaacatagtggatgtttgccggaatgtagctgaatccaggaaggaagagattccctcttttgaatggaatatgtatgcctaagttttctggtagctattcctccaaccagatacattgctaaggatgcagcaaaatgtggtggtttactctaagctcttctcaacatctatttttaaggaaatatattgacatgatgtggttaagattctgatgaaaaaatgttaagggaagcagagtgaaaactagatggagacacccagagagagtgacctcggagttactctgtttctgcaaaccaacaacgccacagaccaagggaccctcagctcccattcctgcacccacacctccagtttgttccctgtaatgtgagaacctggatctcctatttttgtgattcctaaatatttataatttttcatagttggtgtggaagagtgagctgttactactttaggaaaaggtgagcaggtttctggatgtacatgagtttaaagagaggttgtaactgaaaacatattcttggctttagaatctttgccctctccttgataacccgtgtgtaaatatagatagatatagatatagatagttttgttgttgttgttgtttagacagagtcttgctccgttgctcaggctggagtgcaatggtatgatgtcggctgactgcaacctccacctcacgggttcaagtgagtctcttgcctcagcctcccaagtagctgggattacaggcacgtgccaccatgcctggctacttttggtattttcagtagagacagtgtttcaccacattggccaggctggtctcgaattgctgacctcaggtgattcgtccgccttagcttcccaaagtgctgggattacaggtgtgagccaccgcacccagccatgtacatatattttataaatgacatatgcagcacttcctctccagagccagataagcagaaataacctaaaatccagctggtgccatgatcaaaatgacaatgattttggactttcatgtctccagccaaaagagcagacaattatacatctatactttcttcaggcactaaaaaggaaatagggtctacacaagttaatgatatatcagaatattttatttaaactatggtttttatactacaaaagcatcaatcattacattaatagaaatgaggaaatttcaaataataaattattcataacaatggtttacgttggacttctgatttatgtttcttttgaagtttttaagataaagtcgtgcctcacttattcttttcatttatttgttaatatgtatccatgaactataaccaatttgatctcttttatcatgaattggttttattatacttgaatagtttcgctatatatattgggcggtcaaattaacgaatgaaatgaaatgggaggaatgaatgaatcatataattatatgtatatacaatataaacttatctgaaatttacttctcaagacaaagtgtcagaagcaagacaaatcaagattttaattgctggcaacaatcctattgtacagttagacaaataaacaaaattttagtccagattttgccttagcccttgattttgatatagaaataaaatataatgttggccaggacaaggcagagcaccaaaaaggcagaaggctaatgcaggagttaactcacaggtaaaggataataattctttttcttatcatgttccagcctgctgataagataccaagcttacagggcaaagaatgaacatcacccaggtttgccatctggtcaggttgatttggcatctgtgtaagttagaatatttgttaagctgttttaacagagaccaaaataataatggcttaaacaatataggtggtttctttctctcccaagtgaaagtcaaagctgatagacagtccagaggtaaaagagtcttactccagtggtcattcagaaacccaggaattttctgcattattgcttctcgtttcctagagtagcactgctgccttaccactgcaagtacttccatgcaccagccttgggatggaggaaagaataaataaaaagcaagtggttttctttaagagtttaactcagaagttgcgcgcatcactaccacccagatcccactgccacaatttaatcacatggacacattcactgcaagggagtctggaaaatgtagtgttttgctagataaacatgtagtagccagctaacattcggggttttattactaaaagacaaaagaacaaatggctattggtggactttgacagtttcttccactgggtcctgaattatattgtatctgcatcttaaggttagaattaagtaatctcagattatttcagagagttcattaggaaacgggatttcttcccatatatgttttaaaatattcccagtacctattaaatccagaatgttctaaaataattttctaatcactaatttataaatactagtgataccgtgctgcttgttagctaacaacaggttgaacagagacactccagtgtccctctgtttatgcaggttcactgttttttaaggcaggctgttccattgctgaaagaaaagtcttccttttattaaaccaaatatgtaattttgtccttgattgtagttgtactctttaaaggatgaacaaatggtaaagccccttcttttaccagtgagttttcaatgaagcagaatgactccaactccaagttcagtgtgcaagatgttttttaaggagtgaccttggacttaatacctgtgatgtggggtgggcagagggagaagttgagctgctttacacaacgaacaacagcctgagctgatcccagggaaactcaggaactagtaggagccttcagagttagtgtgagtttggctaagatgaataaccttgatactgctcaaccagtcagtgctctgatgtgggccacactaggaaggggcatgcccttgggttaggtagctctctgcagttgaggcagatcctgaggtgctgacagttgaaggctgccaatagccctcccagcaactggtgcaaggaaaccttctgaagaagattctgcatggtgcattttggtgtccatcccaaattctctgttcttgacataaggcctagtgtgtcattgccattcaattaatgcttgcaagtgagtgagtgagtgagtgaacaaatacatgaatggaaccaggctaaggacacagaaccatggcatgtcaccaccctccagttttacaaccatccactgataacacccttcagcctcctttgttcaccacacaatgattctcctaactgtgccctaatcctgggcacatattttcattctttttttccagaacaacactgcgtttgagagacctggggtgtctatggcattgcctagacctaccaggccagaaaccctatcagagagagtgataggttcagtttgccctgtttctttgcgctggcacctagggttatcaccttcttttccaagtgctttctggctatctgtttaaatattttgttctagaattttgggttaatcacaagccagtgtgtagtaacagaaggcacatatcacatagattcagattgtcctgggccccagcccaggtcgaccactttctacctgtgtaaccttagacaagccccataactgttctgatcctccatttctgccactgtaaaggaaggatgataagaatccttaaggactttttgtgcagaagatcctaataacagtacatgatgtgtaattggtactctgcaattgttcatttcttcattacttaacctagattcttttaaaaaaaccacttctccttttttgagggtcatgctctgcttccccatgttcagccttctgacctaacagcatactgtgttttcatgtcctgggttaaaatgtatctacatctcgaggctagaattctgttaaagcagcttggaattctcttgcctgtctcagactttaattctgagccaaatctgatctgccttttagaggaactacttttaagttagttttctccatcttggacaattatggttgatttctctttaaacacaaacagaaactttgtacataccccctgaaggaactgaggtacagtgggaaaagtgccagccctgacctcagcctcttgctagcagtactgcttaggtaaggtacttaaacctcagtgagagtctcagtttctttctgtctgaaatgggacaaacaaacagctaccttacagggtggttgttgccatggtcatctctttctgctagtgcagtgtaaagaccactctccctaaaggaggagatagagacagatgcaacacgaacagttctgtggtttgcttgcctttacaccacactctttacatttagggtagaagcaaacctccattatatcatacaagaaaaggctttgttcttaaagagtaaaataatttttgaaggaggctaaataaaataatcagtgcaggaattaattataaggaaatatgacttcacacacacacatgcacacacacaaaaaaaataaccaaagtcagaattcaacatacaattgaattgaattgaatacaattccctttaagataatttgagggaaaaagaaatgacacttactccaatgatgtcccaattactcaaacaagagggttctacctccttttagttgatgacttttggtatgttgaaaacccagtgccttggtttcttcatctattaatggggtgactcccatacctacttcattgggctattttgagggttgaatgatttaatgtatgtaaagtactcctaatagaagctacatgtaaagattgtctcattgctatagagcctagggcacattttaaagaatatcattaatagtgataaataactcaaatttccaaaagtaatttagagccaagaccagtaattaattacccattaattacccaaagcatcaaactgggaaaaggtgttttttgtgatgccttttgaagacaattccagaaggaagtatccctaaattgttttgagtaccatcaacatcccctgaatacatatggtacttcttcgggagacttattgaaggctaacattcacaatggcacacttcattgtgcatcatggataattgactttatttctaactcccccttcaaatcatttcacaaaatatatgttgagcaccttccatgtagcaggcactgagagctaataccagaaatactgaacagtctgagaaaacaacatctagtagcaaccagaagctgaaatttttcttgtggttcaaacgcttgcctgtcttcacttcagtttcctgattggttttctgcagcccacattccccctggcctccatttctaggtctcctggcttgctcacccttcctagggtctcagatacggacatctccattccttccaaatcccacacggagcactgtctgacacatctgcaccatgtgctgtgctcagcaggtaccttaaaacctgtggctcccatggcttttgtgggagtgagaagacaaatgctatggtttaatctttgatgtgatcttttccttttataatgtgctcccatggattcctttatttttgtttttcagagagccaataatcccttctggcttaccttgagaaggtgtcttttaactacaagcattttgttccttactgattaagatactgtgctctggagtaagtcagaactaagtttgcattctgactttccgtttattatccatgtagccctgagcaaattgcttaactctttaagcctcagtcaaggcttaatcgagtgtaaaataaggttaataatactgcccacttcataggatatttgtaagaattaaggaatgcatataaggtgcttagtactttgtaagtaaatttatgtaaggtctaaaagaggtgcttagtaaatgatagctattattaatcaggataacaataaaatatcaaagtcatcctttaagctcattgatgactttgagaacttatcatggtgatgaatttggtagtggcagctgtgaacacgagtgctgtgtgtcacatacattaattcattcatgctcccaacaacctgtgagatcagtactattgatatccccactttacagatgagaaagttgagacattgagggatttattatctcactcgaagcatcacagctagtaactgaagttgctgggatttaaactcagaaagttctgtttctaattgagaactcttaaccactatattacactagttttgatgaaagccattgactctctttctagaaaaaaaagttcactagctcattcaaaatattttacatacaatttctgaatgctcacatgaaataaactctttgaaggatatcgatggatgctcaaagggcccataatcccagcccaaagggcccacctcacagactttctccccactgagttcatccacatccacccatagaagaccatccagtcttctatggtacagcacttcctatattgtaccacatgacaggagagcgaggctgagttgacaccttgccaggtcaggcttaaatgctgttgtgtgatatgtgatttctcatttattaaaattatcttattatatatgcagattgtttgcacttttgttttaaatgttaaggaatgatgtccattttatatggctcatttatttcagttcccctaatcagttaatcaattggcaagcactttttatgtcaatggcatattataataatgctatgttttataaatgcccagtcatgatcaaaaggatgaaatgagtagcagcactattaagcaatctgggaggtagtgatgcccctattttacggagaaaccagcacagaaagatcaagagacaaggataaatagaatgaacacaggcttttgagtatatatcttattatctgtgtggtcataggcgagttcctcaactcggagcttcagatctcatggctgtaaaatgggaaaaaaattgtgtctaccttcttatgacatgagaaaatattgtaaaatacccagttcagtgctgtctcccagaaaaggtgccattaaatatcaatcaccttctcagctttgctttccttttccttaagttcagagacttgtaggaggcagaaggaaaataaaaatagcgagggaggacttgagcaaactcacaagggctgagagaaatgatgtgagagcaggagctgacctaccctggcgtgtaggctagtgccttctcccttcctctggaaagtaagtggtacagtgaagtaaagaatctgacattgagtcatgaaggaacaattagtttaatcttcatcctggagatttgcaatgcataactttttaaccaaaaaaatatgaggagggggaaatagctttgaactggagacagtctggtgttgtttgcctgttccatgtggcccacccacccttccacccccaaattagcctgccagagagcaaaattcatgaatttgccgctgcttggtaacaccaccccctttcctgtcctcacttcagcagaaggttcagcaccccattgagttcagtgaaaacaaagagtcatcagtggaggaggtgagctccagtctcctacacaccagcattctctcctggtagaagcagtgcacagtgcaaggagaggctaaagattgcatgcattctgatgcaaggcactcagcccagacctcttatttagtaaattagaaggcagaggttcagcttgagttctactcatcaaggaaagcttcgtagggcaaatgtgatttgtattggtctataccagggatatcaaacatggggcatataaactgccactccatccccaaatcttccacagacattgccactaaatcccagacatgggcttagaagccagccccctctagacagacctgcaggcagctggacaaaaatcagctagagttaacacatgagacgcaacttttgtttttcccaggactcatagaggatagatgggaaaataggtggaaattttctttttcaaaatatatttttttcttctcaacattttaataaaccatggactgtg

SEQ ID NO: 2890 - DNA, 6361 bp, Homo sapiens
ataatatatatacacataaaacaacacgttgcccctccccaggctagaaaatagtaagtggagatttataaagtagtaagtgcttgcctggcactgtactaaactctttctaaactgcattgactgacttaattctcaaactcattttatgagatagggtctattattatccccattttccagacaagggatctgaaggtcagagaggttaaggcactcacccaagggcaccactgggatgagacagagccaggagtttctaccccagcagtctggctgagtctgggccctcagcccctgccaggttgcccatccctcagatgtggcagtgtgcctggcacccttcgcccctccccagcccctagagggagccatagggctttgtctcctgggcacccccgtttctagtcggtaaaaaagtggttcagggcagggagtgtagagtgccagggctcagcaggaagcacctgctctgacttccattgttatgacaggggtcaccatggcagaggcacagggaaatgactctgggaagagagggcagggaggtctaaggctgttctgactgaggagatgctgcgtgagctgggcgggaggacaagtaggagctgaccccaggttcctcagtgggggacgagtggaagctgaagaccccatctttctgtctctctctggcagttactaccttatcctcagctgtggggacgctccaccccagccggacagctggagggggtgggggcgggggcggggctgcgccccccctcaattccatcccctctgtcactcccccacccccggccaccaccaacagcacaaaccccagccctcaaggcagccactcggctatcggcttgtcaggcctgaaccccagcacgggccctggcctctggtggaaccctgccccttaccagccttgatggcagcgggaatctggtgctgggggcagccggtgcagccccggggagccctggcctggtgacctcgccgctcttcttgaatcatgctgggctgcccctgctcagcaccccgcctggtgtgggcctggtctcagcagcggctgcggctgtggcagcctccatctccagcaagtctcctggcctctcctcctcatcctcttcatcctcatcctcctcctcctccacttgcagcgagacggcagcacagacccctggaggtccaggggggcccgaggcagggtccaaacctgagtgagggccagccatgcctcccctcccattcctctggtccctgccttggtcccttgcctgggaagagggcgaggaggccagtggtggggacgcagagggtcctcagagcaggagtgacaagggaggaaagaccaaaaaaacaaccaaccaaaaaaaaaaaaaaaaaggaaagaaactaaccaacaaaagagaaaaccaaaaataatcacaacagaaaccagctgccccaaaggaaccagaggtgaaaaacaaacaaaaaaaaaccaaaaacaaaccaaaaaaaaaaaaaacccacaaaatcaaacaaaccaaaaaaccagtcgcgagccagacctcagcgtgctcaccctcactgctacgacgccaaataaaaaccccagccaggggcggagaagcctccagcaggtcagacctcatgccaccgagccctggctgtgggaccaacccccaaccctgcctcccccgtgggggctacagaaggaaaaagagaagatgccagcttcctaatcccagcccccagccctgggccagcgaagacagggcacagcctgggcagatgggctggggcttagcaccacccaccaaatgttcttttccagaaggtgaaagagaaagggcctgaacaaccttacaccaaatattcagtagcttcatccaaaggatgtacagaatttttagcattgtgctcaacagaatgtgtccctaccatgtgtccccttctcccctggcccccagctctccccacctgggcagggggtcttgctttaacctcctccctccccccagcaggggagagttcaagggaaggcctgcggacaacttttcatcccctgttcctccctcttttcccctttgaagggtgggctaggccattttgccaagttctagctctcacaagtccctcctcaaccctgtcaccctcctctgctctggaactgactccctccccagcctatgggaaggtggaaatttcaggcaagaggggatgaagacattcagttgagggcattcagttgtctttttccatcctgtctgtttccctgaaaaaaaaaaaaattcatattccagtgcctatccgtgggatccttcacgttctttgacattaaccagaaaccaaaaagagaactcacctcgcttttcccaccctgtgcccctctggtactggcgaatgcctctccctccccccacatgcacgcacgcacacaccccagtggtggggttcctcgagatggcatccccatcagggtccatgtggtggggacagtgccacagcctgtggtccccatctgagagggcgcggtggtggccaccactcccacaagacctccacaactcttggctggaccctgtgtttgaccagccccggacacgtctccactgacgacggacagaggagagacaccactgggagccaccctgccctcctgctattgtggaggccaacaaagttttgaaccgaaaaccaaaaaaacagaaacaaacaaacaataaatttaaactagaaaaaaaatttatatatatatataaacatatatatatatatatatataaaagggaaagaagatgaggactcttcaagaataagatggaaccgcgaggcggagccaagcccctgcaccggtggtccaggcccttgttccccaaggcggatggaaggacggatgcttctttctcttcacaaatacctcatggacgttgtctttgggaaagccggagggggcggctggggcagggcctgtccctcggccagggcagatggaagcgggtgggcggggctgagagagggtatcagggacaggggtgaagagccccaaactcccctcccaaatcaactgaaaaagctttaaaaaaagacaggaaaaaaaggagtaagaaagcaaaaagaacagatgaaggaaaacttaacaacttttgggtggtttgattcctcctttgatttctttttcggttctcttttgtctgacctctctcctcccctccttcctctctcctcccctccttcctctctcctctcctccttcctgtctcctctctctccctttgctctcctctcttctctctcaatcttgttctttctgtgtctctcctcaaaccaaagtgttgcagtgaaggacacgagccattgaaatcagggtggggcctgacagccgtagtgtggcccctgccccttgttgggcaggagcagagagagaggagagccctgagaccgcagggctttggcctgggcagcttccactttctgccggacactctgaggagaggcagatggagctccaggcctcagcgttctcttttttccttgtctcccttctcccacccgggaaatgaaactgttgggctgggcgacggaggcagcagagactcggccattgcaggggcctctgggtgccttgtccgggcagtggtgaagtagccgcccctcccaccccggcacgatggggcctggcacctcgtctacccaacctcaccggaatgtaagcatctccgctgaacgactccctgcccttaccctacctctgagtttgtccatgtttatttcctgaagagagaagggactggcaagagggcttgggccccagcccaagggtggagagggggccaagggctcctgaccaaataggaaggacatttgagcagagcaaaatgaaaggaattacaaccaaaaaccccctccgagaagacaggcagcatggaaggcatggtggagatgactcaaacaaaaactatgattctagaccaaaaaggaaaaaaaaaaaaaaaaaaggaaagaaaatccaggactcaccaccacccacttcatcctgcttcctccccatcaagtcccaccacctgggacctctccccaccccagtatgtgggagtggggtaaagaggagaggaggagcagggggcagggatggggcagatgccctgatgttggtggagggacccctgtgcagccgggggtgctggggaccctccccatccaaccctcacacctaggaaaagaaaaacaagaaaaaaaaattcctgggagggggaaaaataaccaaatcccaagctttaactacagctgtgaaaccaaatattgggaagggggtaggagggagggaggggcaggtgagccccaggtctccccctgggcccccctcccctgaggactcgagataaggcaccaaatacctcatagaactttaatgttaaaaaaaggaaaccaaatatcgttggctgggggccagccagggcaaggggctggggggctggagggagccagggttgggaaggtgatgggggaattcatgccccccacccccatctgccccttacactctggtcccccgtctcgactccgggaaacaaaactatctcatcgtttttattttgtggtctgtacagagcctgtgtccgtgtgtctgtgtatgagcgagagagttggagggctggggagctttatgtgggggatggggagggcaaccccaggctaggctatgggctaggttagatgtccgaggttgggggccaagggcctgggctagaaagagaggagagatgagtgggttggagcagtggggagccctctgaatttctcttctccccaaccctgacctcctacttaagggagggacagagactgggtctaccctaatggtgggccttttcattgtgccaaaaaaaaaaaaaaaaaaattgatgccagtaactaaaccacctctctctgttctcttctggggggtggggtgggtgtgtgtgtgggggtgggtagggatggggaacccaagccccagtaggagttggggctgagatcaggaggaggggaaggatatgagttttccatccatctccctggagaaggccatgacgggctctccaagccctggggagatctggcgagggactagccaagtcagggtgacctcttgacctgactagtttttctaacccacatgaacaccagggtgcctctctcttcctctagcccagggtagggggacctgagtgagagagagagtgagacagacagcaagattgagacacgcgggcccccactggtctctgagtgggaaaggcaagtgcgagagataaaggcctccaagagaaaaaagaaacaaaccaaagatttaaccatttaaaaaaaaaaaaaaacccacagacaactccgctacctttttatatgttggaaaaaaagtgaaaaaaaattaaaaataaaaataaaaaaaaatacacaaaaactccaagccgcaagtccttcatgcggtttaaactttgacctcagcagtctccaaagcaagacgacgatgacaaaggcggaaacaaagaaaaaataatgtatatttttaagtatttgtccttgaattgttagctccttgttaaacaaacaaaaggagagaaaaatccagagagaagtgttgctgggatggagacaactatttactatgtctgtgacccctcccttctgcctccctccccttcctctctttcctgtcctctatccttgctgcccctcccccaatatgtcccccaaacccaggggctcagtatttatttatttatataattgcagggtgactgggggcctctctcggcaactcgtagagagcctttggataatggcagggtggggaatgggcgaggagtctttgggaagagcaggggcctgaactttcaactcctttctggcctcttgtcccactgcttccaccatcaccttccaaatccagggctgcactagggcaaggtgaccaccctacttggtaaagacctgattggcgcagcccattctggtgtgggtgtctttcaccacccagaatgaccaggttggaatgggggtgggtgaagttggagggggtggcaagtacaaggcaagggtgcccaggaaccggcatccagaaatcagccctggagtagacctgcctttcctccatccttaccaagttagcctccctttcagttccgtctgacccctgtgttggtagccccttccttcccttcctgtaccccctccgtctcttctcgtggtagcgggttagtgtttcagtgttcttaactccaatctgcttgttcattgtacaatgtgcttcttttaaggccccatttttgtaacttgagtgtgtcattcatctgaacaacaaacatcaaaaaataaaaaattaaaaactgtacagagagaaatg

SEQ ID NO: 2891 - DNA, 2473 bp, Homo sapiens
acggagtcttgctccatcacccaggctggagcgcaatggcgtgatcttggctcactgcaacctccacctcccaggttcaaataattctcctgcctcagcctcccaagtagctgggattacaggtgcccaccaccatgcccagctaatttttatatatctatttttttattagagatggggcttcgccatgctggccaggctagtctcaaactcctgacttcaggtgatccacccgcctcagcctcccaaagtgtcaggattacaggcatgagccaccgcacacagcctaaaatactatttaattcacaaatgatccattcacttcagaacaaacaaataaatgaaaatagctccataaccacagatgtgacaactcctcctggggcactgtcacccaatctttactcaaatgaatgcatgcattcccaccagaatacaggatgtggggacgcgtggctccattcacattagtgccattctcagaagcatgactaggtgggtggctcctacagatgacgtttaactgccttcatcttcacagaggacagcaatcacctcattgagctttatagcttacagaggctaaaaaccactctacggaggaaatccaggatttccagtggtactacaggagatgaagctgtacacaggctactgaggactgaaggacaacttacttaggattcggaatgactacccagcttgtgagtggactaaggcctttgattctcctgcttcttctcctccctccttgatcttttaattgctcataaaaactctatgaggtcagcagagcaagatgcaaagaatgtgtccaaatagtccatttggtttcttttgagtcaatcgagttaaagtgttttaagagaagatcaaatctattggctaacaagaggaccagaggtcatgtgtggattttgattgtccataccatgcgtgtccaaaccagaatgagactcacagaagcagagaataaggagctatgagagaaggaatagaattgtttttcagctttacacatttgagagatgcagaaaccgatgcccagagagcataacggacttggtcaacgtcacagaacttgtttaaagtaggataaaaaagcacgaagtcatttaatatttgataactagcatcaagtatgttatattgaatatatatatttatattaaataataaaaagtttcatctaaggctctatttttaaataacagttgttttccattatagatctgcaaagacaattttataagtcatctgttaataatatgttatttcaaagcaaactatccatcaggcaatcataaagtatgctaggaggtggcatggcttttgtttcacagaagaaaacagagtgagatatatttgatgactgaagcatagaagttcctttgagccattagccaacctgctactgttcccgcaaagatatcttaaaggactgcacaaagtgagcacaactgttcctcctgggaggtagaaagcaggaggggacaggcagggaaatatgaaaaatgaatctttccatcccctcatttgcttgtcactgtacacactctcatgagacataagacacactcttatgtctggaaggtgtgatttcaaattttacacaacctgaaagaaggaaaggttctctgtcgacactggagaggtaatagggcttggcatggggagagatgaaattcgagttacacttgggacaactttaatttcaatttataataaaactctattacaaggctatactacagatagtcagtagaagactcaactcaagagcagagagggctctggagaaatgtagtagacatggaaaatgacttttgcatgggagaaagaatacagagaagaggaaaaaataaagcctccagcagtaaaccaggtcttccttgaccctcagaaaaatcaagaaaggaatattaacagtactgtggattgaagaaaagccaaataaaccttccgcaataatagcttgtcttatagatttgcaaaaagtaatcactggagaaaatgacagggccagcataattccagaggaaagtgaaataagaaagacacctttcattttctctatggggacagaaaatatgtggtggcaatgtagggttgtctcagaaatcttattggccacatttattcctctcattaaatgttgatacgtgtgacacataatatgttctgttaattaagcctcttaacataacttcgtggacttcagaagtttgtaggactcaggggaagaagattctacaacccagcaaacttccaagaaagcaattacccagaagagtttatccaagtgtgcgtggctgacaaagctgcctcaccatttcagaacagtgcatctgcttctctaactgaatgctggctgatccagaggaggaggttcaccccaggattttgtggtatcaggaaaaggtacctcaaggaatgggtaagcagaatgtgatggaagcttacccagaaatac

SEQ ID NO: 2892 - DNA, 819 bp, Homo sapiens
agaaaattgtgaccttccattagtttcttctctcattagtccatgcacacggggcatttcctaaccgaatgcagctgggcagaattaggagggagggtgtgttcctttattcaggaatgtattcatagtggcccatatggggagtgggtgtgggcagtgctaagagattctgaggaggaaggtggtggtgtgggagcatcattgaagtggagccgtgaagcagaggtaggattttaacaggtggaatggaaaaggtggccttccaagaacgtgtgtgacataagcacacacgcatgtgcaatagtttggtgaagtggatatgtgaggagagaggggaatgatcaggttaggagtgatcagccctacatgatcagaggtggggcctccagcatgggagacttacgtatagggctgagtttgttttggaaaggtcacttcgaggggtggttggagtagagtccattcagaagtctcttcataaccatgaccttatttggcctgtgctctgttgactgcccccagacagttaccatttactgagcaattccagatgccaaggttcattaggcacttcccatgcaagaacactgtggagtcagcaatcgatcctggtcttacaggtgtgtctgtgtctgggaaaatggatggccgtgtctgagatggttttcactgctgaaatgaaagcttcatttgtaagccaatcctttcttactccccctcccttcagatgccattgtctccctcattcctttctgctgtcatctatggggaggttgaggttgacactttatcactctcacatgccagatagaattccag

SEQ ID NO: 2893 - DNA, 1486 bp, Homo sapiens
tactctccaaagactgattgggtaggaccagggcattggcatgttaaggctcgccagggaattctaatgtgtacttaaggtcgagaaacagctttcatcatcacaacaacctgcaaggtagggatttttagcttcattggatagataaagaaaatagggcccagggacaacagacaacttgtgcaagtacaagatcagggacttcaaccttggatctgtctggccaccaatccctgctgccaatttgcttcacgtgtgtttcatgaatccgtaggtaaagagtaaacagacagagcacacagatgaggaaaagggagcccagggcagcagcaccccacaggagcttcgtgcacaggaggctccaccaccaccctgagcctgctgtgcagcatgggggtcacctgcaggaacccaccagggcagagcctcagctctcagcctcccggaatgaaccatgaacccaaagcaaagagcagaactcctttgacacctccagcttcacagacaaagatgaatctcctaaggcatttctgaaacatgcagttctgaagtctggccagccacaccaaagagcttttcgcaagaaggcacaggccaggtagaggcagctgtgcagtgggaggactgtgatgttttggactagaaaataagacgcaaatgaggccaaaaaaacacaggcactgcataaaggtgtcttctccccactttataagccttatgtgtgataatattcaatgccacagcaaggcaagcaaataggtccttggagggagggatagctggattttaatcctggctctacactaaggtcttggactacttactgcaggtctctgagcttcatagttttatgtataaaataggatgaagaccatccccaaatccacttcgatggtgagaattaggtgacatgacagcagaagggcatttagagtttggcacagaagggatctcaacaaatggtagctgtgtttcatcgttcatttgagaactgatgtttggatccttttctgcatcttgaaatgtcccaaaatattcctccttaagccctgcagttggatactcattgatacttctctgttcaatttatactgcgagcaggggagggaggcttgagcttggttccatgaacgaggttgaagggtgtaagtctcccagcttcatttctgtctcctcctcacctggggagccatggccaattctcttcccaggtcacttgacttctccatgaccatgactttcaccttctgcattttggaacaatatactcatgaatgctaagaagcttttgtttctttctgcctgtgctgagcctgtctactataaaagaaaaatcacaatggttgtcatagttatgctctttgcttcctgagtggaatagcaccggtttttatgttacattatactatattctggatctctctttgatggtgggttatggagaaggtttgccaattctttcttttacaattctttttaaataaat

SEQ ID NO: 2894 - DNA, 1114 bp, Homo sapiens
cactaattcactcactcaacaaacccttgagttcctaccatgcttcaggcctgaagggataggtccccagggctgaggtctctagggaaaggccttttcccagaaggcttgtaaggtcctccatcctggccattgttccgggattcaacctccttcctctcctcttgtctctagctggtgaccattcagagctgtcccagaaccccaagcaggctgccacgcagagtgagctgcactacgcaaatctggagctgctgatgtggcctctgcaggaaaagccagcaccaccaagggaggtggaggtggaatacagcactgtggcctcccccagggaagaacttcactatgcctcggtggtgtttgattctaacaccaacaggatagctgctcagaggcctcgggaggaggaaccagattcagattacagtgtgataaggaagacataggcttttgtcctgcctcgccatcggagctctcatgggccccaggaagtccagggacagctcccttatacctggcccacgtccttctcagcctgccctcgacaacagtgaccaacagacaggcagctgggtttcccaggccatccctctgttgccatcagcttgattggcttccccgagggccagcagggctgggggctccggagagcagcaggaagcactcccagccaccagtgcctgtcacctctttcccctttgcccctgcttcatcccagctctgtgtgtggaggacaaagcttcttcctgcgtggctccaggaaaagatgtggctcacgtaggtggcacctgccaatagctttgtcaatcacagccccataggaacgtctggaattgcttgggagttggggagaactgtcaagaagagtgaagagagtgccaaagcggagatctgttcacctgggggccatggaggggggacccactaaagatcaagatcaaagattctccccatctcacagacaaggaaactgaggccagagggaggagagaattgctcatggctccagaactggtggcaagtttctctggactcttaggtttatttttaatatgaaatataaaaacagtttcaaatatcttattgagggagaagtaaaaacttatttaaacaa

SEQ ID NO: 2895 - DNA, 471 bp, Homo sapiens
gtcaaggtggaaaaaaacagtcgtgtatgcttctttaacatgacagcttgcctggcctattttctgtcctttcttatcataaacttcctactgcctgctcctggtttgcactagtcattagacatggaatcaggaatacagacttccaggaaagagtccttcatatcatgaaatctgcagatgacacttcaggcacctctgctatcaggattcccctgggccttgagcgactctgagacatctctgggagacttgccaacagagactgcagccagagcacccacaccagggagcagattctgaagcttctgttgctggagcagttcctgaccatcctgcctaagaagccccaggcctcagtgagagagcatcatccagaaagcggaaaagaggctgtgacctgcttggccatgtagaagagaaagactgatggatcaagacagcagatcagaatctaaggttgaagatatg

SEQ ID NO: 2896 - DNA, 633 bp, Homo sapiens
agaaaatactgtgttgcttagccctgagattcttcaggagcaggtcacccctgtgagaagatcaccttcccatcctgtgggtatccacctcttcatggcttattcctaaaagtctgaagactctaaatttaaacgtttttcttcatttattcctaaatgaagatattctcctcatttaagaaactgcttattttgacaaaatcaggagagattttatgcattatattcataaataaatctctctatgttgatgaagaaaagttaaaaattttaaatgacatctgtagcagccctcagcgcagtttctcatccgtgaaaactcagagaaagaagaaaattctcaacgctgacaaccacgactgaagacaacctcgtgtttcgattaaaggtttgcaaaaacgttgctgactacagggcaggtgatgattaatagaggaaaaccaatcctggaaacactggctgatggagagagcgccagaggaaggggaggatagttattcctctttgcccatgtgcctgctgtctcagagacccagaatcttcaccaaccataagtctaagagcacgagaatgaggaatcatggcacaaaaggatgagtggtattggctccagatctatagagcactaagggg

SEQ ID NO: 2897 - DNA, 18532 bp, Homo sapiens
gatccttcgggcagccgcgacttcggcttcgcgagtagcattggttccttgggtttatttcgttttcctctctcttctccaccttagtcgcccctttcgcgctgcgctgtagcgtgctctcacagcctttttgccttgaactgaatgcaggtgggaaacaggtcggcgtgccgaaagacaccgagtaggtagaaataaggcaaactcacagaggcgcaacaggtccggtcctccgtggccagggcgagccgcggccccgcgtggcgcctcggccgttgccctcggaccctgagcggccactgttggggccctcgaaagaggtgtcggtcctctgggagtcggaagagctgtctgggtgggtttcgtcttgctttttaccccaccgccacccagtccccggacggagggtgcttttcacttccagctgggaggagagaagaaagcggggatggtgcacgcctgcgggtctggacgctgagcaaggcaggggtccgtatccgctcgtgggcttgactccaccaactagttgtgcagccacagggactgaactttggaggaatcgacctttttctttccttttaggattatttgaggtgtagagggtgggaagcgaagccgagacggccgaccccgccacgatgctgctgaagaagcacgcagggaaaggagggggccgggagcccagatccgaggacccgacccctgccgaacagcattgtgcccggaccatgcccccgtgtgccgtcctggcggccctcctgtcagtggtggccgtggtgtcttgcctgtacctgggtgtgaaaaccaacgacctccaggcgaggatcgccgctctcgaatccgccaaaggggccccttccattcatctgctgcctgataccctggatcacctcaagactatggtgcaagagaaagtggagcgacttctggctcagaaatcctatgaacatatggctaaaataagaatcgcaagagaagcaccttcagaatgtaactgcccagcaggtaaaatggaacttatttaacaaggtttcctccagagcagagcattttaaaacaaaggtcctgtgtctgtcaagtctacctgtaataatagtaaagaaagaatgcagacccaacttgctttaataaaatcaacatgtctcattcaaaaggatggcaaataaagccccaaatattattttaagcagcataccaaggcctgttatgggaaagcaaaggatataatcaccaaagaaaatataggcaaggtgatgtacaaggacaaacttcttagattcacagattgaaaaatattcttcaattaaattgtcttaatgtctacagtgaaaaggactgtagaactgttagattctgaattcctggctcgctcttattgtgttagtgcagagtttttttttttttttgttttggtttattccctttggcatacgtttatgttagtaaaccaccttcacttcctttcctgctgtttctgttctattaaaaagattccatctcctatcctatagctagagatgatgactgaaagaaaatgatttctttatcttgagcttcccattacaaactcttgcattctcagtgacttttgaagaagaggctcttatatttttacctttttttcctgtgtagcttcagggaactatattaaaggcagcatattagtagaaggacagagaagaaggacatcatgaataagacccctgggtaatcattaaatcttccttcatggacctttgagggcttggtagatatcttagacctaacaatttagaagcccttggaatatggccattggaaacatctagtggattcaactcatgtaagtcatgaaaaactcccatgagttgagatgtttatttcagataaacattgttaatacatttatgaacatgatagtttcttttatcatcactcatggaaagtgagtctcttaaaatttctttagtattaagcaacatgatacttaggtgcttatatatgaaaaggcaagttcttgtattttttcatattctgaaacgtttccccctcatgataacttgttttggcagagctacacaaggcaccacatttagaaattttaaatgtcaactccaggttgtaccttatacaaattttactatttatattctgttaaatttttgaacataatagagctatatctttaaaatgaagcccttttgatcgagaagacatatatgttaggtaccagaaaaacagagttaacctttgacagtgtaggtctcattcttagttgttttatgttggaaaatatctcagaagtcagatattcaaggaaggcacttttctagtgtgggaattaactcaaccacctcatcagcctgtagggattatttaaattcccaggacagttggtgcaggacttcactgatcataccacgtagagtccagcatttttttgtatacaatattcttactagctctgtgaaaaatagctagtgcttaattaatagaattcttaataaacttagtaaaaatagaaaagtgacaaccacaacattgagttctattttttgagaagatataattgtttcgtgatgtttaatgtaggctagctactgaagtctaacttgcaatctaaaagaaatctattacatttaaaatttactgtatattatcttagattattttggaccatttttcatcttagcatgtgaacgtaataataaatggagatttcctaggcttttttgttggctcccactaatagctgctttacctcttgccaccaccagagctccacattacatcagtttttacctggcagcttccaaggtaaacatttgaaggtgtgcattctaatatgcagaatcaagcaggtttcttgctgacaaactgctattatggaaatactcccttttgcttgaggaataatcagacatcatcaaaataaggacattacgttgaaaataatatcttggggaaaactatttatttctaatacggccagtgaggagttgtcttagggaatgaatgggctgaccaagaggattagaaaagagattcagcacttccacctggtttggctctagccctggtttgcagtgactaagagttgtcacctagacatctgtttgtagggcagagtgagacaagtctgtgacctcagctcagttcctgtggacagatgcccaccccttgaagttaacactcttgttaacagttttagtcacagagccaaggactgatagcaaagaagcaatgatgtgttgtttgtgttcactcatttcttttgatagaactcagtcccagtgaggtttattcaggtaggctctaagggtaatcatagaatttatagatatatttttatgcacaaaaaggaacctctgtgagagagagatgaaaaggacaattttttaaaaatggcttctaatggcaggggatgtactctctaatttaattttcacaatgaccctgactgaagtattagcagtctcattttacagatgaggaaactgagactcagagaagatgattaacttaacatggtaaaggcaaagtcaggattcatgcccacatctgatagaactaaaagcccagtctaccaaggaatagagaataagtataggttttggacctggataattccggattggaatcctggatctagtactaaatagctgtgtacattggtcaaactaatgaacttccctatgttctaatttcctcatcggcaaaaaaaaaaaaaaaaaaaaaaaaaaaaagaaaaggaaaaaagactaataataccttccttagggtaatagtttacctaaatagtctggtatattagtggctatccattagacaatagtaattactattctttttagtatattatatgctacttagctctgctgtgatctacagagacacatgaaataggtgggaaaactgagacctggagatgttgtataatttgctaaaaacccagtggctaattaatggcaggtttggactagaacactgtacttaattaaacaaatgtatctgtagattattcatgagataatcatactagtcagtatttcttggtgctatataaataaagattggttcttttttgatatttatataagtctcctaaattattcttacaaaaattgcagggaaaacttttgaccttttaggtaaaccatgattgaagtggataggacctgggcttaaaagaccatggggatattaaaaaatatctttacagttttaataccagatgtttacaaaaagaagtagcttaattatgtgactccttttcaattttaaatagcctattgcagtaaaatttttaatatttacctattttaagatttttaaaacagattaatagagttgggcagccatcaccacaatccagttttagatcatcttgtcaccctgggaaacttgcatttatttctttcatgcagtcagaaaagctctattttaaaaaatatttggtttaaagaaacccaaaatgataattttaaaaataataatcttaaaatttccatacaaattgaagctgtgtttagcagaatatttggtttagcagtaaccaaaccagagaaattcagctggcatctgtggcttggcctctgtaaaattcaactctaattggaaagaataagttggctctttgctatggctgtagaatttagttttgggttctgttcttggagtcctatataaaatatgcataaaccaggcatatctatgagaaggtttttatgtttcaactgataaagaacattgggaaccaggcagccaaccaaaagatgtgtagattacaaagatttctgtatcttactcatcagtagtgttgcctgcccaggatattaggtataagaacctctgtggtgtaatgaacgaagaatgtggatgcggaataaagaatccaaagttctaatcctggctttgtcattaacttattatgcaattttgggaagtcatttccaagaacacctcttagagtttctattttcatatctccaaaataggagtgctggacaagaatgattttgaagggcatttgtcagttcttcaggttaaatgaaaaggctgctgtatgccaaatactgtgctagacattgggaaaatgttgatgtacaaggcagacttggtatcttccctcaagaagcttacattttgatgaggatgacagacaaatctttaaaaatgatgtgaatgtacaggtatgacaagtgcaaccaagaaaaagtatagtgtgctttggggcagatgactaaaatctcttccatttttgtaaacccaaagattttatttttcttttctctggggaaaataaagaaaaaagtataattcttttctagaatttcacaatagagaaaatctggtttccgatgaaaataaaaactctagcaatggataaaaagctgatttgccttttaggtctccaagaatttatgaacagatagaggtacactgatacctggtatacttaccccatgtgaaacaaaaaaaggcacttttaatatataaagggttgttgtagacaggaggatgatggcttattcttctacttttctcctgaaaatagggagagttaggttgaataaggagagaaactttttgtctggcttactgaacagtaccactggacctggctcctgtacatttgtgataatcattcaatgtaacacagctagtcatttgcttggagagtttaactagagataaaaaagatacactaggtaacttctgaggtctctctatacattccaagtccatgaaaatgatggtgtacaaaataagaatacatgtaggcaagcgattcacataggcaagcaagattcataaatgcaaatgatattgcccctggtgactgacctcgttgcctatgttctcatttttgggtggaaataaatgttagctgtagcttgatggttgtgtactctttcccattgtataagaagaacctttaaattacctttctaacataaatttactttctcacataaaacttgtgtttcctagtatacatggtttttcacttatgctatatgtttttatcttaacactgcacaatctatggaaagagtgcatcaagtaaggggataataatgtgtagattttcaattatgtaaggtaaagcatagtcagaaacagtttgcagaaagaaatcaaattaaaatgctataaattttatttaaatgagaatagcaggcattcctctcttcttataaggccaaacaatacaatgtgacatctgagtgccttcaagcatccatgttaaattgtttcagtcctaatgagtacaacagtgtggatctaacacttttagttggtccaggagtgacagctggtaaaaatgcccagtcacccaaagtgccaatgacaaattgcctcttgaagcaatgttcttgtttcttagcttctcttgtctacaagtttttaagaagctaattcttaaactactcttttctctttcttaccttaataattctattttttcatgagctgggaattacttaaaagaaggatacaaattctgcatagagtttaattcattctagctcattcaaattatatgtagacataagaagcctctcagggccataatatcctactgtgcttctgattgctttgtaattgtgcaaaatcaactacatgatgttaatgaaaatagtatctgaatgtcaggcttaggtctagggatggagaaggggcatcctcttactaacaggattaggtgaatggagagatgatggggaaatatgtcagaatcaggactgctttgcagccctggggggcatttcctgtttcagggaacctcacaagacatttatccaaataacatcaatctatgttatcctgagtggaaaccgtccagaacctatcatgaaaaaggtttttatttcatactatcactttataaacaattatttggtggttttaaggaagctgagaatgtgaaaacaatgtatgagtcaatccgggctgcggctatagcctagtgtgcaatggttaaatatagatgcatccccagcctccctggtttgccaatatgggtgaagttccatgtggtggtttaacgcaccatgatatttagcaccttttccctggtttgtgttaaaaattactgtagtatgcccacatactcaattcttagacatggatagttactgcttcatttgggatttattcagaaatcttgcaattaagaaatattattttaaaattgactgttttaaaaaagttaagtatagaagagtgagaagcagaagtaagtggaaatcacttacaaattaaaattgagcacttttcattggcatcatatattcctccaaatgactattctgtgattcatttaaatgaaaggagccattgaggaaatggcaccagatggcaggcacctcccctttgtgacctctaggaggaggaactgagctgaatagcgtacttcctctcttctgcctccttcccagttaaacccctagctgacttctatcttttgacttctgtttgcaatgaaaaagattcatggaggaagcaaggaatttcttccacctatatttgaaaactctagtgtcctatcagctttaagatatttaaaagcatctagtagatttcacatttatattagtcaaatagttcatttagtagataaattcacagatatgaagtttaagctagtgtcccagtagatagaataaatgaactaaatgtaattgaacttacctgttgaggattttgtacttacattttggaatttctcaaaatccagaatcatttggaatcactgtcatgcttttgacataatgtcatctggagtcttcatttcaatgttaagttgccacataatatgagatttgaagcgcattttttatttttcttcatattgtgttatttagtcttgttgctaaattcatctttttgctataaagtcatatttagtagatgtagaccttatttgtcatgaataccaagactatgtctgttcatttgcgtgttaatcatttagattttaggagctctagtttcctggtttatgtacacaatgtttttattcttgtatttgaagtgtggtcagcacattttaaaacacaattttcacatttaggctaagtggctgagtaaattgtatgaattgtagccagctctagtttgtacattatggtaatattgagagtcagaatctgtctaactaaaagtagctggtcagggaaggggtaaagtctattttttcccttgtttaccaaagagttcacgtgtaaggagagtaaaagaggggaggaaaaagccccctttatccccttagctctcagaatcatatttctttatcatcatacttagaaagcttgatattttagagttcttattgttatataattctggacaatagttagggagccagaggaattctctgttatagctttgtattatacctccatttttgatctttaagatgctacagtgaaatatgtcaggaaaattgatccatttcttagcattctgatgtcttaggtcaatgctgggagctgtcaaaggttaagttgtttgtattacccttccaggaattatgaaaccccaatttgtcatctcagggactccagattccagctggcattttaagataatatatgatatgatcataagatgaaagtgatttccacaaaccacattcaaaaaccaatgcttttactttaaagtcatgccagaaatgctggccggttctagggctcctaagtgaactttggaacactaaaaatcattttttactgaaagaattagggcacaaggtcagagcagatgatgttcaaatggaaaaatgcttcttaaataactgcttttctcaggatggttatcaacttgattgggaatcaagtgggttaagtgggtcaaggatccagtgacttttgtgggcagatcctgacacatgctaactggtaagtggtctcatggtataattctgttctactaccagtgtcacttacgggctctccaaacccccatagatatacttacagtctcttcccagataagcggtctcatggtacagctgtattactaatctcacttgtgaactccttggcaggggctctggtttgtatctatgtatctctagggctcatcgtagagctctctatagaaagttctctgtaaaacagcaagatgtttatgatgaagatctgaaaatgtgggttgaggcttttaatatggtgcatctctttccatgcattactattctcatccccatgccttttaaacattttctctgagaactttgtgagccataacatattaaaactaatacaaatctcggagattaattagtacagggattttataacatttctttaaaaggctgaaccttttttaaaaatgaaattatatgagaaaccccataatatgaaattggaagcaatgttagctacactgattgacctcagagactagagcaggcagaagccaatagcctccatgctttctttctgctgcccacctctctccccgatgctggcccctgaggcatctccaaagaaccttaggactccataggacactattagaaaattaatgcaagtccaagccccagaggacttacacttgtcaacacagaagtgatctttgaaatactgtactgtaagcatgactagatgatggtagtaaaattatgtattcaaattaaagtctaaaagtgactattcatataatatcatctctttaatgggtcagagtattctagcaaggaagctgatgtaataatagtgtcacaggaaagctgggtaaatgcactgtgtaactgagcatggtactgttcgttagaaaaatctacatctcacttcatcctttttcttaaagtcacttattttttaagacttcaagtgacaatattgttcttgttcttttaatgacaattttctgtgtttcttcaaatttcttcccttatatttttacttattttttaattctagatattcatatggagctttattaccaagttacagcaattcattcttttaaaatgtatttacttaaagcacttgattttttgatgaatagttaatatttagtccacaaggtagtatatgaaaaataactctcccctaaattatgttatttatagaaaatatacgttataagacttctaggatcttctaaagatacttctaagatctctgagactttcttacttgatttgatttttggttgtgtataaaaatgatgatgtttgtatattgaaatttaaattgatggcacaatgagaatacatgaattgcacataagtagtactaggaagaagtctctaggaattaacaggattttagccaatagtgagcaagatatacaatacatttcacatagaaagtataaatctggctgcaatcgtactgtaataagtactgcaaaagaaaatttgaaagacaatactctacctcgcattgaaatgaatgcccactgtcatcagcagcactgtttactgtatgagtagctagctgtggacagttgtttggctaagtgaagcaccttcgtcacttgtctggtaggacacagaatgacacagcagttctacaagttatcaagtgttgatgagcaatttattttctctttaatacacagtctcaaagtatggacttcaaggaagactggaagagaaaatgacttcttttttaactggttactttgtcttctgcaaaaagactatcagtaaagcaacaaagataggaaagttgaacaagtaagaaaggctggaaagaccatataggccaagcttgtccaacccatgtccctgcaggctgcatgtggcccaggatggctttgaatgtagtccaacacaaattcgtaaactttcttaaaacattatgagtctttttgcaatttttttttctcattggctatcattaatgttaatgtgtggtccaagacaattcttccaatgtggcccagggaagccaaaagattggacgcccctgatacatgccaaccaaagctattataaactacaaaaaaagagacttaactaaacaaactgtatttcctaaatttccttcccaacccctatagacatactgacaatttcccaggattttaagcagcaagtctgacaagtgtgacttagtactaccatacatgttaagcatctggaagtttttaatttgaaaaaccccaaacctctagcattgagaaattccttccataaagagaccaggacttttatgtacttgcatataatttcctctgtacaaaattatttaatgatccaagctttagctatttctgaggacactttcctgaatattggcttggttctgcaaccaagttctatatgaggaatgctatatattggtggtaaaatttatttaccatttttggaattttaaaaaaaaggttcatttatttttatagcaaaaaatgcccttgaatggagaagtctgaggtatactttctgtattctgtgggtgagttcatgacacattagagtcagaatgtgttttattcttttaagctttcatctttttgagcagaaaacccttgcttccatcatcaatcctcaagaagaaatctcagaggaattgtataatcagtaacatgtatcccctgtatatatgtatcatacatcattttttctcatcattttcaagttattacatctgtacttttgtttatttttaatcatatactgctagcattttaaacattcacactgtttcacaattataggatgtgatgagaataatgttcattggattcctaaaaaaccaagagtaaatacagcaaacaggcccttaatcaacaagcattgccctaacgtgatccgtggttggcaagcagagtggacaggattgtctttgggaggtagccatatagctatgaaactacaaaaacagaggatgttctatgttcctaaataagaaccccattctactcagggggctcccctatcttccctccctttctctagcatggatagaacccctattttgcctccattctgttgatgacactttacctggattactgtcagcttctgatttggagcttcatcacccttgggtcccaaagcctctagacctttcctgggtgatagctatattcatgattcaatttagcagcataactgagaaaacatcaatggcaaatatcaatatttctcctacatttcaaaaagtagctgattattttctcaaaaattactgttaaaatataaatttcaaaaaagaaaattatgagtttcatacagatgtaaaattaacaagtgttaaagattttacttaaatcattaaagaaggaactagtaaggtgttataaccagttcaaaggagagtttaaaaacatacatatttttagttcaggaatattgaaatagatgtacaaagggaggcaaaacggactttttcacagtgggaagtcagttatactcagagtttgcatgtctatagataaaagtaattttgtttttctattaattatctacaacttacacagttataaaacagctctcaaagaatcagaatcagatacataggaaagatgtactgtagacaatgcagttttccataggtgtacaaattttttcctacattactaaagcaactacacaggaaacagttctttaggtaagcaaaaaattttgtatatatatgtgtgtgtgtgtgtgtgtgtgtgtgtgtgtgtgtgtgtgtgtatatataatttagtattcctggtagtaatgatgattgtttattattctgtttcctttcatattcctaacctatggatttgggggactgaatgttttcatttctgttaaaattagttatttaaaagacagttcctgtgagtttggactttatatactttatctgctaggcccatgcggtggtgctaattgctatgcttgcattactggtgtgatttacatcagtgtaaaatggaaaattgtaacactgacaatttgtttgaggcagacaccactttggaagacactgcttcctgtatttaggtaccaatgaatagttccactaatgttaaagaaggagttgctgacctcactttgtgttttggaaaattatgtacaggcagttacattagcctttctcccttttctgtacttccagggaaccaccctattaataatagtgcccattataaatatttaatataaaaaaaccagaaaagtaagataacaaaggggttaaagagcatctttgatcataatggattttgcagggaaccacattgtgattagaaaagaaaatatttgtgagtaaatcaattccatgctcctgtcttatatttttgactgtgtgtatttagcaacagagcaaacagagcatgttataccaactccattactgtatttaaaattttgagctcataaatgatatttgtttcataatctacaaaaatatctagcctttttctttttcactagcaagagatgtagaggaggaaagccttagttattcctgggcctgagtaaggctgaggaaggggaaggactgaaggaactttttgaatggagaaaccattcatctgtagactgcatttgcctgatatgagcatatggttgcctctgggattttacgctgctattttggccctcctggctttgacttcagatatctcatctcctagtttatttttttcttggatacttccagccagttcccatcttactcatgcatgtgttgttgcttcagacaacattgtttttaatccatacttcgaaagatttgtttgcctattcttggcccatatgtctcccattggtctgccttgtttgatcttgctttacctcttctacccacatgcaacccactttatcagctcctcaaacagctcggccttaagcttcctaggtatgtggatgctctcctctgctcttgcctgtctcagttgctgccaccttttggctgaggcaacttggattctggcagaagaatggctgaagctagatgatggccttgcctatacattctaggaagaaagtatgtcagaataggggctatgggtgaggggaatccattgaaactacaggtgggttggtgggttttgtagggaaatatttatcttcatttaaaagcaagttacattctggttgtctcctactactaggtagaggagggactaattataaatattaaacattttagatattagtatttaaaaatgatatattgtggatggtaactgacctctggtattacctaatgccagtcgactctggcaaaggtgaaaggtcatgtatatagcagcctttaaaaattttttttattcaattaactaataaaatgtttattgtgacttactgtgggtgaaaccctgtgccaaatgcctgactgtttagggaaataagtaggctgctaaaccctacttatttcttcacctaaacattagatgaagaactaatggtgtcagataagcagactgaagactgcaatagaattaataattacaaaagtatggcctgtagcaaaccgtatccaattttaatggacttaaaactacaatgataattggtatttgaactcataattccagtttacttttcatgacttcaaaaatagtaacatgttatcagagaaattggtatttggatttttttgtgtgtgtgtattatgatactttgcagaaatgctgctaacacaccaatgagatggtttttctggagataaatgatctctgccagttgttaggtcaactgtcacatttttaactcctccccaagatgccttctggcagttattggagccttgctggccctcctaaatgttggatcagactctgtggtcatgttttctagcgaaggcagaatctctgggtcttggttagactcccttgggttgtgagaacagagatcgaattaggtggccttcagtaacagtggtatatagattttcaaccttcccattattgatattttgggttggttacttctttattttggggggctggtctgtgcgtcataggatgcttagcagcatcctttgtttctatccactagatgccagttgcactccttggcttccataaccaagactgcttccatatcttgccaaatgtcccagaggaagcaaaaatcattcccagttgagaatcattctttacttattcccagtgaataaaaaaggcaagaatatatactctgcagctagttctcttagaagaacaggaaatgaagggtagtcagaacagtcaggatatatgatcatcttctcaccgggaggcatccattatagtgcctgctggggcctaagaattttatttctatttctattgttttatcaaagctgttctttcctctacattatagctgcttctgttgccttatgctcaaggtgtacctcaaggttgaactctttctttgtgtttgatgatagtattgttattattattaaatgattccatgcatataacaaaaatgcaaaaatttgaattaaaagtggtacacaatatcccatctctcttcagaggtgtctattgctgtagtttgttgcatattttcctaacacaaattgatttgcatcattctttttgaaggctatacactattatatgattgtaccacagtttaataggatgacagacaacttttgaaagtgcagatactatttcctgtttctaatttttctgtttcctgaggaaaattactttgattcctacttctattccaccagcctcaagctgtatatgtgggagcccagtcaattcttcttgactaagatattactgatgtggtatgctgctgataaatgcttaatcactctcaaacagacaaaaaaacaaaaaacaaaacaaaacaaaaaccaacaaacaacaacccaactctgatttgtagcatttgcaagtttttcgggtgtaaatatcctaccaggattgatttcaagttaacacagtaatgttaggaagtgatatttgagtgtttattagctttgcttttagagtaatttttaaatagtaagtttataaaatttgttttaataatcactgtgtttaacaatgggcttgcaaaatcctgaaagctgaaccatcagctctctcgagtcagcattcagcttctcacaaccactggcactgataatcccttttttagattgtgtgaattgcattattcgtcataatgttgtctccaagggacaacgctgccttggctagtattttagaatctcagtgttggagagagtgtgtttgaaagttatctagacatacattacatttgatacttgaattcccttggtgacattctggctataatagttggtgacataagtcattgaatttatgattatcatttgaaatagagctttcaattttggacaatttgttagaaaacttcacctttttgttaggttgaaattcttctctttatatagcatggatcatttgattctgtataccattcttgctctacatcataaaaaacaagttgagtacctctgtactatgataactcttcaagtatttaaaatgacctattatatttcctatcgatggctttatttttagaataaattcccttaattcattcagaggttcaagctcatctatttctttcttaaatttgtgcaactgattctcaatgaagctccagatgtggcctgacaggtgtatgcaagaatgggagagaaaaaaaacttccctagttctagaaactatactgctaactaagcagactaaaattataataactttcttgctggtctcgtaattctattggctgatactgaatttagcactgatgaaaatcctgaagtttttttttttatacatgctgttaagtcctgtcttcctcactctttattgtataggttttttttttttttcctgggtggggcatggggggacaaattcaagactacctatatatttttattaaatacttacctgtgtttataaaacctaaatccggccttgtcagaatttgttggaataattattctttcaataaatttccagcttcctttgccttcatgtgacttggaaatttgatgaaaactgactaatggtgttttcttctgattctgtaataaaatgcctaagcgtgagaaagttcagcacagagccccatggctttctggtagtttttctcttttagttgccaataatctatttatgagcacctttggaattgcatttttacagtgatccatttacttaattgtcttccgtgcattgcagtgctttcaactgtgttcctcagagcaccattgccttttcttttcttttcttgtttttgacggagtctcactctgtcatccaggccaggctagagtacactggtgcgatcttggctcactgcaacctctaccttctaggttcaagtaattctcctgcctcagcctcctgagtagctgggattacaggcacatgtcaccatgactggctaatttttgtatttttagtagagacagggttttgccatgttggccaggctggtctcaaacacctgacctcaggtgatctgcctgcctcggcctcccaaagtgctgggattataggcgtgagccactgcacctggtcccatttcctttttattgttaacaaatgttgtaaggaagaaggttttcaagatcaaataaatcagagatacattaaattaaacacatatacgcagatttatttactgtaggttttgtgccttgtgaatctccagactggagaatataatacagcatgttttccaaacgtttttggtcatagaacactgttttttcccacttagataaaataatataactaatagtaaactgttctgtgggttgatagatgttttccactggggatatttggaaggaagtagtttggaggtttgcagaactttagctgagatagtctaaggttagtaaagaaagtgtttctcaactttcagaagtagggcttgatgagtttctagaaagcaggaagaaatggaagagaaggggaagaaacgttagtataaatgaagatactctgggttggactaaagtctaaagccagatggcaaactcaaatgtcagacaaataacacacttgtgtgaagtttgttagactaggctatcttgtcagcagattggattgtaagacctacctaaaagcattcaagtaatttttaaaaacacgttgctagctgatggggctcacgcctgtaatcctagcactttgggatgcctaggtgggaggatcacttaagcccaggagtttgagaccagcctgggcaacatggtgagaccctttctcttaaaaaaaaaagaaaaagaaaaagaaaaaaaattagcctggtatggtggcacatgccggtagtcccagctacttggtgggctgaggcaggaggattgcttgagcccagaagttcgaggttatatgagccatggccatgccactgcactccagcctatacaatagagtgagaccctttttctttagtgaggtctaaagcctgaactttcgcattttgttcagtgacccaactaagctatagcagctctctaactcaaatacacagggatattttcagtttggagaaaaaaagaagtaacttatattttatataaatttctccttttcaactcaattatcctctctacttaatgctgcttagtttttgtgtgtgacacatttcagagtatac

SEQ ID NO: 2898 - DNA, 17814 bp, Homo sapiens
ttagaataacagaatttggtcccctcccacttccgtaagttgaattcttaattgctaaatttcaggcttttttgttgttgtttatgtaagaatttcaaggccacaactccatatttgaagtaaagtgctcataaaattaattgcaaggaaatccatcactatgattcagtaagtaaacaaattcaaggtgtcacatcatattgctttttatgcttttgattttagtaatatcctttcacattcataatccagatagagagataagcaagattgtatccaccaagcctcctctttattgatcttccaaactgaaaaacatagctgccattttagtcagcagttaaactttattatagaatatttttataccttttctgctaacattacctgcaactcccatggtgatgctcaaatcccatttgggaattcagtgaactagcagaatgaaattctaagagactggggcttgttgatgtgtccacgctttccatgggaactgatgttaaatatttcacaaataccataacttccaggaattcacatattctttattgaatgtagaattgtgaaatctttaagaaataactgaatcattatttcttcactgtctcctgcctgtgaaagcagaactatgaaatagctcaagggaatcagtgagagatttgtatccattatattcagtagcctgcatgtgtccaaatcacaaatgaaatgatgtgggcaaatataaattaaaattgaatgttgcagaagtggttgaggaacttcaccaggatacattaatgtacaaactgaaaactgatgaaaggtaagagtttggtcctatgtggtgtaaaggataggagcagttttgtggacatttcttcattcttctctttctgcttttccagacttctgaagagagatttgctaggaaaaataaaaagatatataaatttcagtgatgctgaaggtatgtgcaaacaaattgtcctcattaatagtaaaggtataaattgatgtggattttctagaagacaatttaaaggtacacacttggtttctaaaaagtacactttttaaaatctatctttttaatcccaatttatttacaatttattataagaaagtatttaggtaattatgcaaagatgtatgtaaagtaagttcactaattgttctcagtacaaaaaaaaggatgaaattccataaacatctattaagaaagacctggttaaataatgtattgtacctccatatgtttagtcattaaaaatggtcacttaaatctctagtgtattgacatcaaataatgtcaacaataaatttaaaaagcataactctctagtgtattgacatcaaataatgtcaacaataaatttaaaaagcataaatctctagggtattgacatcaaataatgtcaacaataaatttaaaaagcataaatatatagaaaaatatccctatctctatataaagaatgtctacatacccacttatgaatacatggaaacatatctgcaaggatatagtctaaaaccttatcggtagtgtttcttcgcagtagtgtgaaagaaatacagtagaaacatttaactccttccagtaatgggaaggagaggaagagctcacaaaaacagaaagcatatatttttgacattttgatattttaaatgtaatctcttttcttcatttttctggctacatatgttgattcaacacatattagtaagcaggatgtaatattcaataaaaacttctgtaattgtctgcattagttccaatttattcatatagaaactattcattttacatatctctttctattaaactaacatttagcatgtaaggcacagttttatttttgaaattattaataaattaaaatgttagtgacaaacataaactcttgagctttacaataggttaatgataaagaagacagccaatattagatggagaaaagcttcataaaacccacaggttagagaaaaattgttaggcatttaataaatgatagatcctttatattttgctgcacaaaaaccaaagatgaaaccttttttaaatgcatggtctcagcatgcatttcaaatcacatttttgaagtttatgaatttatgattatataggggaagaaaaaattctttgtttctccacccatcttagatctattggctggagctctgcaatttagactgacaaaagacggattaaacaagataaaaacaagtttattaacataggcacaatgcataagaatgggaactgtcactaatgtataactcaaatgagtggttagaccttagagttatataacaatctgaacaaggaataataaatatgttgagaagtgtcaggacaaaggaaaggaactttgggcttctaggggcagcaaattgtgggaaggtaaatttttgggaaaagttaatggaagatgttgggcacggtgtctcacgtctgtaatcccagcacttcgggagaccgaggcgagtggatcacccgtggtcaggagttcaagaccactccagccaacatggtgaaagcctgtgtctactaaaaacacaaaatattagctgggcatggtgggatgcacctgtatacccgctactccggaggatgaggcgggagaattgcttgaacctgggaggcacaggttgcagtgagccaagatcatcaagatcatgccactgcactccagcctgggtgacagagtgagactctgtctcaaaaaaaaaaaaaaaaagaaagaaagagagagagagagagagaaagaaagaaagaaaagaaagaagaaagaaagaaaagaaaagttaatggaggatgaggtctagttagtaggtttgttttatatactatgtagattcctctctggtgccttccttgggctggtagactttatagctgtttctggtgatatagaatcatcctgcccttcctgatagagggggaggataacagagagtttttctcgtgtcttcttgtgttttgttttgttttgttttgttttgttttgttttgtttaattgcctttgactcaaaatagtccttaggccagagtgacatattttggggtgacatcctctgaaccttttcaaatataaggtctgcctccttctttctacttcataacataaagtcttctttctcttccatgaatattacaattcctgcctgagtcttacaaggccctcctcttccctgtaggtcaggacacaattggtcctttgaattgaggtgtggtagtagccaagctttcaggagtgaggtttccacctttcatcttgtttctaaaagtaaatatctagtaaatgataaagctgtgtttttagttgtaagtctatggtgattgtatagcacagaatgattctaatgtattattttagcaatgaagacaagcagatttgatgcagaaatccttgacataaggagccaaaatatttatgttgcccttaggggatagatattaaatatatctacccatactaaactttttttttttaagagatggagttttgctgtgttgcccaggctggccttgaactcctggactcctcaagcaatcctcctgcctcagcctcctgagtagctgggattacaggtacatgtcactatgcccaactttcccaaattaagctttaacaaatcttctcaataatgttttcctaaattattcttgaatacagtcatgtagaacatataacaattatgaagttttaaaagtctttataattcaggaaattttgaattaataaaaacaaaggaaactttttgttttttgagacagagtctcattcggtctcccaggctggagtgcagtggcatgatctcgggttcaagggattctcctgcctcagtctcccgagtaactgggattacaggtgcttgccaggaaataaaggcaataaaaggtcattgctaattatctgctctaggtttaaaaagttcatctaaacttttcaagtatctttttttccctgaagcctacattttgttattactttagttggaaaacgactgcagtcaatgactcctcattccctcaccattctgacatgcactccagcatctctttgccattatttcagcaaagatagatataatatgctatagaagaaaaagagtagcaaccttaacttaagagttgagttcctattgtaaaataaagacattactgagactgggtttcaaacaaatatatttttaagctccactcctgtggatttttttgttttgttttgttttgtttttgtcttggtctctttgttgatcctgtcagccaatggtttctcacttgcctgtcagagctgaagagtccattccttgtcaattcagatgcgaagtggaacaaacgtcctttagtaacaaaacgaatccgaaatgaaaaaggatatgttactgctgactgtggtggttgtcaataaagatgttttcatagcaactattccttcaaaatacaatgaacatctgcaatagtcttttacccaaatgacaaattcctttcctactaaatcatgtctttacaaaattagaaggctctattttaaaccttgaattacttgacattgaaggtaatgctaattacaataaaatctcccacttacataattattaattcaaatttgcacctttttcctgaattttacctgcttagaaatccttatggtgctaatgatgaacataacgattaagaattttgttgctgaaatctctctatgcctcagtttaaccatgttaaaaattgataagataatacttaattgatagaaactgtgataataaaataacaccacaaatgtgattacaacagaacatggcaaaataaatgctagctaaatttttaaatcatggtttaaagatataatttgtgttactttaattaaataattgataaatagatttcttgccttgacattaaccttgagtattcatatttctgcaagtaggagaggaaggatgtgatgtctttccccatccgtcataagggtcatggccaacactcctataacaaaaggtaggctaacgagaaaaaagcatgacaaatatttaatcatgcttttacgtgacagagaagccttctgaaagaaggctcaaagaaccagggaaaactatccatctttatgcttagattcaatggagtggacagttgtgtagaaatgtgatcggacaaaggaagaattatctaatagtaatggactgcgtgtggaaacccataagaactgtctattctgattcttcttggcctctctgtgtggcatttcttcctcctgggtatggggcatgactccttctggaattagggtttgatgacctactatcaaataaggggaggtcagagaatgtctttatggccagctcctagatagaaaggcaggacaaggttagactaatcattctagcttttatttttggctttgaggaaaagcagatatggtttgtatgacccaccttagggaagaggaattccagtttttatggttcaccttgagggagaatgaggggcaaaagacatctgaatccttcacttcagggtatcattttctgaggctcaatatggacaagtatttataactaggtgcttaatatggccttttgagatacacagttcctatgctgcaatctcacaggcaatgaatggtctttataaaagtgtgttaaagttgaaaaaaaagcaacaaaacaaacaaaaacctgaagaaatattcctcattgaaggtccagcttacattaaaaagaaaactataataatttattctcttgagaagggttgtatagcaaaggaaaattcttgaatgttccctctgcttgccccatgcatcaattctattgatattaaagtaggcctagcaaatgtacttccattctcactgactcagtctttgtaattcaacaccaattctgaaaaatacttagaaattatttcagtaaacagctcttataagtgctacatgcataacaatatttcaatatcagagacttctatcccatgagaagatattttcaacctaaaatttattataaatgacctaacaaagaactattttttcagtaattggctattatggttcaatctgttatacccactttacactagaaactatcctatattttcttgttgcctacgtaaaagtgggcacgaaaaggttaaacagtaaacttcctgactcctgccagccaagggaagactactggtgttacctacgaagtgtcatggcattctcatttctgaataatgagggaaatctgctttcaatacaaacccccataagacagtcactcttccagacaaattaagctaaataatccatcatgacagctgagaagacaatgtgcaaaatgtcagtggaggccagggagagaaaggcagagatggactgtaagagctgcagcatgatgcaaatactgagaaaagacattctctgttaatacagctcttaattgtaggcattttttacagaacatattgagagtgaagcaaagcttccttagcagtactctgatgtcttctcagcaggataatgtagggtaattcacagtgaaggcaaggggttaggaaagtcacagccctaaaaatcaatgggctgcttacagggaagaaggtgcaacagatcttggagagcacagaaaagaagagatgagcagcctgtattgaacagaaaccaaaatattagttagatatatccagcaaagccattccacaagttcgttagtgagtaggtgccaaaagccaactgtaaatcctagatacttgtacatatgcatgcttatattacttatattttaagcagtcatatcctcaagctatattatgagttcagtcattctaaaaagatgcttccattgtcttcttggcacttactcagaatcttcagttatcttattcatactgtgtgcttactggttgtcttaacaggtgagggcaggggccctgtcttattcacctccatatctccaggatatagaatagtgcttggcacacagcaggaactcaataaatattcatactattttgagtcccttaatcctcatatcaactacaggatttagattttattgttatctccattttacagatgaggaaaatgaggaacagagaaattaagtaatttgcccaagctatgcatgaataagtggcagagtcaggatttgaagccaggcagtcaatccctagaatttacactccaacaactactgcctctagtggttatgtatgtatttatacacgtatatatttgcagaaataattgaaacttatttctgcctaggtgcatgatatattaaagcatcactaaatccttctgaatataattcaaacttcttcctaccatagacaaagtaatggcctatagtgaacataatgattatcccatcatacaccttgtactgtattagttttctttgcaatctcaattacacttgcatttttattatcatggttttataaaactttatgactggaaagtaccgtattcataaagagttgtgcctcatatatgttagacatatatgcatttttattagtaattataacttttatgcagccagatagccccaggtttatgattccacatcttttgtgttgtgtcatcttttgtagctagttgatattgtaatgtttgctgacttaattcattcagttattaatttctataaactagaatttaggggacatttcaatggactatggagagaaaataactgaaaattggaaattaagagcatctgagaaaattcaagttgtttgtacatcctggacataaatctcaggaaaactgacatattttccttccttgtcaagtcatacaaccaatgctatcactaaaactggtctaacatttaaacattcagacaatcagtttagtcaatgcttcaataagtttactgaactagcagtttcttaccaactagttacagaacagtcacagctgaaaatgatctatacattgtattataaatgggattaattattctgccagacaaccccaggtgtgccaaataacccaaccccttcctccaagacactcattgagaaactagacagcatctgagcattgtaggaacaaacactgaagtaaatggattctaaatccctttgagttctaaaatgctgtagagatctgagaagcccacaaccttataacagcaggcaacatagattacgcttaaaaagcaacatactttcaattgattgataaacccttttgttgttcatttattgcaaataggttttagagctcaattcacacttttgtgaataaacattgaaaatatttgattcaatggttatatttctgcctgacatgaggaaattatagaatctattaaccttaacaatttaattagcatgtcccagacttaatcactcactatctgggtagaattggcccaattagttaaccactctaaaccacagtttcctcatctgtaaaatgggatggaaaataataacaactcatagggttgttaagaggaatacataaattattcatgtgccctgtatggcacacaataagtccttattaaatgaaccggttgtagaactgtattaagaacaagtagtagtagcttccatatttagagagccatcaattctgttttccaacagctccattagtgagaattgtgctgtgtgttttccccccaccccgccccactacaactgcattgctatatgcaaggatataacttctgtctctaaaactattcaaatagtgagcctgggaaaaacaaacttaggtcaaaagagtttgactaaactggctgagaacatttaagttggataaaaatagatgtattttgtttgtataaatagattttggtcatgagaaagaaataaagaggttcctctcaaaagaaagcctggtttagcagtcagtaaacattgggaagagtcagcagttgacttccccactgtgtggaagaaactgccaaaagcccatccagaattaggtgtgtgggagggaagaacaaaggagaggcaaacaagaagctgtcactattcaccactttcaccttgaataacctttaattgaaaaataaagttgccaaaacaaggagtaaaagaaaaactaccattttattccctccttgagattgaattagagggaaacatactgaccacagtaatcccaaggttggactcacatgatggcaaatgtcacttagttctaaagctctaattagaaacagggctgaagttttagccagctcctgctactagaaataaaacatgaggcaacagcaacccaagccctggacaccccctgacagtgaactctgaggtgctttctgagtgagttgagtataaagctgacagagcctagagaattcatacttgagcaaatattgggaaagaataaactgggtcagttaccacctgtttctagattttatttttttctagacttcaactaagattgtctttcacattaataagaagaacgatgaacataatctatttcatccaacttctacattccaggcacagtatcaaccactttattacattttatcttctgtaatattcacagtgttattgggtagattaaacaacttgcccaagttcacacaactggtgactggcagaaatgggatttgaacttatttgatgccagaggaggtgtatcctttaatattttagaataacttatttatttcattatattttatgaaccttgaaatatgtttattgtaaaaaaaaaacgcagaaaatacagacaggctaagtaaaatgtgtctttacattaaagtatttaatttgcaaaagaacagttgttattttaaaatcctaccccacagtttttcatatttctctttctatgtagggttaatctcatcaggaatttctcttatccatccacagtttgtaggacaattctttgcacataatgggcactcaaatgtacgcagatcatattagtccaagaaaaagctgcttgttggggctaccaagccagcatggtaacaccttacaatcaccctttctacctgcagtcacattgttcccagagtggggtggtgatacttgccagctagcccaagtttctggatatagacctttaacaacttcacaagtacccttagaaaattcggttaagaccgaacatggacatgcttgctccatttttttccactctcaaaatatccttgagcagtaactcattcatagataagaaaaactttttctcttcagttttttcttttctttttgaatattctttgattttagcagaaataggcacagtaaaagaataaatataagagacgaagaataaaatttatgaaatttagaaagctcatgttagagaattgtactctttaggtagatccttatttaaagaataattagaggaaagaaaacaaaagatgaaagagtacaaatgagattcctgagcagttttttattttgattgataaacttttaaaatgtgtttgaattacaatatttatatatcaggaatatgaaaggtttaatcataaaaattacataatatttcttccaacattttcatcttgtccatttcttcatatctatagtggagaattatccctctgtaggcaagaagaagtctttattctcttcggaagctgctcctcttgcactccaaaatatagttctgatggaagctgccaatcactttatcccattcccagaacaggcatggtaccagactgaggtcaatcctatactccaccttatttgccatggaaaatagcctagcgatacttgcatgactcagggcagttggagtagtttgatggaattttttaaaccacagctgacaggaagtagctctgttccttattagttgcaaatgctgcaagcatatgaccctagagttatctgttgccagttgttgccttgtggagatcataggcttaagatgatgaaggcagcaatcagcaataagcagaggtgtgcttgtgtgtgtgtgtgtgtgtgtgtgtgtgtgtgtgtcagaatgagagagagagaaaaattactgcttctgaaaccaaatccatttccaaggtgtggttttagaagcaaataaattgccaatttcagagctgattcaagttgaatttttgtcctgtaaccaaaagagtcctgactaacagccaaaactcaggctgtcaagtaaacataatctgtaagaatccgctttccagcctccattccccttgacatcttcctgaaagaagatttgtataggaaatgctgacgtctctttggcaactgcataaaaattattgtattcaacaaatttattatatgtctctttgtggccaggcagcttgcttggcactggaaattggctagggagattggggcaagaaaaatacctctctccatggtggaggcatacataaaagccgattgctacacaactgcgtaagaagtgctttaatcaaagcctgaataaagtgttgtggaaactcaaaggagcaagcaaaatgcttcacatgaaagttggacattcgagtcaaagactcacaggattttcccaagcagaaaagaaaggagaggacatcatggacagaggaaatagcatggtgcaaaggcatggtatgaaaaaaatacacgacaaatttgtggaataacagaacttttgatgtgatcacagcataatgtggagttgggtaacagtgagggattaggctaaccagcttggcagaatactgactaaaaattcttaaatgctgtgctaagttgttagaattttatcttacaggttttgagaagccatctgcagctcacaactagatgagtgacacaatcagatgtgcgtatgcaaattttgagtcatattaagcaatgtttccccattttcagaatatagaagaattcataactgctttttaaaaatacatgtacagttcctttttaaagccttgatttaaatatctgatccattgggaatttatcctggattatggtgtaagaaatggatccaattttatctttctccatatggctatccagttatctcagcaatgtttatttaactgtccatcttctacccagcaatttgagatgctacctataaagcatactaaatggtcacatgtgattgtatcttgtttctgaactttctaccttttcattagtttgtctgcctattcatgtgctaatatcaaactgtttaaataataaagtttttaatagtactttctaaagaaatctgatatagtttttccttccagctgttgtcctgaacattgcttttcttttttagagtttatctggttattcttacttgtttttaaattcctaatgaactttataatcaatttgtttaactctagaaaaaagcctggagacattgaactaagatcaaatttaatgtattaaatatggtagaaagaagagagaatgaaaaataatgttaacaatctaggtgaggaattgctgaggagacaaattaaggtaagagttatttgtaatttctctgttttatgtcagccttcttttcagtagtctataaatccagggagaacagggcctcactgcctttttcactagcatgtctacagatcccattacagttgacaatacattcactcatttaatgaatggatttaaacaatcttaaggaataggaattaactgaagaagataagcctaggtgatacttaccaggtagagtcaacaggatgtagggactaaataaatatgagagattagagagacaaaattacctactattgttgccactaacttgaacagggaatttaggaaagagaactgatttggggataggtaagtaaggtattgattcaaaagatttggatatatcatcttcaggtttttataagacatctgagtggagacatccagtaggcctggctctattttctaagaaagagccctacatggaatcatgtattaggttttcactttttgccagatactgtggtaaatgcattatgaaaattgctttagtctaacctaacaagatagcaggactattaacattctcaaattacaggacagtaaactaagacaatgaagttaagtaatttatcaagatcacctatgattaaatggtggaactagcattcaaacccaggcagtctaatgccagagcccagctatagccatatgaactcctaggatttgaagagagaccagtgtattcactgtagatgaaagaattaaattatccttcaagagtgcatacagcaatagtaaagtgtgagaagcaaaagagctgagagcaaaagaatttaagaaacaggcagaagaggacctcaaggaacagactgagaaggagcaggtagagagatgaaaggaaaaccaaggagagagcctgtcgtggcatgtgtctcaggagtgatggagagttcggggaggaaatttggtttattttctgaccctgattctttaagttccaaaatttcttcatgctaatcaattcccattcttttaatttttacccatcttcccccacaaaaagttatcgggtatgaaatattgcaagatatcaacagctactttaataaaaaaattcacaaaattatcaaacagcaagaatgcccttaattattattaggaaagatcagcatgtttgtaatcccagatagttggtaggctgaggagggaagattgcttgaactcaagagttggagcctgcagtgagttgtgcttttgccactgcattgcagcctgggtgacagagtgagaccctgtctctaaaaaaaaggagaaagatcaatgttttttatgctttagggtatttataagcttaaaaagattcccattttacaagctgatgttgcttacatattgccatataaggaaggaataagtaaccaacattgtgatcaaatgaacaaacaatatgtcaacatttttaaaatgtaatgtaactagtacaacacagaagtaaatacctagttttgctttttgatctgtatgtcatttccttccttgtaagatataagaagcatcagtggggttatccatttggtcttggttgaaaacgttccagtgcaacattgccattcatcttcatagtcatttaaatgcaatttattatccagttttgtgattctactttatattttatggagttggtaagactccagaattactttcagaatcatccatcttatatataggggaaaggtttaatccttccatctctaagcaaggaaaactgtcatagaaatcaggccccaaaatgaattcttcaagagcaggaaggatggagaggatgaatcaatcaaatttttttttctcctcaacttgttattctaaacgagcttataaacagttttctgtaaggaaagggtttcttgaatatggtaacatctgccatctagtggctgacttgagctactatatgattaaactagaaatttttatttttatgtaaataataacatggaggtgggcaaatcattgtacttcatctctctctcttcatgttgcaaacaaagtaggaaaatatagattttctttgatgaactattatttttagtgccagatttgatctaataattcaatccttttagtgtaggcatcttcaaagtaaaggagaaaaataaaaacagaaagaaaagaagaaaaagagaaagaaaaataaaatagtatgtttacctgccacaacagaatacataaacaaagtataattatagttattaaattatttcagttctagggtgattctattttgtcattaaacaaaagttaatttatttgtacatcagatatagttagaataaataaaaccggtatctttaaatgaaaatgtcacaggtaaaagtgaatgtataatacctcctcccttatttttatgagagttaaactattatgcacatatactttaccatctaagctgatagaattagcttaattagatagtctccatgccaaaaacaatgataaattttgagtcttcatctctctcaagtctcaccagcatttgacacagttgacagaccttttcccccatctggaaagcactttcttcactttcaggacaccatactcttcctgtaggtcatagtttgtggggccgggcacaggatgagaatgtggggctccctcgtgcaaaaaatcagcaaaaaaaactgtccttaaggtacatataacttatgtgaattacacaataaatattttgtagttcatacttgcatatgtacttcattcttcccggaagagtggaaacattgcccaaaactaactcagctattttatttcacttcttcatacagtaaatcctgtggaaggaaagaagaaaggaggaaagaggattggatggaagaatctccacttctcagtgtagtccttccttagcctgctttttaatgagtgctgctaaagcccttagcctgcctgtttacccttggagtggagcaatgaactgaagatatttgagtgagttcaagagagactcagaagagaagaattggaggcagcaaacatagacagcacttttaatgcttttctcatatgctgtaagacatgaaagcaatctattgggatgaaagctgaaaggagaagcgggacaagagaagtgaatccgtggaagacccccaaaagaggctgcagattcttagtggacagctctcatatcccctccagggaaaatgatgaaaaatgtcttcagaaaaatagctttatgaaggcaagaggactttttgcacctgcaagacatgtctgaaagctcctcaggtcaaaacacaagtagtcaagagatttgtccatctaattcatcatactactctgatccaagtgagacccacactgggtcagctccatcaaggagaagaacattccacccacgtttggattctggaatatcatccttgcttccatcagattcttgtaagtacctcacttggcacaaggtagacatgacgttcaaggaagtcaactgcgttgcccaagagtaagagaaggaatctctgaagaagagcaacttttcagacaggtagagtgtgccttgctcccaaggaaaagagttcttgaaaaaaacaaatgggaaacatggctacaagaaaactgggaagactgcaagaaaatctcagaatctgcttgagaatccggtccttcttcctccatacacccatggaacactcccaaactctgtatgctgctcactaattctgattaaggtcttcaccctccctaccttggaaattgctacaacataattgtgtttaatttgaacatttcatttcagggtttgggggatccttaccaagttgaaaattttaacagaattcttagaagactaattcgagttgaaaccctctggttagtggataattcactggtggacttaagtgccataagattgccaaggtatctgctctgtagcatgtctagtgaacaggttaaagttaagtcttttctatttggatacatgtgatcattggctgtacatactgcacctggccccctgtggtcaggtcttaaagatgacactttgcactaaagtggcacatacggcaaggccaaaagagaaatttatatatcagaatgtcatactttagagggaaacatctatttttaaaattaatattttattaccaatttttaggaaagttatttgtatgagcagaaaagtttgccattttccttgtgttataaactagaaaatgcaattacctgacatatacattatggtttaagaaattaatttttagttagtcatatttactgaacacctatggggaaagactttacaaggtagttgacagtagtaacctttagggtaacattctgttattggagtggaggctggttatcagattaaagacagaaataaactaaaaataaaatatatatatatagactctttggtctttcaaggattccaaactcatattgttaaaaataatctctttctgctcagggattgctagagaaccccttttacagggagctgctatttgcttcagcaggcagaatgcgtaggtggagtgagctttggtggcaatgagaggggccaacagaggtcctcaggagtgaattagatgaaggaaattgagcatccacaaaaaggaaaggtaatttctagaccaagttaatatataattctgagcattggctgagagaaggtcacagaaagaggccattatagctgtacacaagaggcaaacaggctggcagacaggaagtgccaggacagagaaagttgtgtcaccatccacttgctttgcctcccttctctcccctaacatttcctattgactggggcaatctgtgatgtggtgaatctgagatactgaaaggatgaaaggatacccataaaaaagtgagagcatgactggtaaacaagaaaataacagatttcagaggagaacggggagagaggcagggggcaggaacttcttgggctggtttttcaatgagaaattgtcatactactgaagtgctcctgaagtctgtatgaattctggaaataagcagaagccaaaagttatcaaagataagatgagagctatataaaatgtacatatggagagggactgaaaggaaacaagaaaaataaaaataataaattcaaaaaatttacaatgaaatctggttggttcaaagggattttttttcctaatgattctctgttgcagttctctctttacagcaccctctttcccattagcaatgaccatttaccaagtgtctttgtggggcccaaggcccataaatatgtaccctgtatttatctcatgatattaaatcgtaacttatacataaaggaatttttccttaaggcaagatgtcagtgatagattttgaattattttctctatttgcacagtcatgtacagttatagttttaaggcaaacacactgagaagcattatctatcaggaaaatgtattaaatttaaatgcct

SEQ ID NO: 2899 - DNA, 1838 bp, Homo sapiens
ggatggcagcagcagacacacagggtggttaagaacaacaaacacaggcaaaccacttcaatagaacatggctggcggccatatggacatatttgaatccaacaattaattcagcaaagaaagctgcttgtggcaagttttgaatgtgccattccaggtagtgctttgatgataaatgaggagaagattgcaaagaaaatgacagcaacatttataaaaggattcctcttaggactctagatgcacggagagtggccagattaatacagactggcaaaagaagaacttggcaaagtgatttgatcacacacttctcaccctcacatctcctgacagttcccctaatccctgccccacttccccgccatgggcttccatcaggaaactccttgatatcatcttcgaaaactgaggcatagaacatttgggaatgaatctaagactacacatctagaatagcagagggctgggaccaggatctacccatccccatcaagcgaggattgatactaactacagccactcctgcgggggcccagggcctcattatcctaggggaagaggagatggaggtgagaggaagaggatggatgaatgtggaaggccttctgcagcttagcatgcaatggtcatttcctgtatgcaaggtcttctgctatgttctgtgcaggaaatcaagaatgagaaacaattttggccctagaggccttacaaatatatcttcctaattacaaggttatagtcctttgggaattgcaagttcccttgaaaattcacacaatcctaacatgtgttgtgcctagtttgatgtgttcttaaactattactagctaacacttcttactgcagaatttctgtggaaatgagacataggtatttctacaggataaatgagacgagtgaaaagaggtgttgaaaaggaaaacgaaaggatgaaacagatacaattcctacttcgctgtttttcaaagtgcttatagtgagtgctctccgtttctcacccgaaggggagaaacttccttggcctttttcttcaagtaaatagattaaatctctcttattgctattgctatttgacctttttcatgaagcatagcaaagagtttttcataatcctaatatatacttatggtttgtgactaatgaaaagaattatttccatcctctaaattaataggcttgcctccctgcccagtaagttgttccttcctatacagcattcagtaaaatatttgctgagtaactaaaatgtccaagacacctatttcagcaatatatgaactagaaacaaaacaataactacaaacatgacttatctcttcaaggaaaggagtcaatattcttgtacggaaaaaggatcgtagaaaaatacctaatagcatagtgtgacagaaattgcgtggaaattactacaaggcagcaagtgagatagaccctaagctgagcagacaataagggtatggcaatcctaaatctacatggtgtggtgattaagtcctgcgtccatggagtcagaaagagctgggtcctgactctacttattaactgtgcaaccttgaataagtcacttataccatgagctccaagtatctcatccttaaaatagatacatttcagcaccttattgaatttcttcaggctaggctctagggatacaacggtgatcatgacagttatggtctcaggccttattcaataaacagcaaagaatccaaattgggataagtattctgaaagggagatatgggaatgaaaacgaaaagtaaaccaaaaagtaaaacctttctgagaccagtgattttgacagacactggattatagaggacctgataaacgac

SEQ ID NO: 2900 - DNA, 9086 bp, Homo sapiens
tatttcttttctgcagcatcaagttcatattgatgagatctgtttatataattgtcactggtgaccagaacccaattcatactactttaagcaaagagcttcatagctgaaaaaaaatgggaggagggtgagtggatgggagcttatggaattatacaaagagctaccccaccaagaaggctccaggaactgggactggggactcaacaccattcgtcactcatgctgctgcagatggcgggtgttggactgggttccctggctgttgtgatcattctcacattcctctccttctcagcggtgtgatggcagatggacactgagtggggaggatgcactgctgctgggcaggtgttctggcagcttctcaggtgcccgcacagaggctccgtgtgacttccgtccagggagcatgtgggcctgcaactttctccattcccagctgggccccattcctggatttaagatggtggctatccctgaggagtcaccataaggagaaaactcaggaattctgagtcttccctgctacaggaccagttctgtgcaatgaacttgagactcctgatgtacactgtgatattgaccgaaggctacatacagatctgtgaatcttggctgggacttcctctgagtgatgcctgagggtcagctcctctagacattgactgcaagagaatctctgcaacctcctatataaaagcatttctgttaattcattcagaatccattctttacaatatgcagtgagatgggcttaagtttgggctagagtttgactttatgaaggaggtcattgaaaaagagaacagtgacgtaggcaaatgtttcaagcactttagaaacagtacttttcctataattagttgatatactaatgagaaaatatactagcctggccatgccaataagtttcctgctgtgtctgttaggcagcattgctttgatgcaatttctattgtcctatatattcaaaagtaatgtctacattccagtaaaaatatcccgtaattaagattgttcttcccttggttaatttttctgttactaagcgtcttctaaaaatgctctttgccccctgttagaaactgagatttggtggtagtgtagtagcaatgcttaaaacagtattgagcccatggctagactagagtccatgtgtgtttcaggggaggggttgccatagagggtgacacttcttttatctaaacttcagtaactatgaatgttactccattatgaactatgaaacattagatataagcggtgctggacctactgtgaatatgctaagttgacagctggagtctatttgattttacttttaaatcatgaattggcattctttcctcttttttttttttttttttttgagatggactcccactctgttgcccaggctggagggaagtggcgtgatctcagctcactgcaacctctgcctcccgggttcaagtgattctcctgcctcagcctcccatgtagctgggaccacagggcccccccaccacgcccaggtaatttttgtatgtttagtagagatggagtttcaccatgttggccagggtggtttcaaactcctgatctcagttgattcgcccacctttgcctcccaaagtgctgagattacaggtgtgagccacacgcccggcactaactaacaatttaactccaagactcagtaagaaacgaatggggaaggaaagacagaggcttctggcatctctccttctcccttgcctgctaggcctagagaagaaaaaccatggaggaggggaggtgatactgcacagcctcaagatgcagcatagacgaatgcagtccttagcaaaaggaaagggcttcccaatgcagtgggccggtgtgttcaccggcttgctgggtgtcagtgagggaagactctgagtgccttgggcttatgggcagatgaagagacaagaggaacaagtacaaactgcccatgtagctgctccaccccagggagtccagagtgtatccgctctattgggaagaattagagagaggcgagtaatatcctgacattcaggtgttcaatgccagctgtcagcctctggcccctgccagtgttaggaatgattcccctgtcctctggggtactgccctccgacgacaacttaggatcagcatttaaaaccctttctgctctcgtcttaggtaaattatagaccagaacgggtctataatggggacaggtccccatcctaacccccagagaccgtttctctcaatagatgaatacaaatagctctcaatttttaatttttatgtgcaataatgcaaacatacttttttttttttttgagacggagtctcactctttctcccaggcgggagtgtagtggcgctatctcgactcactgcaagctccgcctcccgggttcacgccattctcctgcctcagcctctggagtagctgggactacaggtatccgccaccgtgcccagctaattttttgtatttttagtagagatggggtttcaccgtgttagccaggatggtctcgatctcatgacctcgtgatccacccgccttggcctcccaaagtgctggtattacaggcatgaaccaccacgcctggccgcaaacatacatttttatagctcctgaactaaattgggtatcaatacaaattactgtggttagtgtagggctcggcctctgatgagtgaggatctttcctcaaagcccacctttgtccaaagaaagaatctgagcctccccttgacttattttattttttgccagttttgtaaatgctgtatgcttccatactacccccttccctaatttccacctctagaattaactgccagagatacagttgtccacatggaatgtagtataattgtgatagaaaggaagaaatcccccttgcttagtattaaaagtttctggttaaaataactgactaaatattaagtaaaacatcaccttctgggtacaatgcagaaaagtaaaagcagttcatataagattactaaactttgggaggtcttcaagaccagccctggcaacatagcgagaccccatgtctgcaaaaaaagttttaaaaattagccgggcatggtggcgtgcacttgtagtcccagctactcaggaggctgaggcaggaggatcgcttgagcccaggagtctgaggttgcagtgagccgtggtgacaccactgcactcccgcctgggtgacagagtgagatccaaaaaaatttactgaaataacaaaaacgtggactttgggatttcctctaactgctgcaaattataacacagaattgctcagtgttaatacttgaattgtggggccaagtcttctggctgccctagttctcttttctggcatttgaaagcccttgagctagctatggagctaatctttggacaggctttttggttcccaggaatgtcatgcctttgaatttccaatctatatatatacagtgtgtgtgtatgtatacctgtcttttcactgtaaggcacctccacccatcccttatagaaggagccacaaacaatcaagcaaatggatggaggttaattaaggggaagaggaaatagtctgttctctgactcgagacctgaaattgcagtggggcacgtaaggtaagaccagagcagaagtgattatcttgaaattccactttagcttggaataaaattaatatttaaattgattttaaaggaaataaaaaagaacattcagtgttcccttttcattgctaatctcacattttctgattttctaaaccttttgttttcccattcttttcttctaagaggaactcaatggtctcatagaagtcaatcaaatagcgttgtaagaaccttttacctaccacatcctttgttggttagactgaaccaacaaagcagtgcctgcttctggggaggaaggatgtggccttttctgtgccccagtttgtgggagggtgagtccatgaagcaagtcaatttaaaaggcagtgtgtgctcttgtttcagagagagtgaatcctttgggtggtggtggtggagtatgtgtgtgtgtgtggtgggtggggggtggggcatgcacatctagatccatactttttgggctcaactcagggttaccaaaatagagtcaaactcaactcaggattacctaaatggagtcaaattttgtgtgtggttttgtaacatgattctttcagtcatcatttccaggccacatttttcatgtcactcatgactgcattataagtttgtaccataattcatttaaccaatactctgttgtgcatttagaatattttcagatgtttattgtccttataaaagtcagtatgaaggtatgcaattatcacttaggccacattcctggaagtaaaattgttggaatggaaactatgtacattttacagtgcagattgctggaagagttttatgcaaaaacttatacaaaaatttacactcttaccagcagaaagcctcagcgccactgagtgctgttgtattgttaatcttgattaatctggtatgtgaagaaggatgtttcaatgttttgtctgtgtctctctgattattttgcttgttgattggccagttgttaattctgtctttgtgagttgtctttttctcagtacttggcctatttgtctttgatttgaaaaagctctttatgttgtagtcattttaattcctgtcatatgttttgtaaacaatttttcgagttcataatttttcaatcttgtttgtattatattttgccacacaaaaattttaaatttgtatagtcaaatttatcagtctttttccttatgttggaccttctaatctcaaggtactaaatataatctagcatttttttaaacattaaaaatttttaatccatctataatttattttaggatagggagtgaggcaggggaaggtatctttttaaataaaaatcgttgctaaatggttggctagttgtcctattaatagtcattgagaccaggagcggtggttcacccctgtaatcccagcactgtgggaggctgaggtgggaggatcacttgaggtcaggagttcgagactagcctgggcaacatggcgacacacaatctttacaaaaaataagaattaacagaggccaggctagtctcgagctcgtgacctcacgtgatcctcccgtctccgcctcccaaagtgctggaattactggcatgagccaccgaggctggcctgagtattctagtttataacttacaaggtcattcatatgtatatgttgttgtgcttgtctagctattttatattttgttattctgaactcttggcctctatctcagctccagcccctgaaagtgcaggagtgcttttgctctgccagtcggccttttttgggaaatcatatcaagatggcttttccagcacaattacttcctagagtgtctgcttgatgcatggaaactcatagatttttggcatgccaaacagagggttttcctgccgtcactgctggctccagccacagacttcagttttcttacctgttagagcctttgtcctctgactggtggaaatggagcttgcttctttttgttttgcctgccactagtctggcagcctccacctcttgacccttgggtttcttatccttggaatcagatacgaggccctgtgtcttctgttgctgtagaggacacaagtcatattctctgagtggagatctctctgaagctcctctttccaggcttgtactgagggacctctggaccctctaccacgtggtgtcaaagctgccaagagctgtcatatgctgggtctgtaaattgactttctcacctctgaccagatgcattcacttgagcggcacagagatttgggggagtgaaagggcactgtttctttgggtccgtgggcttgtgtcccatcccctagccttggggttagcaggattcagaatttatgagtgtggtctgcaaaagtctacctctaccagatgggggagaacctagtgtgtggacctgaagggttagctctgtgctttagtccctgggagtggccatcttgagtcttggtgggcttggcaagtaaggagacattgaccagattcaaagcttccagaggtggtgagaactccagggccgagtaatggagagtacaaaggtccttcttggcccccatgacccttccaagccaagaacttggcagtagctgtgagaagcagagatagggagaggaggtgaggggcacctatagctcttagccatgagttatgactccctccatccaagggagacccaaggacatgaaaggggactcagttccaaggatcagagggaacttgggttgttttgggataatgactgtggcttgggatgtcacggagatgaacaccagaattggtgtgcaacagatgagctccagtacccctgatagtttgcatgggttttgctctgctgatgatggtcagggacagcagtgaggccctctacaatgccgccttctgcctaaacacaggcagtgcccacaaaaggggagctgtcattatggagcctaggaatggatagtcagagagcagcggctgggcagtgcaactcctgcattggacaaggtcctggctagagaatgtcaatgtccacactgcatgtagccctatcgaggagatgatgtagggggctgtcagccttggagactctagcctaagtaccccaccaccactctggctggcttccaagggcacaaatcagctttctgaatctgacttggcttcctgtgatctgcattcatgaacattcttactagagttctcatggaaaatgaatacacaactatttggtctgaatgtgtctgagtttggtgtctccaaaacaattctctggattagatggagaatgaagaaacttcacaaaggcaaaaggacaggtccccatctcgacccccagagaccacttctcagagtctctatctgttcgtctctggtgttagccacgttcctttactttccctcatttctgtggccactcctgtggcttcctctctttcaacctgcaggctgctgctgccctgcctcagacccttgtaggcttctgtagagatgctactcagatgggggtggagctagatgcagagctgaaacccacctaggagatctagcttggagagcttgtgaatcttaggagagctaggcatagaatgactaaagtttgtcaccgcatgagataaaataaatgaaaagccacttctggagggaatgaggcagtctgcctttattggagagatacatattgttgaacagctctgggcagttgattgtgtgcctgggagagctaaccatgtttactctacacttgacctgtgatggtctgtattgattgtatcacacgcttagctttctaaggctaaccaggtcatcgtcctcagtccctgcctgcaactaggttgccaactggcccttgatttcccacccaacttgttcagtttgccctcaatcctggggcctcactaatttcccaaaaagatatggttggtaccacctgtagtttgctgttgcatgttaacctgacttttgggaaactcaaataaacacttttcaaacgcattgaccatttttactctatgacttctgctttgcatgatcgctagcttggtcacccatcatgctgctttctggtgagctgaaaggaaaataaatggtctaaattgagcaacaagaaagtaaacttttaagcaggtactttccaagtgaaatgagaaccggagattgggtccaaaagagaggatgcccagccagactgaactttcaagtgttttccaactggaaagctccaatgtcctctgatctcagtgaatttccaatctaatttcaaggaagtccctcaggagccccattgcaagggtggttatagaaccatttacaactgctttaataaaactaatgcttataaagaaagaaaacttgttttttagtcatccataacacaaaaaagtgaggtttgatgcacagtaaaaggaatcattatttaagttagtctgagttatattgtattttggaaatgctccacattcaatatttatgccacatactctaaaaccaaagtatgtagattaaaaaaaaactatttccagaaataagcttgctgaatcaccacaggcttaatttatttattttaactaccagtttcctgaatgtttttgtctaattggcctatctgcagttgcccttggtccacccttgagcccactctttaagcctgtctgtcacttagagaagtacaagtacttcctgctgagaataaagccttgatcgcaatttcagtgaattatcagggaagtgtgagaataagtaggaataaatgtctaaacatttgggaaaaacttgtttgcaataaatgtggttaacagagagtgaataggcttactacataaaattgttactcatcaattaaaaaaactgtacaatcctcctccgggggaaaatgatcagatattttaagtctgctgatatttttctctggatgtcagacctgtatactttgtcctgcattattggagtataattggcaaataaaagttttatgtatttaaggcatacaatgtgatgatatgatacacctatacactgtgacatgattacctcaatcaagctaattaacacatccatcacctcaccttttttgtgtgtggtgagaacacttagatttactcctatagcccatttcaggtatacattattaactctagtcaccatgctatacattagatctccaaaacttattcatcttgtaactgaaagtttgtactctttgaccaacattcgccattcctccccaacccctaactttggtaaccacccttttgctctctgtttctatgagttcttctgtttcggttccacctgcaagtgagatcatgcagtgtttgcctttgcctttctgtgtctggcttatttcacttagcattatgtcctctaggttcatgcatgttgttgcaaatgacagggatttcctcctctgcctcttcttccttcttcctcctccttctccttctccttccccttcttcttccccttcttccccttctttctgtttttgctttgttttgtgtttgtttttgagataag

SEQ ID NO: 2901 - DNA, 2801 bp, Homo sapiens
gggtaggaaaaagccccacaccattcatgatgttaacaatagcagcattaacagtcattggactcccaccgagtgtgttattctttaaattagaacccatgaatataatgagatggattttcacaggaacaagggcaggctgaaacaaagagataaagaaactgaggctcaatgaacttgtaacgctttagtgtcagagctctagaatgggtgaaggccagattcagacccaggcatcgtgactcccaagtctgcttgtggatccttgaaagcaagggtgagccataagcattgcacctttgagagaactggtaagttagaaccgcagggacttctgagagcttccttcatcattttctgcatgcctcccagtgtgcatagtctctgctccttctcccgttagcatgagccgtgtgtgtgatacagtgtgagcactggtgtggagggttcagatccatgtgggtggcccccacactctagccaagtgagcatgtaaagatgtttttatgtagcttcatcgataattaacttccactctctgcctcattccatgcctccccacttgccttcctccctccctccagcctgggtgcttgggggcctaggctggggacctcactgtgactagcttagcaattctctagctccaggaggctgccaggacccaggcgggagtgcaggaagttttcaaggtctgtgctccagggtgtgtgatgacttgactgctccctgaagagctcgctgcttataatcgcatagtttttggcatgtgctctctgacaaaagaacagatgtttcctacaagaacaaaagaacagggcataactgttggcctaacgctttgccactaataacattgaaagtggaagcaacaagtcctaacgagaaggtccctacaggatcatgaagccagtgccagggaattggagtcaaaatgaaagaactcacggctgcttttacgttttaataggcagtgtgctggatgttttttaacctctttggataaatagcaacaggctattctttctagctgtgttcatgaattttgtagctgtacagtaatgatggcttcacaagttcccttacaagatcccaagcccgtgtccatttcagagacacactgagagggttatgacaggctcggccaaccctgcagcatcagcctacagtccatatatgggggaagccttagctaaatcgcagctctcagccaaactaaaaacaccagagcaagtttttctctttgttgctggctggaacttcaaagcacggagagcccacacacaaaaatgaaaaacaaagaaccctaaaaaagggcccagcctcagagcccacccccaaaagtttagtatgcctcttgtgttaaaaacctttcaccccatatgtcacatgtcacccagggtttcagtcgcgttcctagagtcattcctctgatttttcatctctgaagaatatcttctttgaggttgtccttggctttcgcccaaaggaaagacatttattttttctcattctttcccccaaccacctaccctgactatttcttcaaactaacagacacagtgaaaatattatttaaatgtttttaacttcttttaccatgaactgttgtcaccaaaaaggttcaatgttcgggtttagtaagtcatggttagcaaagaacattcacagcatctgatgtcaacaggatctttacaaatctctcctcctatttcccttggactttattgagagggatggatactatatcccaatgtggcaactggacatcctcatttatatttgtggtcccagcttatacctttttcctgatgttctgtttgctgatttgcatgattcattatatgatcacctcttctttaagaaggggttttgaaaatatttcttatgattctagcaatttatatcaaattttatggtgctatcattataatgcgaatgtgggaaatgcagaaccaaaaccttgaagcgacttgaaattttcataaggcaaatccattcatcacatatacatttgagtccatgttatttttctgaaaatgtggttgagctaatgcaattatgaaaatgttgtttcttggaaatgaaaaggttttgtgttcagcagggtacataaagtaggtgtaagcactctcatatttgggctccaaatatgggttacatgttgagactgagtgccagttgaggagcacattaaaaaaacacccaatcatatgattgtgttattcatagttatacattctgtgtcccagagactaaatatcaacagcagattccttcaaagattggatgggtatgagtgacaaagtgacggatcttaacatcttgaaatggtggcagaattgagttagctgtttttataaaaaaaaataggccaggacggaagttagacacattagtgctgctgaatttgttttgaatcaactctgtggctctaggcaaccagatttctctccatgtgtcggtttcctgatctgcaaaatgggcataaatgtgttttctctaggacctctctcaaaattctcacgaagataaaacaggcctttatttgggatagtgctttgaaagtaacgcatattacacatgtttctcaagctgtacttaaaacagcaggctgtgattttgaggcagccacatcagaaggtgtctggagctctcggcctctgtggggcatgctcagagtgaattgaaatttttggtcagtgaatcctggtggctaaatgactattttccatatttaattcatctatttttagcttattttcatgacttgattcagaacttaatagaaacaaatgtgc

SEQ ID NO: 2902 - DNA, 382 bp, Homo sapiens
attgtcctgaattcacctactaattttaccctcagagaaagagagagtctttggagagttgtgaggagataagtgacataaactggcatgttctgaaagaatcactctggatgctgtgtggagaaaacactgaaaagggggagaataattgactccattcaagtgttcgctcctgtttcaatcaactatggctgaagagtgaggagacatttggaataaatatggcttctgggggcccattcctatggatcagcagctggcttctggaggcccattcctgtgaatcgtcgatctcatagaagataatattgttagaaggcttacctcattgatgctgaacatcctaaaaagcttctgctgctttgagtcactgaaaaagacc

SEQ ID NO: 2903 - DNA, 764 bp, Homo sapiens
gtgaagaggtgtcttctgctatgattgtccaggaatacaaatgctgatgtgatgctattcagatccttaaggtaaggcaaaattctgattggagcagaacacttcagaagtatttttcaacgtatactgagaagttgctctgcgacagatgatatgccaagcagctgggaagcaaagatgaggaagacatgaccctgtcctggaaaagcttcttgacttgaaggtagggaaagagctgacagcatttttatattttctgcatctactgcagacaacaatgtcctgtacatctggccaaaggccaatctctagtaggctaatttctgtatgctggtgagatgagcaaaacacatggaatctcagttgacaaataattcaagcaggttaatcacttcatgctcatgttaccccacttggtctccttgaaagatcttttccttgggtttgggctaaagactgtttgttttactgacctcagtgactcactctgggattggctagtctagattctaagaatgctcagtttccttcttttcaaaacaaaatctcaatatctattaaagaactaaaacgttattttaagtgcagtaatcaataagcctgaagaataatgtttggagtgtttatggttgtgttgaatgacttgtattttcaaaatgtgctcctatggaaaaactacttttaatttgaatgcttaatatttacaagctgcaaaaagattcagaattaatcatatttctacagtaacagtgatgaaaaaaccc

SEQ ID NO: 2904 - DNA, 14391 bp, Homo sapiens
ctgagacagggtaatgagatctggcattgctgggtggctgctttccattggatggtcagggaggcttcttggaggaacaggatttaacttgaggccaaaacggcacaagggtagagccatataaaactaaggagaaaccattttaggatgagggaacaaaccctgaaggtgtgaacaagctcggtgcatctagacatgtaaggaaggttccagcatgtgaaggagcgaggacggagaagggtccggtgaggtcttacagcaacagagggtccagccacatgaggctgagcagccaagtgatctgcctaggccagctccccttcatcttctgccatgagtggaagcagcctgaggccctcaccagaagcagatgttggcactatgcttcttagacagcctgcaaaactgtgagccaaagaattcccttttctttataaatgacccagcctcaggtattcctctatagcaacgcagatggactaagacactcatgcttcctttcattagctatttcaagctcaaaaattgtgagactgtgccaagaattagggcaggatcttgtcattgcgaacttacaacttttctatctaaagcaaaaggtcctaatcccaaaccataattggaaaggtgcctctactccaacctcattgcccttcaactgccccttctctgcctcccattcccctcttactcaccgaaagacaaatgagtttaggctgggcacagttagccatcgttctcagaaaaacaaaatcttgctgcttggtattctcacttagaatcccttcacttagcttatggatcaccctacacagattcctgacagctcactgggccagggaaccagccagatttttgagctacatctgcagtatcttttctactcaggcagctggcataagggatgtgtcctacaatcaccatcagccaggaagtggtcaggatgcagtggttataactggattattttccctggcctggctgaccatctgcaaccccctggtgtttcaatgtacaaactattttaggaccatctgcgtactggctgttgcctgaaaatcttgtgttgatgtggatttgtaagactgggaaagcaccagcattcaaaacttgaagaaaggtgttagcagtttggcagacaatcctacagaaaactctttattcttgggggagaaaaagttgcctcccatcaacttcaatggttcacaggatgatgacgtgtggggaaacacaaacctcgacaacattgagtccaaatgtgtttcggaagactcagaatgaagaagaagatgccaaggaaaaccttaaccaatttattttcctttttaatgagtgatatgtgatttttcaaaagcctaaatacatctaaaagagctatatcagttaagtataagataaaaattctaaaccatagaaagcactgttactgcttaattgacagcaatttttctttctttgcaatgtataaaataatgggtgctttttatgttcactgaaattcatattgttgtctccttttacagctgggaaagcggaaatctggagaactaaaatatcttgctgaagatcacaatgcagtaaagcatagggcaagtttccaactcgaacatcaccccagaacacttccttttaaacataaattatgttgctaacttttttattgttacttagcaggcagatttcaaactgatacaaatgttgaaaatgatacaaaatgttttcccaccttaaaggcattctgaaacctagcacataacatctgtcactgaagtccatagtttccaatgccatgattggataaagaccctattgagactcatgtgtttgtctctcactgcttaaaacactcatgtgttttaagcaacatgacaagcacaaaagagaacaagtactgctcctgctctccaggaagttaccataaaataaaggggataaggtgccttccaaagaaaaaacaaatactaggagaggtcagaggagaagagagattattccagaaggagagactgaggcagatttcaggagggaagaatataagagtcccaaaagaagaaacaggaacccaggttagagagcaatgggcaaggggtaggaggtgagactaaactcacaaggaagttgcttcaaaacaatagtgccccaaatgccaagctgatgggttggacccatttaggaaaaacccacaaagtccacaggagagcagactgcacttccatgagcttcaagctgtaaacagtaacctcaaataaaacttttcccggatcggtaatttccatcctgaacaatggccaagtcaaggaagctgaggatcgagccccctaccgcatgccacaaagaacctcaagggaccccatgctctggggagctcgcaggaggaccagcacagaggtgtgactgcgttggggcagggtggccacatgtacaatgttgtaccttccaatgttcctccttaggctgtgcttatgaagtcccaacatgtcttctgggctgtgttttcaaccaagagagttaataaaaagtgggatgggcaccaactatgcctccagagacatcaggcagaatatgccacagcgtgccatgtcctcctgcaaacagtcagaaagaaaagatctctaaaagcagattggaagagactatatatacagagcgagtgccggtacagaagttttgctgcaaatacaccctctaatcccttgcaacccactgcaagctcgagagaccagtgcccttggtaaaacataggagagatcattaattaaagcctaggccctttctttgatcctgagggataaggcttgggaaaatgcacagtgataaaagtgaacattttaaaagagcagagtgagtgtgaattcccaaagagaccattcatatcaagacccaagccatgagaaaatgctacaatgcccttgatcaatactttataggcattttgacctcagatctaatcccatgaggcttagaccaagaccttgcttgatgcagacctctctgactgctgaaattggtcaggagctcagtgatgaaaatttggaaagtcaatgctgatacctgaagaaagtcccatcagagatctgtgacctgaatcttcataactttcacaggccctttctaaatgccaaggaggatgtgtgtggagaagaatatgccacctatggcatcccaatatgcctgtgcccgcctgctcttcaacaagggaatgaaacctgggtattctcataggttttttaaagcacttgtccacatattttattccgcaaataacacaatttaaaattcagctagaatttgccattttctgtcagggttgtgcatttcttccagtcaccatgacttcctgagatagccaaaacacaaaatttaaattgtgtttaaattaaataaacacaatttatgctgaagctgactttacccactctgttccaacattacttatcctcagcatctctgaattcaaatatcagccaggtgtggtggctcatacctgtaagcccagcactttggcaagccaagatgggaaggttgcttgaggagttggagaccagcctgggcaacatagcaagacccccatctctacaaaaaaattaaaaaattagccaggcatggtggtatgcacctttagtcctagctacttgggaggctgaggtgagaagatcacttgagcccaggagcttgaggtggcagtgagtcatgatcataccactgcactgtagcctgagcaacagagcaagaccccatcccttaaaaaaaatacctgccctctgtacttcatagcacctggggcattttgaacagttcttccttcacctgaggtcattatttgagaatccaattttagagactacaatgctctcattacttggattgtatcatttaatcttcccaacaatccaggaaggggagtctcttaatgattgtccttgatttccagttaaaaaatctagacccagaggtaaccttgtgaaggtcacagagtttcagagttctaagatcccatgcgagattgctgaacttgaacttgtttcttctgatctcatgtcaataagtgacttagtcaacacctgggtagaaatcatcactaaagtgagaaagcacatggtgagggggatgaatcctgtgcccacatggtccctttcacctgcccaatcctcaggcctctcacctggggtacccctcacacacatggcactttcctgaactcatggacatttcagtttgtaacgatcctcctaagattatctactttcacctatccacatttgaactatacttctttagtggaaaaaaagaaataaagccagtgctgagaatgatcaaactccagaaatagtagactgctgtataatttgtcttgcgtgacaccagatctttcaaggaactgcaagctcaagtgcacagttaagcaagatcaagatctacctttgtctttcagagccttcccttggcgaggtcaaggatatctgctgtgagcctgggctggctgaaccaaagggcaatggaggcggccaagaagccccagccaactgctcccctccccaacccccttctccctggaggtcccttcagctagaatttgccattttctgtcagggttgtgcatttcttccagtcaccatgacttcctgagatagccaaaagcatttgctgtgagcagagccccatggctggctttgcacatcaaacatttcagacagccatatatttcatagaatacaaggggaagataacactggacacacagaactttccaacagcttgagaaaatgtggtgcctggtgactgactaaatatacaatcggacaacagccaggccatagcaaaagatggaactctgatccacaaggtgcagcaactttcccagaaaacaatacccttacccacaaaaagcaaccccggaagctggcctgctctaaatcagacctgctggaagccaaattgctctctagtaactatccaggaagctaaataataacttctgtaacaattgactcaaaatgttcaggactggattaataactgatggcttccctaatttttgtccccgattccaacttaggacccaccagagaaagccaaatatggtcccctgaccaagcacacaggatgttcgcttctagtgagccgcctccagcttccccgcattgataacctccaatcagggcacacctgaagccttcgcctttttccactataaagctctcccactcgtctgcccacctttgagtctctgccaaattgcaaatgatggtgtctgactcccttgctgtagcaagctctgcataatagcttgtgcttattctctttgggtaggtcttcatttcttttcacaccagataggcatcatctttgaaaacatctttactgggtctcttgtctccctcctgcagccactgatctaaatcacagacttttttagaaagagggaaaatagtaaagaaagaaagcgattgagttgatgctcccagccactgtctgtaccctgaattttgtttttctgccatatgtcaggtggcctctcctggaccatcgtcactgtttctcctgcttccctgcagctgcagacacaggagcactgtgtaggtctggccttgagcacccacccacccagtacagagccagcccctgctgttctgaatcagtgcagtgaccacttagaacacagtgcccatgcctctgtgatctgaactgctctttccagttccatacaatgttaagaacccacttaagaatgttttaatcattcagtagtttttcgtggtatataataaaaaagtgatttaaatacaatctattttattttagattatatcattaggggttattttacaaagttacctttaaatactattgtaaataaaattaataacaaataagcaaaattcttacttttccttgtttgacaattgacatggtcaatttaatttcctttaaattaattatgcaagaaaaggatatttcctcaagaaaatttaaaatgatatatatttcttggttgggtgccaaatattcattcagaagaagacggaaatttaaatccttgtttctaatttaaggaaaaaactactttcattattggatgtgtgaaattcacccattttgtgtttatctagaaaatctagtttattgtccaaatgttcttattttccccaaaagcatcagttaggagagaagatttccagctgccattaaaatacaattgtgtgcaatgaatacattttgggtatagatagtttttattctctataaatgaaatgccaaattggatagaaccatcctttttttttttttttcaaaaaaaaaaggcttttggagtatcagagacatcctcttatgttattttaaaataaataattatttgagctgtttgcttcttggaagcagataacaagggggcaggtgagataaaaaaaaaatatatccaaactgaggtgagaccaaagatggccaatctaagaaccaggcagatgtctctgcctgtcctgggaagattccctcaccaggctccctcactggccagaggagcccacttgttgggctgccaactggttcctataaattctaaggcaattagaatcatgtggtgactgtaacgggaatgacacagctgcccaggcattagaaggaaaccacacccaatggctcaagccagtggcgagagataaaaactgagagacatctcccctgactagcagactgggctccctgcttccccattgcttcctttaaacaggccattcacacatttgcctgaaaacttacagtggcccagaccctactccctatacacactgccagttgccatgtgccttgtttctctctctctgcatgatgcttcattcctatctggagtggcccagggacaaaggactgccctcccgactctctgtgccctccctgcccaggatccgtaaattacactttttgaatttgtttcctactgtggtgtatattgcctttgcaccttccatctgaagaccaggggatgccccaggccaggttttacctgggatgcccaagagagcacaaggtttggctcccagcgccagagcaatgggcaggggggcataaactgaacacaggaaaggcaagagccacaaagacatataaacaagtttcccaggcgaggagcccctggtcacaggtcagacaactaggcattgggccatctaccaggtaaaagcagcatcctatgaaaggcacgcagtaaataccatgtccatctccccttcatttccccttagggcggtttgctagctgttctgggactggaacctcagtttagctgggggctctcagaacagacagctagatgaattaaacaatgaagtctctcagccttaggcacatcttccaggacaaggggaaggccaggggagagtaacatcagtgatcctacaagatgtgcttccaggccaaggccaggttgcagttgcagctacttagccatggtacacggtgggcctggagcttctgggtgtgcaaagatgtgactcaagagtccatctgccagcagtgagcagggcaggccagctctcctctcactggtacggtggttccagccctcacaggacattaaaaccacctggaaactgtttatgaaggttcctatattcaggaaaaatccctagagattctgaccgaaggaatttggtgctgcctgggtaccagtatttttaaatttccccagatgatcctaacatgcagtctgagtgaaaaacccaagtttgacggctacaggaatttagagcttctctaaaacatacagggaataataccagggccatacattggaagtccttccattgggaatgcaaagaaaaaagaaaaagatggccaacatctaccattttaaagggattccagcaagcatattattaaatgcagggctgcctctggcatctggaagcagcttgggtgccctggatataattctcttttaaaagtttttttcacagcttttatagaccacttaaaactggccttcatcttgtgccaaaatagcagggctgtgtttgtttagcttcaagattttcaggtccaattgattaaaaaaggtgagtgagaagcctgccaacacacagtgaggctgtcacccaggcagctgctgctgctggcttccagcatccagaagctggaacatcagccagctccaatcacctgacagaggatggatcctatgagaaggaggaccggggcttaaaaccagacgtacccactgaagtcagggcaggagatgaaaatcttaacaagtgaaggaggtatgaaaacaacagattctagggatcagcaaccaatgaatgagggtccattttttgaaaaacaaatacttctactggctgtcttttgagtgccaggcattaaacaaagtggaagaaaaaaattggagggtgactcaacagatggaccagatcaataatgaggggtaatttgagcaggacaaggctggagctggaagtgcatgcaggatgccagcatcagagcagccaggcatcagagagccagccttgactactcgccgggcctcaggggctgagccttcgtcccaggacaagggagtggccagagcttggctggccccgttccagatgaggactgtgataccagtcaggtcaacgagcaccgatagaggtagggcccaatataggaccgtgtctcacaatggtgcagacccgcagtccaacacacaggaaggatgcttgttgctaagtcttagacacgggaactggaggagggttgagggcccccagcagtgggaaggcaggcatggcatgcagacggtggacgcggactcaagacaccaactctcatcactacaggtccgtggtttggaaagtcccagcaccattccagagaaggaaacaggcccaggtttctgatggggatgggtagtagccacagagcacaagtcagccgcacccaccacacacttgctgtagtgccacactctcggccctagagggcactgacgctttcccttcgctctgccccagggccagggccaaagccatcaagtcctgggcagagggcgggagcgttcagtgagagcagcacagaggttaaagagctgctcttttttgagatcttcgctctcacttcctttccaggcagccagttcagcaaggtgggtctggggctgcctcctgggagaagaggcctttcaccctcgaaccctgcaggacctcagtttgtcccagggcaaacctcctacattgggcagttaggtcagacctgcttcaggccttggaagactgtcttctccttggcttctcttactgcactggatccagccaggacactgatcagacctccagggcccaggttaacaatatgtggcccagctctgggagagaagccagcaggtctcccaggcttttgaactcggagctgaaaaccaaacaaaaaaacgaatccaccccattgacaagtggcccagcctagttggccagtcaggagactgcacaggcactgaggccaaagctgccttggattaagaggtatggatgccaccgctgcccttttactacaggtacactggccgggaacctgtagcactgagtgacacctgatcagagagtcacccactggctgggtctcccccaactcagatgcatggctaacaatcactagctaagcatgtattcactctgtggaaagccacgtcacgttcatatatttattatctcatgtattaatatactgatgtaccacattattctaatttactacctcacttaattcttacaacaacctaatgtgatgggcaatattattattagctccattttacagatgaagaaacaagacctgaaaaggttaaacaacttgcccaagatcatccagccaagtcatgataaagctgcacttgaacacacacttctcagattccaaagcccaagtttctctctactaactgtatggcccctgcactcaaaaactgagaaatctctctgccctggtgagtttcttcctctacgtcagtatgcatagagctcagggctgtactttccttcactagtgatatggtttggatctgtgtccccatccaagtctcatgttgcaatgtaatcctcagtgctggaggtggggcccggtggaaggtgattggatcataggggcagtttctcattaatgatttagcaccagtggaaggtgattggatcataggggcagtttctcattaatgatttagcaccagtggaaggtgattggatcataggggcagtttctcattaatgatttagcaccatccctcttggtgatgctgttgccatagtgagttatcacaaggtccggctacttaaaagtgcgtggcacctcccccacccccctcctcctgctctggccgtgtgaagtgctggtttccccttcaccttccgccatgattgtaagtttcctgaggcctctccagaagccaagcagatgctgccatgcttcctgtacaatttgcagaatcataagccaattaaacctcctttctttataaattacccagcctcaggtatttctttacagcagtgtgagaacggactgatatgtctaggaaggacagcaacaacagaatccacttttgctatcggctttaaaccaaactatcctctgctgaacaggaaaattgaaacagaaatagagaatggaaaaaaagaggtgactaaaacacacttaaggtgtgtacagtgaaaagggagagaaacaatgggctctctaaattacttttcttaatgtgtattacaccacactcaactggatatattaatatcatcatggttcttccaaaaatcaataattacctatctgtagtagatttcctatactagcctacttttcttccttttttcatttctaacatcctagttaattccatgactcccaaggtgttgccacatccatccctctgtgtacaacatggccggattacgcttcctaaagtctggttttaatcatgtcactactccgctaaaacatggtaatggctccctaaaatgctcttatccttagcctacaattcagagctctgtgtatcctggtcctaaccaactctgaagagctaccacaatactaatcctatacctgggccaatctagactactcttcctcctgaagaaatagctgagcttttcctccatattcagcccaggcatatctagctccattccactgtggccaatgggagaacacagctatcaaaaaagaagagacattgagccaggagctcatgcctataatcccgtgactccagaggctaaggctaaggatggcttgagcctaggaattcaaggctgcagtcaactatgatcttacctctgcactccagcctgggtaacagagcaacaccttgcctcaaaaaaaaaaaaaaaggaagggggatcttgtcctgttctctactgcatcctcagtacctagaaccagatctgacacttcctagatgctccatgatatttttcttttcagtaaataaatggaacaggccatttcctctgactgaaaagctctctgtccaggtcttcagttctcaaaatccttctgtctcaataaatactgtggcactttttagagcatggcactgaaactctttgacacacctctcattgagacttgttatagtggcccttcccttgaatcagcacaccaggaatgctggaccaataaaacacaatggaagtaacactgcagtggttataaaaatatgcccaccaaattctttaatactcctcctttggggtaaaacctgtttccttccccttgcctgtgggctgaactgaacttagtgacttgcttctagtcactaagcagaagtgatgctgtgtgactttgaaggctaagtcctaacaagacactgtggcttttttttttttttttttttttttttttgagacggagtcttgctctgtcacccaggctggagtgtagtggcgcgatatgggctcaccgcaagctccgcctcccggttcatgccattctcctgcctccgcctcccgagtagatgggactacaggcgcccgccatgacgcctagctaattttttgtatttttagtagagacggggtttcaccatgttagccaggatggtcttgatctcctgacctcgtgatccacccacctcggcctcccaaagtgctgggattataggcgtgagccaccgcgcctggcatctgtggcttctgtcttatttggtctctctccctcagatcactggctctgaggaaatcagctgctatgttgcaagaggtcctagggcacagctcttgtggcaaggaactgaagccgtctgttaacaacacatgcatgagtttggaagcagatctttcagccccagccaagcctttagacgactgcagctccaaagtgtgtcttaacagcgaccttatgagaccctgagtcagagccacccagctaagtcactctggactcctgtctctcagagactgtgagagataaagggtgctgcagaatttctcactcatacacacctagggggagagaaatgaccaggaatcatcatttattcagctaaaaatcagaaggcagtggaacagccaggaatacaacaagaagtcaaccgtctgcagcctgtaagagggcctctcaccagaacttagccatgctggaaccctaatcccagacttccaggcttcaaagtgatgggaattaaatttctgttgtttataagccacctcgtctacagtactttgttatagcaactcaaatggagtaggactgtatgcaaacaaaacaacccatttttgatatttgggaaaatctaagatctttaatagtagttggaaattttcagcaaatcctaatattgggtgcgtatcagtatatgtgtgtatccacaatatacagtgtcatacacacacccatataagcaccatctgcattatataataggcacacctgtatcctcaacgttggtgtacagatgcattcatattacccatacagtatgttctgaagatagtcaataaactcagacccaagacagtcctcccatcttttaattctacatagaaatcaggacgcacctgataaacagcagaaaatgtaagagaggccaggtgcggtggctcttgcctgcaatcccaattttgacacactgaggcaggaggatcgcttgagctcagaagttcaagaccagcctgggcaacctagcaagacctggtctctactgaaaatcaaacaaatttagctgggcaaggtagcatgtgtctgtagtcccagctacttgggaggctgaggcaggaggattacctgagcccgggagatcaaggctgagtgagctatgatcatgccattacactccagcctgggtgaaagaacctttgggtgagcagagcagaagtcaagcatttctgggtccctggctccgatgctgtcttacgggcaccacttgttcctaacaggaagctctctttgtacacaagttataattacccatcaaacctgcggctctgtgacctttagcaaaatcactgggtgttgttttcagaaataaattagatacagaaatggagaaaatgcacagagtaactccagacatttttgccaacatcacatccctgattctggcttagctgcggtgatcccttggcgtgtttcctgatctagggtccaagactttctttctctgggcacagagaccggaagagagtccttccaggccaacaggctctcagctgcgttgctctctgctcagcaagctgtcctttttacatttcgaccatggtacaaccacccctcgttcccagaccaactgcaaataatgaatgattcatacccagttctctgccacaacatttagtcataattcacagagtaattgatcctgtttctcagtctgtcaataacttggccaggtataaatacatatgagaagggcttttgttttgtaaactgtggttatcctaactaatgaggacattgactatttaattgactgtgctctcagggaatagtgaagacgtattctgtctgtacacaaaccaaggtcttgctatggcagtataaacgatggataaagtaggcaaaatgattgtcaagccaactgaaaagctttaaagaacaaaaaaacagtcaccaactgttctatttgtgaggaaaccagacattgccctcctgggaagaaaagtaattaatttctcaaattactaccatcctgaaagcattttttttttctttgagatagagtctcgctctgtctcccaggctggaatgcaatggtgcaatctcggctcactgcaacctcaaccacctgggttaaagcaattctcctacctcagcctcctgagtagctgggattacaggcaccctccaccacacccagctaatttttgtattttcaggagagacggggtttcacaatgttggtcaggctggtctcaaacttctgacctc

SEQ ID NO: 2905 - DNA, 6976 bp, Homo sapiens
atgatgctatcttaaaagtagcttcttacctaagaataaaaatgtgtagtcaattctggcttcattatttggagggattagaagcaactctgtcaaacagggtgacccttgatgccatttgcaaattcttcttagaaagaaactgcaaaaggaatcattcacctactaatccaacatccaataaagtttagttccgtgagctagtatcatcaatggcagcaaaattagaacagtagccatagaagtctaagttgaccttcctttgggtgacaagagtttagtaatgcccatggattcattgtggcaggcagttctctggtctccatcattacacctaacattttaattgtgtctttaattttaattttaaacgtgactttaattttaaatgtgactttctccccagtaagaaccgtgagagagtacttaacacaatataatacactagattcttaatattatgtaagagatcacagtaggatatgagggagaagagaacacatgagtaaatgaggcccagagacatttagcatcatgtctgtggccacacagctagttagtgatagggtagaactaaagtagctcttctattaggttggtgcaattacttttgcaccaacctaatagttctcaagtagtttttttacaacatctgtattttttatctctttggatctcagtcctctagccatagtatagtaatttttataaattatagttaacactcttatagtacttgctattttcctggtatgtttttaaatgctttcaatatattaattcatttgatcctgaggtaggcactattttccctacattacaggaaactacaggtatgaagtaacatgctcacagtcatgtaaagctaaggttggaacccagatagtcgtctatatgtaaaccactaggatacactccctgaaatggaatgacattatctttttgttaaagtcgtatgaggaaaagtaaacaaatatttaatgatgtagaataacataatatagattttattacacaaagaacatacatttttaaaaatttcagttaattttgtgttaaagatgctcattaatttgtttacaaaaaatgtagaatcaataggaaaaaaaaccttaatgtttatacattaatattaattagagacacattaaagattctcattagataacatacactttttcaaaatcagtttcttataagcaataatcagttcagtcagaattgatacttagtttctccaaaggatttaagccttattcttttttattattttctatatacttccaatgttaaaatcattctaatgctacttatttttttaattgattgctctggggtttgtaaacttactagtctctcttcaaatagtattagactacttcatatataatgtaagaaccttacaataaccccactttgtgctattgcatcatatatcgtacttctatatatgttacaaacgccatacttcattgtaaatatttttgcttcaattatcttttaaagaaagtatttcatatttactcacatgtttatcatacattcattattcctttgtatagatccaaatttctctcatatgatttttcttttactagaggaacttctttgaacatttcttatagttcaggtctgccaacagtaagttctgtttgcttttatttttattttgccttcatttaggcagaatattttttctgggttcggaattgtagattgacaccttcccctgagcatggatgttgttccattgtatttttgcttacatatttctgacaaaagctgtttatttcatctcttgtaggtaattatttctctctggctgcttttggtattttctccttggttttcaatgatttgtcttggtgtcattcattttttatcctgcatgggatttaattagattcttggatctgtgggtttattctttttatcaaattgggaaattttctcaccataatttatactcgttcgacaagtttgcatgtgctgcttgctattattccacaagacaaaaagctctgttcatttcagtctttttctgtgtgcttcattttgggtatattctaatttgctatgccctcatgttcactggtcttttcttctgcagagtcatatctgcttctacactcatccagtgaaatctttattttagatgttatactcttcatccctagaagttctatttgattctttaaaaaaagattttcacttctcatcacattatgttttactttaaatactagtacatagctataatagttgttttaatggtattaccttctaatttcattatctccatcatttctaagtttgcttctattgatcgatttttttcctcttttggatcacattttcttgcttcttggtatgtccagtaatttttaactgaaagctgagtattatggctattatgttgttgagttggggatttgttgtcattctttaaatagtattgagctttgtcttggggagtaaattacatgtagatcagtttgacccattcgaggcctattttaatatatttctagggcaggtctagaataactttcactcaagagatagttcagtcctactactaagatgtgactctgctggtgtctctactgaatgacctaggatgacactgagggctctctactagtcaaagtgaaaagtcaggtgtgcaatttcaaaagcaatggtcagagatgacttcactgtgaaaatggtggcttgcacattaatacctttcttatacctttcattactgagtcaggggtatgaattcttttaataatgatatataatgtcaaactgctttccagtttatacttccactaccagtttagaaaagtgcctgcttcataataaccttgttagtattgaatttaataaattatagtatatcctttgggaggaattatgcagccattaagaagcatgatttttgagacttgagaaaaggctctcaaaccaatgttaattaaacaaaagcagagcaaaaaattctatgtacatcaagatcccattttgacataatgtattctttggtaatagcatttatattatgaatgattttcatattcttattttattttattttagtataacttcaaaagtgtctgttgttgaattttggctcctgtccaactttgaacaagatatctggcctttctacacttcagtattctcatcgaggatggcacaagcacatatcttataacattgttgtaagcattcaattatttaattgatgcagaactcacagaatagtgcatgtcacatagccatacactaagtgctcaataaagattagctgttactgttatatcaaattatctcatctgtgtagctatttaacactgtacttaacacaggagatatagtggtaaatgcaaaagacagttcctgtcttcactgaagagagattttcccctgaatctagatgttggtcttatttctggtgaggaagcttttattcttttcttttctatttcttttgagacagagtctcgctctgtcacccaggctggagtacaatggtatgatctcggctcactgcagcctctgcctcctgggttcaagtgattctcctgtctcagcctcctgattagctggtattacaggtgcccaccactacgcctggctaatttttgtgttttcagtagagacaggatttcaccatgttggccaggctgttctagaactcctgacctcaggtaatcagcccgcctcggcctcccaaagtgcttggattacaggcgtgagccactatgcccagccacttttattctactttaaaaaattctgtatagaaatacttttctaagggatactgaacagtcaaagcatgtttgatctctctgactttccctcattgaaagcattgattcttgttatacgtggttggtagatttagggagatgtaaactctgaaagaaacttgaaagtaataaatcctatatctcctttatgattatgtctcctttttttctaccccttaaacaacacacacacacacacctttagctgtgctggacacattatctaattccacgtgcgcaaattctgcatctagataatgttgtcttgtggtatctacctcattaagcagtccttctagaatgctttgatgactaaaaatacagatgacgtgtccttcgtacagccgctttctcacccgcatgtaggaacatgtgctttgggtacattttcaagcaaggacttgtggtgatctacctcatacattaatcctagctgtagtaatactttgggaaaggaatatgatcccaaaataaccaccaggagaagagtgtcatgaaaggtcatggcaatggggcagaggatgttggacaggagtgttctaaaaatagagagtaagagatcaaagaaccagcagtaatgaggaacattttttggctttggttcccagggaaggaggaggaggaggcggcggcggtggcactccccagcctgttcgtccgccactcatatctgtgttgcagaagtagggaggatggttagcacattttcctgtcctgggtgctgactgcctttaaattatttatttatataatgcttaaaaacatgtcaaaataagaagcatggagaattttaccttactgccatattgctactattgcaaggaagacctaaacattttggatcaagaatcctcaatttcagcttttttctggaccagacctttaggttttaccagttcaaattgactttttgtcatcttcctaaactatacctgatgattaattgtgagtgtttgcagagccaagcactgagtttttgtgcattcatgagaagttgggtcgatcagccactctgaggtgtgggcatatctggctgcgagtgaagaaatttatatcttagatatgctgttcaatccctcccctgcaaatatagctttgacaataatgaggcgagtagatgaggacatgttaaaatcacaggcctcttgaaggaatttttggcagatgattgtgtgtatgtgtttgtgttcatgtatgcacacaatatagtaattccatacagtagggaattaaaaaatctgggatgaatcccgtaaccttcctaaggacaatttactcaatagtgaactaaacttattgacacttggctgacagacgataaatgtatggaagtgcttgccaactatacaatgctgtacaaatgttccttaaatcctgtggttgtcagagaaccagtctatatgttcaagtcgaatccactatctcctattcaaggaggtttctttctttttgttcattccaaaactatttactgtgccactccagtgtgcaaggcactatgccaggcaccaagaagcatttaaagatgaatcatacccagatcctgccctcaaagaacttaggatataaggaggcagataaactactgaaaaatgctctgcttggtttctctaatttagcttcaaatgatgtcataactgagcataatatgacatttaaaaagggacttagcactccctcttaaatatttaaataacaatgtacatgttaattagtatgcatttgcctgttaatagacttattaacatgtatgctagtagtcaagagtactgagaaatgcctgtgcaggcaaaggtgttcaggacaggcaatgtgaggtactgtagtgattagcaatgactgacagtgcactaatcacagcccttgttgagcaatcagtcttcattaggctccccaaaccaaaactgacccaaaaacaattgattctttctggctttaaagccaatttctccatttgttttgatttgaggctttttaacgctgaatctgtgtgtgaaaggcccttctgtttaatattttagttgcagtgcagttaataaatccttgactttattctaaaagtagagacaaagttaagacttctccaggagactaaggaatcttaatatttacatgagggaaatatacacagttataatcctgaaaattatgcaatttccagtcatttaaaaatcaccacaaaatcttattcttataaaaatctagcttaaagcacattctcagtcagaattctggctttaaaaatattcattgaataagaatactagaggtctttggaaagtataggacatgatactgatctcttctcccagtaaaagaaagctgctttagagattaaaaaaaaaaaaaaaaaaaaaactcttacaatttcctttttaggaaaactacgagggcctgtacattggtcttgagctggcctctctttcaggcatgaatagatctaaatcactgtgagagatcttaaagatggtccttaggaaaaagaagctattgtgaactcagaaaagaggaatgttccatttagtgctcaaaagaatggttgaaaactagtggaggacatgttggtgctaacatttaacaaatgagttccatggaatgctgctaagtgagatgtaacattgtgtgagcagcaagtataatcttcaagccaagatgtccagggcaggcacagaggcctgggcttccttatgaaccaagacagacaactcccagccagaatccccagaaagtccctccatggagagtctggcagactagctccaactctgcagcctttgagctctctcactacaatgtttcagaaggaaggagagtccagatcacatatccagttatgtagcacctgtgaccccttagtggcccattgcctcacagtaaacactaccaccaatattgctgacagtccccagatgcagtggattcatacaacaaatatcagacctctagactgtactgtctatcagaaatgaagaatctgttcatgcctctgacctccaatttgtgcttctgccaagtgcagtgagcatctgcaggcctgtgtctgtctgcctgctgtctatggttaggtcagcaatagtgccctttgctggtaacaaacctctgggcctccagtttcttctggcctcatcttcatagttaggacccaggtcactccctgtttctcaccaagc

SEQ ID NO: 2906 - DNA, 2144 bp, Homo sapiens
cagttgttggcttgggtgggcggacagcgcccggtcggcggctgctctgcccggaggcccgcctgtgcctaggtgtttgaggggttcgttggtgagtgggaggctcctccaggcttgaagctgagcagcgctcgccgaggccggcgccttcgagccggtagctgcgggcttcggttcccgctgcactccggcttcatccatttctgagcgcagcagtttgtcccttttggctcctttggcgggagaacaaagcagcgggtttttttccgctacagccgttttctaagttgctgggtttgaggtaggaagagaaaatggagagaggcacggacacagagacttggtcataaggcaaacattaacccccagcgaacacgcaacattaaccccccgcgaacacgccgggaatggatggattcccctcttctttcctcccctcccctcttttggattagaagaggagaaagaaaatcttccgcattgtattgcaatccagggaagaattattcctatatgtccaccaaagccgcggcaaatagaaggaggccttcgcagttaatccaagacttcgatgtgtgatcataagcctgacgatttaggcaaaacaaattaaacaaaatccactaggaaaaaataaaagcaagctcaatcctgctacatccttgaaagtagtgtcgggtttgtttttacctcctttccttttaccttgtttattgctgtaacaaatcattagaattctcccttactctgtctaaaccccgaaaaatcgaaaatcatttcgtaggggtggtggaggggaaggtgggggacttttcccctttgtttctttctttccccctttgttggtctttatttccttttctttttctgtctctctcttcctctctctttcttctttctcttaatcagtagggagacgagaaaggacctgaacagatcagatatctctctccaagcccccttcccaactccatttctgtaggaaagtacagcccctggaattgggttctggtttcgctttgggctggaggtgggtggatgggggtcagagagagaatgaggtgggggggacttcaaggttctgtcccaccgaccagagtctgaagactattcgcctttcccaacacggacctccgcccatccaggcccgggactatcccttcgcggtgtagcggcagccggagacctggctgaggaggcaaccgcgtagacacctccctgcttagaaaacaaacactgaaccagaccgatcccagttggagggttcgaaaatgttccagacagcctgtcgggaggggttgttgttgctgttggactaaatagctattcctgattggtcatgtatagggttttttaaggcgggtggggggaggagggggtagaggaaaggctccaaacacctgcaggttgggggcggaaagctgtttgcgattccctggactggttggtcggggacaggaggtaattcccagccattgacccccatttctctctctccctccctcttgccctgcctctttctctccacccctatctttcctggaaactcgctttgggcgcggcagatcgcccaggaccacaccgcagcgtaactgcaggcctctcagcgaaaaagggggaaagcaaagacccgggtgtgcatcctcttcctcggcttccgcccctttccggcggagtggagatcctattcagaggggccggtctctctaaatatgccccaggtgagttttcaggggaatggtgccggtggaaacggtgtctaggaaggccttgtgttccggcctggggtgaggaaggctcaggacagaggagagcccattctcagattgggggtggggggaggggaggaccagccagagcttggaatcgggatctgactgctgtagctgcctctgtggcattcagcggctttttcccttttccacccagggtaaaaccagctagttggacttagtcgtccaggcctttcccattggtcccggttctgtggacgtttcccaaggccggtaactttggggcggctgtatccgggtggtacagactgtgcctggagctcccgcaggaggaaggcggcagccttcctggctagtgcagtcccagctcgagtgggccctgatcccaggcctgaggcctagggtggggag

SEQ ID NO: 2907 - DNA, 988 bp, Homo sapiens
caagaggcctgcagctacacagcgaccggtgccctctgctcaggggcgaaggatgacggagacagaggctaagagagtgtgtatcagagctgaattcccccacagagcgcaaaccagtctcccaacaggtgccccctgcacaaccgaaccctcccccgttttcagacaggggatcgcccagaccaccccggggtgggtagcagctgagttgctggtaccattccattcagcacgaggatgcatcgggccggctctcctgcaacgtccagcaagacagatgcatgggtagagcagcgggaagcagctgataaacctccaagtcacgcatgtgtgtcatgagtgttccggcagtcctccctgcagtcccacccacatccctccagctgcaatggggaagataaaaggaacaaggtgatgaccaaaagtttaacaagaagggctctgacacagattacatggttcagcactgtactttatagatgaagaaactgaggatgggaggagacagcaagattgggcagggagctcgcggcagagactaagtaatagtaggattaagtaacagtgacaacaacaataacaaccatgttattgtgtacccagaagtggtctatgctctttatattatgccgtttaatccaaacaataaccccgtgaggcgggtattgtaatcgtcgccatttcgtggatgggaaaactgaggcacagaccagttaaaagtaacttgcatgaggtcagactggtaaaagctggattcaaacccaggcagtcgggctcaggagtctgccccttactcaatgccagcacaccacacaggacacagccatttagaaaatgacattatttgacatagccatgtgggtggagcccaggccactccagggaatgtttgcagatggcgaaaatctcataaacatggtctataatcttctgtatttgtgatcatagagactggtcttgctcctacaaacagagtaagtcaacacac

SEQ ID NO: 2908 - DNA, 13198 bp, Homo sapiens
cttagaataacagaatttggtcccctcccacttccgtaagttgaattcttaattgctaaatttcaggcttttttgttgttgtttatgtaagaatttcaaggccacaactccatatttgaagtaaagtgctcataaaattaattgcaaggtaatttgccgttaatagttatctgatttctactttgatctagtggttgttaagaagagaggttttggtttttttaatcttgattttgctgttgattcctacttttaattgctgtactggagaaaatgatttctgtgggcttctttgaggtacagcacatgattcacaattgtatatggtctgataacataagaaaataacattttctcagttagtagaatacaaatacttaaaaatatatgtttttaaatatttgaaaaggggtctgctgattccattattaatgtattgcatccttacttgattaaattacttttgtttctggaggatttttttgtatatgtatatttgatgctgtgtccctggtgagttataaactccttgaactacagcttttatcatgcatttgttataaatttttattcattttatatatattgatattgtcaatcctcctttttaaaatttggatttgactttataattctgcacatccttttcttttcaacatttgccttcatttttcaagtgtgtttcttatagacagcacatgtctgtattttttaaaaacccaatttgatattccttgtttcataacaggaaaatttggttcatttgaattcagtgtgaagattaatatttcggtgttgttctcactttatttgctatttaccgtttattccttttttcgatttttacctctctttatattcttgctaataatattaagctttttgctagttctgttgtttctcttttggtttttgaattaatgttattttatgattccccatagccctaactataaacttattctaacaatataaactattctaaaaatcacatataatttatgtgtctttatttatgtgtctttattaacacataaaaattaataagtaagtgtaaccactcgagtatttaatttgccattcctcctgcccctttaaaaaggagacatttccactggcccctgctcttccatcctgagcaaactccccaccttcacagtagccaacacttgggtttacagcaatggtttcagattttcagcgtttcatatcctggctaacatttttgagataataatttcttctgtttagcaataagttcttaagatttaaatatattccagtcatatcattttattaattcatttttttctctataccttaaaatctatggcatctcatggttcgacattaggaaatccatcactatgattcagtaagtaaacaaattcaaggtgtcacatcatattgctttttatgcttttgattttagtaatatcctttcacattcataatccagatagagagataagcaagattgtatccaccaagcctcctctttattgatcttccaaactgaaaaacatagctgccattttagtcagcagttaaactttattatagaatatttttataccttttctgctaacattacctgcaactcccatggtgatgctcaaatcccatttgggaattcagtgaactagcagaatgaaattctaagagactggggcttgttgatgtgtccacgctttccatgggaactgatgttaaatatttcacaaataccataacttccaggaattcacatattctttattgaatgtagaattgtgaaatctttaagaaataactgaatcattatttcttcactgtctcctgcctgtgaaagcagaactatgaaatagctcaagggaatcagtgagagatttgtatccattatattcagtagcctgcatgtgtccaaatcacaaatgaaatgatgtgggcaaatataaattaaaattgaatgttgcagaagtggttgaggaacttcaccaggatacattaatgtacaaactgaaaactgatgaaagacttctgaagagagatttgctaggaaaaataaaaagatatataaatttcagtgatgctgaaggtatgtgcaaacaaattgtcctcattaatagtaaaggtataaattgatgtggattttctagaagacaatttaaaggtacacacttggtttctaaaaagtacactttttaaaatctatctttttaatcccaatttatttacaatttattataagaaagtatttaggtaattatgcaaagatgtatgtaaagtaagttcactaattgttctcagtacaaaaaaaaggatgaaattccataaacatctattaagaaagacctggttaaataatgtattgtacctccatatgtttagtcattaaaaatggtcacttaaatctctagtgtattgacatcaaataatgtcaacaataaatttaaaaagcataactctctagtgtattgacatcaaataatgtcaacaataaatttaaaaagcataaatctctagggtattgacatcaaataatgtcaacaataaatttaaaaagcataaatatatagaaaaatatccctatctctatataaagaatgtctacatacccacttatgaatacatggaaacatatctgcaaggatatagtctaaaaccttatcggtagtgtttcttcgcagtagtgtgaaagaaatacagtagaaacatttaactccttccagtaatgggaaggagaggaagagctcacaaaaacagaaagcatatatttttgacattttgatattttaaatgtaatctcttttcttcatttttctggctacatatgttgattcaacacatattagtaagcaggatgtaatattcaataaaaacttctgtaattgtctgcattagttccaatttattcatatagaaactattcattttacatatctctttctattaaactaacatttagcatgtaaggcacagttttatttttgaaattattaataaattaaaatgttagtgacaaacataaactcttgagctttacaataggttaatgataaagaagacagccaatattagatggagaaaagcttcataaaacccacaggttagagaaaaattgttaggcatttaataaatgatagatcctttatattttgctgcacaaaaaccaaagatgaaaccttttttaaatgcatggtctcagcatgcatttcaaatcacatttttgaagtttatgaatttatgattatataggggaagaaaaaattctttgtttctccacccatcttagatctattggctggagctctgcaatttagactgacaaaagacggattaaacaagataaaaacaagtttattaacataggcacaatgcataagaatgggaactgtcactaatgtataactcaaatgagtggttagaccttagagttatataacaatctgaacaaggaataataaatatgttgagaagtgtcaggacaaaggaaaggaactttgggcttctaggggcagcaaattgtgggaaggtaaatttttgggaaaagttaatggaagatgttgggcacggtgtctcacgtctgtaatcccagcacttcgggagaccgaggcgagtggatcacccgtggtcaggagttcaagaccactccagccaacatggtgaaagcctgtgtctactaaaaacacaaaatattagctgggcatggtgggatgcacctgtatacccgctactccggaggatgaggcgggagaattgcttgaacctgggaggcacaggttgcagtgagccaagatcatcaagatcatgccactgcactccagcctgggtgacagagtgagactctgtctcaaaaaaaaaaaaaaaaagaaagaaagagagagagagagagagaaagaaagaaagaaaagaaagaagaaagaaagaaaagaaaagttaatggaggatgaggtctagttagtaggtttgttttatatactatgtagattcctctctggtgccttccttgggctggtagactttatagctgtttctggtgatatagaatcatcctgcccttcctgatagagggggaggataacagagagtttttctcgtgtcttcttgtgttttgttttgttttgttttgttttgttttgttttgtttaattgcctttgactcaaaatagtccttaggccagagtgacatattttggggtgacatcctctgaaccttttcaaatataaggtctgcctccttctttctacttcataacataaagtcttctttctcttccatgaatattacaattcctgcctgagtcttacaaggccctcctcttccctgtaggtcaggacacaattggtcctttgaattgaggtgtggtagtagccaagctttcaggagtgaggtttccacctttcatcttgtttctaaaagtaaatatctagtaaatgataaagctgtgtttttagttgtaagtctatggtgattgtatagcacagaatgattctaatgtattattttagcaatgaagacaagcagatttgatgcagaaatccttgacataaggagccaaaatatttatgttgcccttaggggatagatattaaatatatctacccatactaaactttttttttttaagagatggagttttgctgtgttgcccaggctggccttgaactcctggactcctcaagcaatcctcctgcctcagcctcctgagtagctgggattacaggtacatgtcactatgcccaactttcccaaattaagctttaacaaatcttctcaataatgttttcctaaattattcttgaatacagtcatgtagaacatataacaattatgaagttttaaaagtctttataattcaggaaattttgaattaataaaaacaaaggaaactttttgttttttgagacagagtctcattcggtctcccaggctggagtgcagtggcatgatctcgggttcaagggattctcctgcctcagtctcccgagtaactgggattacaggtgcttgccaggaaataaaggcaataaaaggtcattgctaattatctgctctaggtttaaaaagttcatctaaacttttcaagtatctttttttccctgaagcctacattttgttattactttagttggaaaacgactgcagtcaatgactcctcattccctcaccattctgacatgcactccagcatctctttgccattatttcagcaaagatagatataatatgctatagaagaaaaagagtagcaaccttaacttaagagttgagttcctattgtaaaataaagacattactgagactgggtttcaaacaaatatatttttaagctccactcctgtggatttttttgttttgttttgttttgtttttgtcttggtctctttgttgatcctgtcagccaatggtttctcacttgcctgtcagagctgaagagtccattccttgtcaattcagatgcgaagtggaacaaacgtcctttagtaacaaaacgaatccgaaatgaaaaaggatatgttactgctgactgtggtggttgtcaataaagatgttttcatagcaactattccttcaaaatacaatgaacatctgcaatagtcttttacccaaatgacaaattcctttcctactaaatcatgtctttacaaaattagaaggctctattttaaaccttgaattacttgacattgaaggtaatgctaattacaataaaatctcccacttacataattattaattcaaatttgcacctttttcctgaattttacctgcttagaaatccttatggtgctaatgatgaacataacgattaagaattttgttgctgaaatctctctatgcctcagtttaaccatgttaaaaattgataagataatacttaattgatagaaactgtgataataaaataacaccacaaatgtgattacaacagaacatggcaaaataaatgctagctaaatttttaaatcatggtttaaagatataatttgtgttactttaattaaataattgataaatagatttcttgccttgacattaaccttgagtattcatatttctgcaagtaggagaggaaggatgtgatgtctttccccatccgtcataagggtcatggccaacactcctataacaaaaggtaggctaacgagaaaaaagcatgacaaatatttaatcatgcttttacgtgacagagaagccttctgaaagaaggctcaaagaaccagggaaaactatccatctttatgcttagattcaatggagtggacagttgtgtagaaatgtgatcggacaaaggaagaattatctaatagtaatggactgcgtgtggaaacccataagaactgtctattctgattcttcttggcctctctgtgtggcatttcttcctcctgggtatggggcatgactccttctggaattagggtttgatgacctactatcaaataaggggaggtcagagaatgtctttatggccagctcctagatagaaaggcaggacaaggttagactaatcattctagcttttatttttggctttgaggaaaagcagatatggtttgtatgacccaccttagggaagaggaattccagtttttatggttcaccttgagggagaatgaggggcaaaagacatctgaatccttcacttcagggtatcattttctgaggctcaatatggacaagtatttataactaggtgcttaatatggccttttgagatacacagttcctatgctgcaatctcacaggcaatgaatggtctttataaaagtgtgttaaagttgaaaaaaaagcaacaaaacaaacaaaaacctgaagaaatattcctcattgaaggtccagcttacattaaaaagaaaactataataatttattctcttgagaagggttgtatagcaaaggaaaattcttgaatgttccctctgcttgccccatgcatcaattctattgatattaaagtaggcctagcaaatgtacttccattctcactgactcagtctttgtaattcaacaccaattctgaaaaatacttagaaattatttcagtaaacagctcttataagtgctacatgcataacaatatttcaatatcagagacttctatcccatgagaagatattttcaacctaaaatttattataaatgacctaacaaagaactattttttcagtaattggctattatggttcaatctgttatacccactttacactagaaactatcctatattttcttgttgcctacgtaaaagtgggcacgaaaaggttaaacagtaaacttcctgactcctgccagccaagggaagactactggtgttacctacgaagtgtcatggcattctcatttctgaataatgagggaaatctgctttcaatacaaacccccataagacagtcactcttccagacaaattaagctaaataatccatcatgacagctgagaagacaatgtgcaaaatgtcagtggaggccagggagagaaaggcagagatggactgtaagagctgcagcatgatgcaaatactgagaaaagacattctctgttaatacagctcttaattgtaggcattttttacagaacatattgagagtgaagcaaagcttccttagcagtactctgatgtcttctcagcaggataatgtagggtaattcacagtgaaggcaaggggttaggaaagtcacagccctaaaaatcaatgggctgcttacagggaagaaggtgcaacagatcttggagagcacagaaaagaagagatgagcagcctgtattgaacagaaaccaaaatattagttagatatatccagcaaagccattccacaagttcgttagtgagtaggtgccaaaagccaactgtaaatcctagatacttgtacatatgcatgcttatattacttatattttaagcagtcatatcctcaagctatattatgagttcagtcattctaaaaagatgcttccattgtcttcttggcacttactcagaatcttcagttatcttattcatactgtgtgcttactggttgtcttaacaggtgagggcaggggccctgtcttattcacctccatatctccaggatatagaatagtgcttggcacacagcaggaactcaataaatattcatactattttgagtcccttaatcctcatatcaactacaggatttagattttattgttatctccattttacagatgaggaaaatgaggaacagagaaattaagtaatttgcccaagctatgcatgaataagtggcagagtcaggatttgaagccaggcagtcaatccctagaatttacactccaacaactactgcctctagtggttatgtatgtatttatacacgtatatatttgcagaaataattgaaacttatttctgcctaggtgcatgatatattaaagcatcactaaatccttctgaatataattcaaacttcttcctaccatagacaaagtaatggcctatagtgaacataatgattatcccatcatacaccttgtactgtattagttttctttgcaatctcaattacacttgcatttttattatcatggttttataaaactttatgactggaaagtaccgtattcataaagagttgtgcctcatatatgttagacatatatgcatttttattagtaattataacttttatgcagccagatagccccaggtttatgattccacatcttttgtgttgtgtcatcttttgtagctagttgatattgtaatgtttgctgacttaattcattcagttattaatttctataaactagaatttaggggacatttcaatggactatggagagaaaataactgaaaattggaaattaagagcatctgagaaaattcaagttgtttgtacatcctggacataaatctcaggaaaactgacatattttccttccttgtcaagtcatacaaccaatgctatcactaaaactggtctaacatttaaacattcagacaatcagtttagtcaatgcttcaataagtttactgaactagcagtttcttaccaactagttacagaacagtcacagctgaaaatgatctatacattgtattataaatgggattaattattctgccagacaaccccaggtgtgccaaataacccaaccccttcctccaagacactcattgagaaactagacagcatctgagcattgtaggaacaaacactgaagtaaatggattctaaatccctttgagttctaaaatgctgtagagatctgagaagcccacaaccttataacagcaggcaacatagattacgcttaaaaagcaacatactttcaattgattgataaacccttttgttgttcatttattgcaaataggttttagagctcaattcacacttttgtgaataaacattgaaaatatttgattcaatggttatatttctgcctgacatgaggaaattatagaatctattaaccttaacaatttaattagcatgtcccagacttaatcactcactatctgggtagaattggcccaattagttaaccactctaaaccacagtttcctcatctgtaaaatgggatggaaaataataacaactcatagggttgttaagaggaatacataaattattcatgtgccctgtatggcacacaataagtccttattaaatgaaccggttgtagaactgtattaagaacaagtagtagtagcttccatatttagagagccatcaattctgttttccaacagctccattagtgagaattgtgctgtgtgttttccccccaccccgccccactacaactgcattgctatatgcaaggatataacttctgtctctaaaactattcaaatagtgagcctgggaaaaacaaacttaggtcaaaagagtttgactaaactggctgagaacatttaagttggataaaaatagatgtattttgtttgtataaatagattttggtcatgagaaagaaataaagaggttcctctcaaaagaaagcctggtttagcagtcagtaaacattgggaagagtcagcagttgacttccccactgtgtggaagaaactgccaaaagcccatccagaattaggtgtgtgggagggaagaacaaaggagaggcaaacaagaagctgtcactattcaccactttcaccttgaataacctttaattgaaaaataaagttgccaaaacaaggagtaaaagaaaaactaccattttattccctccttgagattgaattagagggaaacatactgaccacagtaatcccaaggttggactcacatgatggcaaatgtcacttagttctaaagctctaattagaaacagggctgaagttttagccagctcctgctactagaaataaaacatgaggcaacagcaacccaagccctggacaccccctgacagtgaactctgaggtgctttctgagtgagttgagtataaagctgacagagcctagagaattcatacttgagcaaatattgggaaagaataaactgggtcagttaccacctgtttctagattttatttttttctagacttcaactaagattgtctttcacattaataagaagaacgatgaacataatctatttcatccaacttctacattccaggcacagtatcaaccactttattacattttatcttctgtaatattcacagtgttattgggtagattaaacaacttgcccaagttcacacaactggtgactggcagaaatgggatttgaacttatttgatgccagaggaggtgtatcctttaatattttagaataacttatttatttcattatattttatgaaccttgaaatatgtttattgtaaaaaaaaaacgcagaaaatacagacaggctaagtaaaatgtgtctttacattaaagtatttaatttgcaaaagaacagttgttattttaaaatcctaccccacagtttttcatatttctctttctatgtagggttaatctcatcaggaatttctcttatccatccacagtttgtaggacaattctttgcacataatgggcactcaaatgtacgcagatcatattagtccaagaaaaagctgcttgttggggctaccaagccagcatggtaacaccttacaatcaccctttctacctgcagtcacattgttcccagagtggggtggtgatacttgccagctagcccaagtttctggatatagacctttaacaacttcacaagtacccttagaaaattcggttaagaccgaacatggacatgcttgctccatttttttccactctcaaaatatccttgagcagtaactcattcatagataagaaaaactttttctcttcagttttttcttttctttttgaatattctttgattttagcagaaataggcacagtaaaagaataaatataagagacgaagaataaaatttatgaaatttagaaagctcatgttagagaattgtactctttaggtagatccttatttaaagaataattagaggaaagaaaacaaaagatgaaagagtacaaatgagattcctgagcagttttttattttgattgataaacttttaaaatgtgtttgaattacaatatttatatatcaggaatatgaaaggtttaatcataaaaattacataatatttcttccaacattttcatcttgtccatttcttcatatctatagtggagaattatccctctgtaggcaagaagaagtctttattctcttcggaagctgctcctcttgcactccaaaatatagttctgatggaagctgccaatcactttatcccattcccagaacaggcatggtaccagactgaggtcaatcctatactccaccttatttgccatggaaaatagcctagcgatacttgcatgactcagggcagttggagtagtttgatggaattttttaaaccacagctgacaggaagtagctctgttccttattagttgcaaatgctgcaagcatatgaccctagagttatctgttgccagttgttgccttgtggagatcataggcttaagatgatgaaggcagcaatcagcaataagcagaggtgtgcttgtgtgtgtgtgtgtgtgtgtgtgtgtgtgtgtgtcagaatgagagagagagaaaaattactgcttctgaaaccaaatccatttccaaggtgtggttttagaagcaaataaattgccaatttcagagctgattcaagttgaatttttgtcctgtaaccaaaagagtcctgactaacagccaaaactcaggctgtcaagtaaacataatctgtaagaatccgctttccagcctccattccccttgacatcttcctgaaagaagatttgtataggaaatgctgacgtctctttggcaactgcataaaaattattgtattcaacaaatttattatatgtctctttgtggccaggcagcttgcttggcactggaaattggctagggagattggggcaagaaaaatacctctctccatggtggaggcatacataaaagccgattgctacacaactgcgtaagaagtgctttaatcaaagcctgaataaagtgttgtggaaactcaaaggagcaagcaaaatgcttcacatgaaagttggacattcgagtcaaagactcacaggattttcccaagcagaaaagaaaggagaggacatcatggacagaggaaatagcatggtgcaaaggcatggtatgaaaaaaatacacgacaaatttgtggaataacagaacttttgatgtgatcacagcataatgtggagttgggtaacagtgagggattaggctaaccagcttggcagaatactgactaaaaattcttaaatgctgtgctaagttgttagaattttatcttacaggttttgagaagccatctgcagctcacaactagatgagtgacacaatcagatgtgcgtatgcaaaaaaaagcctggagacattgaactaagatcaaatttaatgtattaaatatggtagaaagaagagagaatgaaaaataatgttaacaatctaggtgaggaattgctgaggagacaaattaagtaaatcctgtggaaggaaagaagaaaggaggaaagaggattggatggaagaatctccacttctcagtaatttgtttatttactttattagtttacatccatgtgattggcatctaaattattattttaaagttagatgacttttgctaatatccttgtatttaaatttttaaaaatacatctttttattcttcta

SEQ ID NO: 2909 - DNA, 3823 bp, Homo sapiens
ctccccacacccatgacagcctgtcctgatatagatggagaggggactggtttaaaatgacagtctcaagttcatttagaaagagaaggctaattcaaagaaacagcaaggcaagcttcctttctctgtaggaatcattattatccccctttgtcatggcccaccggggagcccattttgcctttagatcccgctggcagaagaccgacgatgaactctgtagacatagcatgtcttttatccttcacaaagccattcgcaatgacttctttcagagctatctctacctgctggaaaaaattcccctggtgaaattgtacgctttaacaagccaagtcatcaatggtgagatgcagttctatgccagagctaaacttttctaccaagaagtaccagccacagaagagggtatgatgggaaatttcattgaactgtccagcccagacatccaggcctctcagaaatttcttaggaaatttgttgggcagtgtggagctggtggatatgatggaatcctttctccttgaagcccagaactacctgcaggtcaaaggtgacaaagtagaaagctaccactgctacagcctgcaggaattcacaccccccttcaggagatatgatgtcatctggattcagtgggtctctgggcacctgactgataaggaccttcttgcatttctttcccggtgccgagatggcctgaaagaaaatggcatcatcatattgaaggacaatgtggcccgggagggctgtatccttgatctctctgacagcagtgtgactcgggacatggacatcctccggagcctaataaggaagagtgggctggtggtgctgggccaggagaagcaggatggcttcccagagcagtgcatccccgtgtggatgttcgcactgcacagcgacagacactcctgaaaaagcagtgggaatgaacgactggactgggcagtggtgctttgggatggggttgctatccttccaggtgccccttgtaatgcagatagggatggcaagaaaagggatacaacatatgtctgcaaattatttgtgatataatatgtacatgttttcagtgattatataatgcacacactctgatgagacatgcacaaattctgtggattttctgaaaaaaaaatggagtgaaatatcaggaaacgtgctttaacttctcttgaacaaacatctccctctaattaagaagacactagtcaaaataatcttgtgaaaacaagtccattatttaattttctctttagcctttctcttggcagaaaaggtatttggtttcactttctattttgggtcagttttactacccaatgatgtaatatggatgtaatttgataacagaagtctgcattacagtgatgggaagtatctcctttcaggagaaaatgttgtgccctgaaatttcaacctttaacatataagtaaatgtcattgataatctaattttagtctttgcttttcaacatggcttggttcattgcagctgctcctggggtcttgattgatatgaatgtatattggaaagagaagcagcaaaagaaatggacaaggaaatgataaccctgaaaattgactagctggacattggtttaattaaaaataatctaaaatcattcaaaaaatgtaattcaatttttattagcagaatgctaaatataactgctgttgtctttaaaacacttcaacatccttcacagggaagcacattgatatgtattgaccatgaaattcaatttaagtaaagaagacagactacatggatatgctatcatcataaaatagtattttcaggtcacagctctagaggaaaacaattttgataaaacatttaatacaaagtgcagcaaaactatgttttaggcctttgtaattcttagagcaaattagcagaatcttctttttaggctcatcctgggaatttttctttcaccagtatccttaattctcttaacccttgactttctgcttttcatgattgacacagttgtcaatattctctgctatgggcttctgagcttatggagggaatgacataattttcctgtagatactgatatatgattttcaactcagctgggtcattgaggttgatcatcattcccctttctcatcctaaatcacatattattctccttagaaatttttcagatttttattgctctatacaatttcccaattccatatctatgcttaacttaactgagaaagtagacattgggagtaaatagtatcatcaccccctctttatattgttaataacgggtacaaggcaaagggtggcttgagagaagttggagccagatcctgcacactataggtcatgttaaggtttggacatgttactcaaagaacaagtggaagttcttgaagggtgcaagtaaaggactgatttttctgcctttgggagtagagtcgtagaaactgtggatttagagtgagacctactccagtcctctttaatctaattgagtaagccaaacacactgctcatgtttatcaacacatctgaaagctagtgatgcaaatgacaacctatattatttcccaaatactggtccatagtccagctgcctcagaatcacttggaggtgacttataaatagagattctcaaacttgatccccgtgatatatggttctgggtcactgaatctgatcactagttttgtttgaggacactgatgggaaagaggtgtggagctgggctcctcagaaccacagaaagtaaggcaagggaagcaaaagtacgggccaggttcaagggactggtccattctccacattgatgccagtccttctaaaatatgaatctgactgtctcatgtataaactttcaatgactctccaccaccaagaggatgaatttctatctccttagaatggcatataaagccatttgtgatttggccctggcttccctctccactccagcagctgtacttattgtaggtcccttagggagccataatttgtggcatttttacatgttacttccttggcatatatattttattttatttttgtcaggcccacaccacttagatgttgctgacttctgcttaccatatcacagcattcataatcgtctgtttacttgccttaaattctgagctccctgatgggagtattcatggttagagtctcagtctctattacgggccctagtacacttcaggaactcaaaagctttgctgatataatgcaaggtgataaaaaagtagaaagacttgggataatcttgatttctgaaggcatcaaacgggaattagagaaagcagcaggaaaaacgaaggcctttttaagttccatgagaactacggtttgcaagactggtcaaaacagtacaatgcaagcggcaagaatcagaaacaagaagctcggtgcacactgggatcaggcaagggagaagactgtagcaagactggatcctgaggtaaaatcctgtctagttatgaaatctcattctctctctctctctctagaggagacaatccgaggatatgagcaatccacagtttcattaggtgagtgtgtagacttgataagagagatatgttgaaattgtgagtaggttgtaacaaaatcctcactcatttcctgctatgcaagaggtcagaagaaactaactaggttatagatgacgttaatccttctgtgaatgttgcacagatgagctaattgcaaacatgcctgcaatcctagatgaactttggaggacctcttgatttatatagtgattcatgaatgggtgcactcttcatctacctctcttttcgagaacctgagccaccactcctaagcactggcat

SEQ ID NO: 2910 - DNA, 7192 bp, Homo sapiens
catgctggaagaggagcaggcttgctgagaaagatgctcacttaggtcagttctggaagggcaatgttggggcggtccaagagagagtctctccaatgcagatgggagcagtcagttgaagtaaaacctccctggagaggttatttttttattttttatttttatttatttattttttgacggagtttctctcttgttgcccaggctggcgtgcaatggcgccatctcagctcaccgcaacctccacttcctgggttcaagtgattctcctgccttcgcctcctgagtagctgggattacaggtgtgcaccaccatgcccggctaatttttgtatttttagtagagacgggtttttgtcatgttggccaggctggtctcgaactcctgacctcaggtgattcacctgcctcagcctcccagagtgctgggattacaggcgtgggcctctgcgcccagcccctggagaggttttaaagctggtggctcatggatggtgactggggccatgatgggagtgcatggaattatcagggagctccttagagtgagaaagaagaggaccgaaaatagagacgtaggaaggctgaagatctaagacctgaaggaggggccagaaaggaggccagaagacaccccggagcctgtgaaaacctggaggctgcccaccagatagcatgatgatcaagactacaggttctggtgtccaacccacctggctttgaatcctgacttccccactaaaactgacatgactttcgatgagtgtaaggccattatcatggactttttccccagctgcagggttatctacaactccgggtggaagtcaaagattggaagaggatgacctctgatcctggaactgcattgcttggtggtcaggaggggttcttagtaagcaaactcagtttaatcccagagtcggaagtgggtgtcaacaagccaaagcaacatcctttcagctctgctgcttttttgtcttggtggaggaatagccaatggaagaagatggagagtccggaccaaaaaaaaaaaaaaaagatgaggtaaagtagctacacttgtgtacataaggaaccatgtaaaagtatgctatgtatgtatgtatttatttattgttttgagacagggtcctgctctgtcacccgggctggagtgcagcggcaggatctcggctcactgcaaccttcacctcccgggttcagatgatcctctcacttcagcttcctgagtagctgggactgcaggaaggccccaccatgcctggctaatttttgtatttttagtggagacaggttgccatgttgcccaggatggtttcgaacttctgagttcaagtgatccttccgccttggctggccaaagtgctgggattaaaagtgggagccaccgggcccggccatttttttctatccacgtctttttcactgctgtgtctgagaaattttacacgctctcatatatgtagctgaaatgatgcaggagttccccggcaccagccgcttggtactctcatttattaatatcaataaatcaatgaagccaggttgcaaggcattcttaggtattcattcaccatgctaggaccgcattgcctggagctcttcagcagtttttcactgcaaggccttcacacaagctagtccctctttctggaacattcctctccacgttttgcacggcctattccctcgcctggttcagatctcttcccaattgtcctttctcctccagctttccttgatcccttcatcattctttcctctatttgtatttatttatttttgttcattgttttcttccctcctctagaatgcccatttcaagaacgaagggaatttattttgttttccctgctgtgcctcaatgcctaggacagtgtgaagaacatagaaggtgcacaactaataatttattcactgaattaacagggccagggtgtttttgttacttgttacagatgtgtgtgtaacattttcaaagccttggaagttattaaatcactttcccgcattttatatgcaagactcctattattcttaataagagtcagctgtacatctagactgcattaaaaaataagcaaaactacattttccttggccttgtaaacaatcccacatggtatatgggccaaaaaaggaaaattaacaaaaaagggagaatgtaccaaaccatattcagttagtaaaaggggatgtttttccatattcttaaatgaagatcttttacccaatatatccagtctctcataaaccatgaaatgaagtgactgggtatcagaactaattttcagaagaaaaactgtcatctttaaagcagtaaaatcttcataaaactgtgtaaactaattactgggttaagtaaaatcactgaaatatatcaggaccttcaaatgtctccagggcagacataatatagtaattctctaatagtcactctggggagatactgtaatgggcgggatgaagtcattgtaatattctcatttagtttgggtcctgagacttataaagagaataccggtggcagactgcacatacggaagagatgcctatttatttcacatgatactagctggcctttccaggctgtggatcatgagctcaggggagcccaatggagatgggcatactcatttgttctgcagagaagatatgccgaatgtttcttctcatccctcctcatcaaagagagtggaaaatattttgtgtacagtattttttgctttaggttatttagaagccttatgtatattaggtttttacatgtgagcaaataactaaaaacaagagcaggacctaccagaagcttcaacagaacagacagaccatggaagacctcatgttcttttgaattagtgaaaagctatatagtttaagtaggtatcttggtaatctaggataaatcacaaggattgggtaaactcaatggaatattgaaggtttattttattaggtaattttatatacatttaggccacgtgcagtggctcatgcctgtaatcccagcactttgggaggccaaggcgagtggatcacttgaggtcaggagtttaagaccagcctggtccaacatggtgaaacgccatctctattaaaactacaaaatttagctgggcatgatggcacttgcctgtagtccagctatgctggaagctgaggcaggagaactgcttgaacccaggaggcagaggttgcagtgagccaagatcacactactgccctccagcctgggctactgagtgagacaccgtctaaaaaaaaaaatatatatatatatatatatatgtatatatatctgtaatgtgacattgttttctcaaacctcagactaatcttatgctcaatatggaagataatcataactcatcactctggattataactgcttacatatgtctttcttatgagataatgcaccttgaaggtaaggacttcactttatttgcttcattctccagtgtccaatttgtggaatgaatgaatgacccttaacagaaacctgactgtgattcccttcactattaacttttcctagagttatgaattccagttagaaatttgttcagaaaatcacttgtccttaggaatataatttcacaagacacacaagttgatttccttatagtctatcatggtgatttctaccctggctcaaggctgtgattcatgaagaagagtggtaggaaccagacttcttaaaagtggtgagcatcaggccacaatctcagaggatagtgtatgaggagtaaaattgggaagacacattcacatttacccaaatggcttgcacattaaaagctgtacaccctccccaactccaattaactcagagggaaatctttgggcgggtttggttctctccaatgtgtgtgagcctgcagttgcctggctggctcctgtgtccctttggaattgataatgaggttcaagagagaggaatagtcctcactaagcatgtcacccctatttagcaccttttccaggatggcagccactattgttttattatgtctctgatcagctgtcactattcataaagtaatcactgccattaacacatcacgcctcaagccatctgctgcagcatggcacacacagagctgttggttgcaagcaaagcaggtgtcacctaaaaatgacagtaccacagtaaaggtgggaggtcatcatggtgaaagaggatatgtcacgtcaagtaactctattttttgatgtattatagtgcaatgagcaatagtatttcttgctcaatttgcagaggctaaaattaaaacttcttatttgagatactttttttcaatattggtaagtcatggagacaaaaaatgtcattgaagttcttaaaacaatagcatctagattgtgaatgaactcttgcattaaatttgcagtcaagtttaaagcattcttgaagagatctgatccatcaaacctttatttgacaagtgtttattgagcacatattaagtgacactgacatgtggctggcccacccgaaatatacagttgctacgtaaaacaaaaatcacaagtaatgtgtacagtggagattcctgatcccagctgcatttttgacccttggtcagtccctaacacttatcttgattttggataattttttggatagttttcagttttaacaggatccatattgattggattttctgtggatgtgttggaaaataagcttgcattggaaaaatacaatgatttcataaagtctgttaagaaggacaatatctttataggacaattagttctcttgaccaccttcattgtaaaggggctttatatttatacaactgagagaggagataggaatttaattgaagatcttaaatgctgatagaaagtgggacaagggatcataattgggttcaactatctttctagccccttcccctcctgcatatacactggaattgcatccttagcttaacttcagaaaattcatgtatttatccttggcaaatatacacacttatacatctatatgtatatgtaaaaaattaactagggtagttaataattctaccctccattttattgcatgagtttctgctcttttcctgggagtgagaagtattggatgagggtttggatcttctagcccatcagttactcttagcaacatcacccatcctttcctactggtgatgagagcatcttgctgcatgggtggtggttctcaggtgtatacaacaagtactcttctccatgatgcacatgtccacacatcctgtatgctactgctggtttaagggattttcaagggtcaattcaatagtacatttagaaattaacttctgtgaaacatgctactcaattacaaaccaattgaggaatgctacataaccccaaagtctatagaaagcaaagatatccatcttctattgatatagaagatatctataagatatctatatagggatctctcaactacttttgaatccaactttcttttgagaatcaaaaatctcaggctctctccctatccctgaagatttatagaatcatctgttgtaaccaaaaaaataaaatcgagcttgaatttttgtgcattcagaaaaatgtcttttattatttttttcaaattctataatgatctatatgcttttcaaaatgggtcccctttctccctggggattatgatatgcccaagcataagaggcattttaactttaaggatgatatttgtgaatctgggatgcatgcttttcaagataccagtgaagcagcagaggatgagcaagcagaagtgtctcctgatgactgatggccctttcttttttttttcttttttttttttgagatggagtcccagctcggtcacccaggctggagtgcagttgtgcaagctcagctaactgcaacctctgcctcccaggctcaagtgattctcctgcctcagcctcctgagtagctgggattacaggtgcccaccatcacgcccagcttatttttgtatttttagtagagacgaggtttcaccatgttggccagactggtctcgaactcctgacctcaagtgatctgcctgcctcggcctccccaagtgctgggattacaggcatgagccaccgcacctggcctgacagatggccctttctaaggagactgaggtggtacatttgtgattaccagatacgatagagttgatattgaccgttgcactagtgacttaatagtttttataaaaagccccaaaattgtttgatatttcatttgcatcaaaatgttgtagctcaaatggctttatcagattggctccttaaaatatcatgtgcccttgttctaggcgcagaaggaacacaaagacaaagacaaatggttcttgggtcctgccctcaaggcacttacagtccagtttcagttttagaagttcaaccaagaacatggctaatggctggtagagattgtactgactattataccacttctcctaaaatattattttggttgaaataataaaatgtagattctaaacaaaataaaataatattttactgcatttttctgtgaaagaaatgggggaatcttgggatttcaagataatccaacaagctgagtagggctggccataggtttggaactcatggagatcacagtggaaacccaggaaacattctcctgagggctgcgtctccattaatgttttctgcctaaggaatgtgctggctctggctctatgggtaaacaggagggtgaagaggaggctgactgagttaaagacatcagcaggttgggaactattaacactgaggatcatctttctgtttttattttccagacagggtctcactctgactcctaggctggagtgcatcatggggctctgcagcctcaacctcccaggaccaagcggttctcccaccacagcccctcgagtagctggaaccacaaatattcatcaccccacctggctaactttttcgtttttattttttatagagacaagttctccctaagttgcctaggtgagtcttgaactcttaggctgtagtcatcctctggccttgggctcccaaagtgctgagattacaggtgtgagccactgcacctggcagttgaagattatatgcggatcacctaggtcaggagttggagaccagcctgaccaacatggtgaaaccccaggggctttactaaaaatacaaaaaaaaaaaatagctgggcgtggtggtgg

SEQ ID NO: 2911 - DNA, 1816 bp, Homo sapiens
agaggatttggagaaaagtggtatatcaaggaaaaatgacatagacttaaaaggaattgtattcgtcatccagagtcaaagtaattcttttcatgcaaagagagcagagcagttaaaaaaaagcatcttaaagcaggctgcagatcttacacaggagctccccagtgtcctcctccttcatcagctggctaaacaagaaggtgcatggaccatacttccgttgttaccgcatttttctgtaacatatagcagaaattcatcttggattttcttctgtgaagaagagacaagaatacagattccaaaactcttggaaaccctcagaagatatgacccctctaaggaatggtttttgggaaaagcattacatgatgaagaagctacaataattcaccattatgccttttccgagaatcctacagtttttaagtatccagactttgctgcaggctgggccttaagtattccacttgtaaacaagcttaccaagagactaaagagtgaatccttgaaatccgactttacaatagatttaaaacatgagattgccctctacatctgggacaaaggcggaggacctcccctgaccccagtgcctgagttttgtaccaatgacgtggacttctactgtgctaccacattccattcttttctaccgctttgtagaaagccagtgaagaagaaggatatttttgttgcagtaaaaacatgcaagaaatttcatggtgacagaatacctattgttaagcagacttgggagagccaggcaagtctcattgaatactatagtgactatactgaaaattccattcctactgtggatttgggaattcctaatacagatagaggtcattgtggaaagacatttgccattttggaaagatttctgaatcgtagccaggacaaaacagcatggttagtcattgtggatgatgatacattaataagtatctccaggctccagcacttgcttagctgttatgactccggcgagcctgtgtttctgggagagcgctacggctacggcctgggcactggtggctacagctacatcacgggaggaggaggaatggtcttcagcagagaagccgtcaggagacttctcgccagtaaatgtcgatgctacagcaatgatgctcccgatgatatggtcctgggaatgtgctttagtggcttgggaatccctgtgacacacagccctctcttccatcaggctcggccggtggattaccctaaggactacctttctcatcaagttcccatatcgttccacaaacactggaacatcgatccagtgaaggtgtatttcacatggttggcacccagtgacgaagacaaagccaggcaggagacacagaaaggttttcgagaggagttataaatcagggtgacctgtgcgcctagcctgcgcagggaatgaactggagactgtggcctcatcccactgtgctgtgctcacaacacttgtgtctgccacatggcattgggtgcttcctgactttagggggagattttatgtatggtattttttgacagaggaagaaaaggggtcacaggagaaacatttttttttctgggaaaaatcacttgcttttgacttatgcagttgttttaacacttagtgatgactgtgtattctccaagctgtgatacagcagtttttttttattgtcacagggaaataaatggtaccagaagtccctttcctgttctgtctcttcattgtaatggaagtttcagttgggcatgagcctggagagatgtgactgtctacagttctatttgtatatataaaaagaagactgaaagtcttttg

SEQ ID NO: 2912 - DNA, 2279 bp, Homo sapiens
ctgtactcctgctctgggaagacagcgcctcccgccaggggattccgccaaccaccgctccctgcaatcggggttaccagtgatgattcttcccccagcatcaccctacggtgtcttggcagcctgcctccttcacagactgcctcgagagtccctcagagctatttccttaaagaccaaatgcgagcatatcttcactgacggggtttcagagcctcactttgcaagttttgaggcagaggctcaaactaattttgctgagaaggacaggagagctgagagaaaatcaaacagaacggcggctctcctcccattcatggcatgtaatgctctgggcccagctacatctgccatggcctccagggacctgctggaggggtctcccagccccacctggtataagccaagcctgctccagactcaggatctgcccagagggctgggatctcacagcctgaggtggttgataaggaaaagggaagatgaagcctccatgttgaacatgcctggccccaggtagccttttccgattggcacggctgccgccattcacccgttcaagcttccagcttgcctgtcaatgtctgcagctcgattttacaggctgctctttgttagaaaagaaatgatgtgggggctgctttttgttaaaagggatgccttaccgaggactctcttaccctcaccaactgcctaagtaatttctttttagctcccgtattactgcatcaaactatagccagatccacggtgactacagcgcagccacggcaggggtggcctctggctgagcgggacttgtttgcagcagcagcatctggtggcaatcgcagaaataagaaggcagtcgaggccgggcacagtggctcattgctcattgcttgaacccagcaggcagaggttgaagtgagccaagatcgcgccaccgcactccagcctgggcaacagagtgagactccgtctcaaaaaaaaaaaaaaaaaaaaaagaatttcggcatttgagaaaaggcttaagaatctggcattgaacaggctatccagcccaaaagggacctcacctgctttgttgattgttgaatggcccaactacatctggttgcagtggcaaacggctgacctccacgagcagctgaaagtgcctcctgcaagtgaccgactcatccaggccttggaccgagaaaacagctcctcaactgcatcagctggaccatggtacagaccagagacagggcaagaaaagaagcagaggctattggcccgtgcagagaagaaagctgccggcaaagggggcatctccatgaagaccccaactgtcccacgagcagggttaaccccgacagcaccttggtggagaacaagaagcctcagctggtggtgactgcacgtgactctcgtcgagcttgctgtctctctgtctgcgctgtgtcctacagtggggttcccttactgcgttatccaggggaaggcaggacggagatgcctggtctgcaggaagaccccagaaaagactgtcaccttcacacaggctcactgggaagacaaagcagctctggctaaggtggcggaagctatcaggaccgattacaatggcaggtgtgacgagatccacagtcactggggaggcaatggaacctcctttgcaaaaattataactgaggaaattatgacagtgaaagaaatcagacctaaccgactccatcttgcgtctaacctttaagctgtccttgtccattcctcggcgtgggctgaacaaacttcggggaggaattcagctcgtggtttgactctgaaacaaaattgataatagcccttaaccgaaaagactcttcttgcctggggaccagtctgcctttgcaagactaacagattagctacgagatcagaaattgtagtttaggggtcatgcagactctgactctaagagtcggaacttccccacattgctcctgggaataacatcactattgtaaaacctaagatcagtacttgagatacttttcagaccctgcactcgatagatcagctgacaccacccagactcataatctgacctaaccagttctgccactgcacccaggaacagaagacagcaagaaaatctcactttgatctcctatgattccgtctccaacctgaccagtcagcgctcctcacttcccaagcccctatccgccaaattatctttaaaaactctgatctctgaatgctgggagactgatttgagaaatagtaaaactctgggccgtgtcacgtgcgtccgagtgaagagcccaccgaac

SEQ ID NO: 2913 - DNA, 7770 bp, Homo sapiens
ggcaggagttggtcctgtgagggaaacaggttgtacctaagcttctgccattttctgtctcatgtctgtccctccatatgccccctccctcagtcctgcccccaccctacctcacatccctcagcaagctctccactcagaccctagctccagttctggggaggggaggctggtgcagagtataggggatagcgcaagtgctcttcaggagccacagacagagatctgcttaccctgagcacatggcagctggggcgttcttcttgctcgcctatttgtgaaggtctacccagaggaaatgggctatggcaccacaaaatggtccaactggaagtcaaacatgagacactagaaagtatcctacaggctgcagtgcttgggacttgagacccctgccaggaatccccaaggagaaaagaggagttcatggacttgtggccttgagcctcttgtgctgtcacttatacccatttccatagaattacagagtgtcggtgctggacactagacagtgtaacatcgtcttgtccaactaccactcatcatgtagaagggatgtgaaaaggaaggatgcttcccagggaatgtgggaacagaaggaagccacgtctccctgtgccatcctagactaccgctgtgtgtgtgtgtgtgtgtgtgtgtgtgtgtgctcacacacacacgtgagcagctcctgccttgacctgagcctagagtgttcctccttggaaggggaccctatttcacaatccatctggtcctggagaccagtggggctaagttttgtttagggatggggggagaaagcaagtgaaggagagacagagaaagagatgaaaagacagggacaaagacctcttgacagagagaaattataaaatagggcaagaaagagagagaagagcagacacagggttggagaaaatgaagaaggaggagccagaaagagaggaatgaagggtgaccagcagaccaggcagagctcacagcccaccctggcatggtttctctttgcagagggttgctctccccatcaccaccctcctagtcattctctggagcccctggtcataagtgggtattagcttagcccagtgcttgtgttcaactgtcatccaagctgagcctcccttactgcacccacaactacctggttaagtaaagccttaaggaggggtggcagggaggaggtccatgtgagccagtgccctgggtaactcccaccgtcttccttgctttcttcctatgcctgagaccagagcctaagcaagccagtgtgtgctttggccccagaatccctgttgggggcagcaaaggagatacaaagtgatggaggaagcacggtggtagccctgtggcttcagtgaccctgtgtgagacagaaatcagggttggactggaagaatggggaacaggtatttcctgcggtcctgctgaacagtggctcaaccagtccacccaaaatgtcagaagcagagaaactgtaaacatgaacagcggtgccatagcaagagctggcctgtggaggctggcactgtgagcccaggcacagcaccccaatgtacaaagagcccccacttatgagccatgtgagggcaggcaaggtactttaacttccctggcctcagtttcctcattgtgaaatggagctaataataataacctaacagggttgtagttatttaataaaatatcccagcactgtttctgttccctagtcaatgtacaattcacagtcttttcccccattccctatgagaaggcacgggagcttctagactctgggcagagccccagacacagcagtcaggatgctcagatggagaagaaaagcccttaaagctctctgtagcagctagcgctacctgtgtttggaaggcagccagagccccacagacatgcatgggaacacccaggattgtaatggaagaggtacaatgccaatcatttaaatttaggtgttcttggtgtcctaatttgatggaagggtaaactgaggcagacagtggggaaacgatagataatgcagagtgaacaagtcttactttggaaaaaacagtttccctggtgggagaggaagggagattgtgctgtgactatcacccaactcaaatgtggaacccaagatgggcaagaagctcaggtggggctaatgctgtacaaaacacctggttagctccgataagcagctgtcccaagccaggactctgccccggctgcactcatccagcccggaggggccatcagtcactcctttcttcttgctcactctgtcttcatccccagctgtcaattcatgtgtctcaaaatgacacgagttaaacatcttaaagaactagggatttatcatatggcgatgtcaactcagaaagcagaaccagggatttgtatctcagtagtggatgattacagttttcttggtgctatgaaagccctatatcctcatgtgtcatgatctgattaataggcagtgttggggttgaattacatccccccaaaagagatgttgaggttctaacctgtgaatgtgatctttttggaaacagggtctttgaagatataattaaggtaagatgtggtcattagagtgggcttccaccccatatagctattatctttataagaagagaagacagagagagagaaggaagatggtcatgtgaagatggaggtagaagttagaattatgcagccacgagccaaggaattcctggggctaccaggagctggaggagacaaggaaatattctcccctgaaggtggcagaggaagcatggtcctgccaacaccttaattggcaaccccaggaaatgaatacagtaggaaaaaaaatatttaagtgggaggaaggaggctgggaggaaggagggaattctgtttaagggaaccctggaatctcttttcttctacccccatgtctttttctattttctatcctctacctcctttcaactcttcagccaatggatctttaattcttaatcaataagcatcggtgtcctgcctccatgtgcctggctttgtgaaggaggcagaagcggcacagcgacgtgagttgaactccttgcctgttgacctctagcctcccgaaggcagttcttgggagtgggaaagggtgccagctccagggtcagagcacctgggcccaaatctcgctgtctgggtgacctcaggcatgtgattacatagcatgagcttgcttcctcctctgcaaaatggggaaaataacacacctattttgtgaggttctcttgagaattaaatgagataatacatgttaaatgattagtacaagcaatcaatcagcattaattattgttatgactgttattattagcgtagggaaaagaacatgaacagcattcagctgactacaggataaagtgtgataaatgctggcacaaaggtgcagatgaagcatttagagaagaaagagagatgaattatttctacccagaaatcagggaaggctttgtagaatcacagcatttgaatagagcctgaaaggacgggtagatgttacccagtggagaaagggggatagtatgtgtgtaggtggagagggggcttgggggagggataagggagtttctcctggaggaaactgcattcactgaggcaaggagggctgagaggttcagcagagagagtagatctatgtgtgtgaagcatcctgtgtgcggtgcatggtgagaagtgagacctaggacaggctgggtctagatggttgttgctttggtgtcaggaggagtctggtttttattatgaagacagtgacccctaagggagttagagcaatacgatggaggaagctagggtgggggcggggaggccagcaagttctcagtggtccactccagtgacaaaggaagtctgaaccaggctggagtggtgaaaaggaaggggcagattaaaaagtcatggaagtaatactgaggggatttgataactggttgggagtgagaggagagggagagaaacatctaagatggtttcttggtttcttgccagaactatctggaaggaaagtaatgggagattctagactccacaaaggctgaggcctcatcctttccccttaccccatcccagcaccccacagggcctgcatggggtgggtgctcaatacataaatatttgttgaatgaatttgatgccagcagtggggagggggaccaagggaaggataacaggcttggaggggtgttcacagtatggtcaacgttaagatacccacaggaccatcatgtcaggctggcctgtgggctgccagacatgcagccttggagagaggtgctggagggagatataaactttggagccaatagcaaccaagtgaaaacaaaagccacacgtgggtttaaagtccagagatggctcagatctctcagcgggctccatgagatttgtcataataattagagacaatctcagatgctgggtgtaaagggagcacggtgacagatgaatgtaaactaattatcctcacagcaaccttgagaaacaggaatgtgcatgcatgtttccttgctaagatacggagaggaaaaaggaccaggagagttgcatgatgtcccagaaggctgccagagccctggcacagctgcaggaacacccaggaactccttcctccactatccacccttggaaatgtcagcatgggtactttcctcatcaaggaatgattttaagaatttgttttcaaaataaaaaggggttttagagttgggaagccctgctggttgtaatcagatgtgttttatgggaccattcaccagcacttgaagaacagggatgacctataaatgtattcatggattcagacccagggcaggtttcatgggctgattacaaatgccttggggatggcatcagcattcaggagacacagtcacccctgaacaccagccacagtgccatacacaccttcaccacctgcactcccacctcctcctcatccctgctgctgtgatgccaactcctcagtctcagcagctcctggaagctctaggacacctttcaagaaaaccacaagtccttatccagatcagggcagcccaggacattatctttgtcccctcaacccacataagcccagcctattcagcctaatccgcatgacttcctcaatcagcctggcatcccactctaccaggtccccctcccacctcctccaccataataagttttatgcagagggtatagcacttgaagctaggctgacctggcctccagtcctgaccacttagaccctgatcttgcatgagtcagtctcagagactcaactttcccatccatgaaagatctctctccttgtctgtaccctcctgggcctagcaccatgcttggtgcacatttggtggtggtccacagatgccacgtggatgcataaatgcacggcttcctgagaggatgacacagatgcacgtggatttttatcacttgctgaatggaagtgagacttaacagggacctcttaggagcctatgggctcccccaagcataaaaacaaaaaaacaaaaaaacttcttcctttccttcaagggaaatttcaggcacctagctttccctgagaagtaaatgtgataaggaagaaggtaatactagcttaagaccatagccaaggaagttagaatcatgggatgcttggttccctggtagaaactagagataacatcttaacacaggtcactgagttgtttttcagaaacctggatccccaccaaatggatctgctggcacctagacttcagccatctaggagttggggttttaagtgtgaccgcccaattcgccttacttgctgccctgcaaataaatgccttcctttcatctgctgcaaaccttggtgtggacgttttggccttactctgccaggtaagcagacaccagttaggtttgagaacagatgcgcttagtaaaataaattgcttccagatgctggtgataccatctcggcctcctcttggtatcctggttggctctctatttgaaagcctcgcccaggcatggtggctcaggcctgtgatcccagcactttgggaggccaaggcaggcagatcacctgaggtcaggagttcgagaccaggctggccaacatggcaaaaccccatctctactaaaaatacaaaaattagctgggtgtggtggtgggcacctgtaatcccagctactcaggaggctgaggctgggagaatcacttgaacccaggaggtggaggttgcagtaagctgagatcataccattgcactccagcctgggcaacagagtgagactccatctcaaaaacaaacaaacaaaaaaacccaaaaacaaaacaacaaaaagcctctgtccatcttctgttgcacaaatccctcctcactctctgagtcctggtggagctccatgttcctcatgcagccctcctggctgcccccagctggcacaactccatcgtctggctgctatccgccttttggtcagtacacttagtttgcactagactggcatcacccaactgagttctaaggccgacaaggtgctgtttcatattttctctgtttttgttcattacatagaccccaaatacaggcaggctgagcagtcagttgcaaaatcagtcaccagaaaggattctgagattaatcaccctgtaacataatcttaaaatactgattttggacttgggacaccgcctaggcactggtatgttcatgggttcgtacatacatgtacacatgtgtgcacacccactttggggatgggatagtatttgcttttctttgaagtttcactgagctgcctcccagtacagaggggcccaggtctgggcctggagatggtacacatggtgtaagaaaggtttctctatcccctggggctggttgactgtgatgtggctgctgctttccctactgatatgaggtgcatgaggaggagtggaaagggacaaagctgtgcagcttgagcccaggaagggacactgctgtcaggcctctgagcccaagctaagccatcgtatcccctgtgacctgcacgtatacgtccagacggcccaaagcaagtaaagagtcacaaaagaagtgaaaatggccggttcctgccttaactgatgacattccaccattgtgatttgttcctgccccacattaactgagtaattaaccttgtgaaattccttctcctggctcagaagctcccccactgagcaccttgtgacccccacccctgcccgcaagggaacaaccccctttgactgtaattttccgctgcccacccaaatcccataaaacggccccatccatctctccctttgctgattctctttttgcactcagcctgcctgcacccaggtgattaaaaagctttattgctcacacaaagtctgtttggtggtctcttcacatggacacgcatgaaatttgatgccatgactcgggtgaacgggaaatagttttttctctggcccaatctcacgctgacaaccactggctccacgagccagaccttcaggaaggcattagagcagttccccgagaggatccccagtggaactatcaggcagattccccaggtacagctaggtgagattacatgatttcctgcctagttgaagggcttaaaaggcagcttacaaagctgttaattatgacaagcttaaagaaactactcaaggtaaagaagaaaacccagcccagttcatggcttatttggcaacaaccctgagacgctttacagacacagaccctgaagggtcaaaaggctgtctcattctaaacatgcgttttatca

SEQ ID NO: 2914 - DNA, 77068 bp, Homo sapiens
gtgccagcgcccatgcaaatctgctgtgcatccagagagcaaagtgggatgatctgtcactacacctgcagcaccacgctcggaggacagctcctgcctgcagcttccagacccaggaagcctgaggggaaggaaggaagtacgggcgaaatcatcagattggcttcccagatttgggaatctgaagcgggcccacatcttccggccaacttccattgaacttcccagcactcgaaagggaccgaaatggagagcaaagcaccacaggcctctttgtggttgcccctttctaatgctcctcaagacaacctgctaatataagcaaagagtaaatgagtgaggagagcaccttctcatgtcaggaagcctatggagttagatcacctggatttgctcatttcctggacaaaaactgcccttttaatcctcaatttcctattaaggactggttcaacattatcatttcccagggagagtcttcaacttgaagtgatcactcaatcactaaaagcctccaacttgaagtgattgcaaaaccactacagctgcacctttcttatgcatttcttttattgccttttggattggactttatgccttatttttttctccatttccaagtgtgtcttgcctagaatgtagcacacagtaggagctcataaaatatccactgaaattgagttgaacaggagagataaggcaaggaaactcagtggatcaaggccagctcttgccaagagttccaaacttcatctttgtacctgagctgcatatttctatggccttgatgaattccttggcagcagaatgttcaacaactgaaacatttatgaaaatttaagcaaatgggtcaataaagggaacaaaacgaagcccacacagtctactcttgtgctcttttgcttttaaagaagcttgtttgtgttatcacttcaacggtttgataaacaactgtgccttctcacggatctgtcccctgtgtttgaagtggtaaaatgtgatgattagtcatgggtaaaagctgtatgcatctttccaagctgcacggcaatacgtgtgcaggaatttgagtttattacacaatgtcatcatctgtcatggagcctctggaaaacacattatcataagaaaatgataatgaaaaagataaaccatggtcctgattttgctggattttcaggattaatgcactaaaaatcttactgaacgccagatgaggtttctggataatttgtttttcttctttgcgcttttctgtgttttctagttcttctctactggattcatttggttgacacaaaatgaaatattaaggtatattacaacgaggaccacattgcttaacttcataattccaaccacttcctcttccacgtatcttgagaaaggtaggagcatttttactcttcacatccatacactcacaatcagctttatcacttactagtggtaggattggagaagcttatgtgtactatgtccttcaggggcttcttatctaacatggggatactattacctgcctgtctgtctaatgggattatataatgcatgtgaaaatgctagactaattgcaaacacagaacaaacggatgttgtcaccattattgtcagatctctatgtatgtgcaaaagtgaaatccttggagacaagctgggagattttttttttttctttagcatctcttctgccaaaaatatatattgattgcagctggaaggaaaccgttctgagagagaaaataatgttgaatagaaatcagagcctgtttgatatttgacagcttggacatgtttcttcatgtttaatgataataataatttgacttttaagtgacttctctgacatgagagccccctaaatcaggaaagctataaactgatgcaaagctacccccagagagatgacatggaagggtaaatgggattgaccagtgtgtttggctgagggtactcatctgcctaagattttatgggcttcacaggaggcctgttctgtggcatgtgaatgacctgagaacaagtcacccaccagccttggaccccatttattgagattctactatgtgctaccctctggagtaggtgctttgacaaagttattacatttgaccttcagaacaattctgcgaagagagtactattgtaccattaatgtctgtaggaaaattgatactcaaatattccctagactacaattatcatcagatcttctaattctaaatctggtactcttttcattttatagacaactgcctgacaaccacataaaactgtattagtaactacgcatttacaaagcacttctacacaaattaccttacttgattgttactttttctgtctgcaagttttccaagtcatgctagtgtgttatttctgtctcagttctggtggcctacctaaaaagaacattgcatgatcatgaaccagaattctggtattgtctccttcaccagttagctttgttacttaaagccctaaaagagaagggaattgcctctactgtagctatttggtagaagaatccagaggagaacccaggcttcttgagaaccaggtctcccaacgatctttggagataaacagtactaaacatacaagtatttgtgcatttgttgcgatcattatttaattatttaaaaagtataattatgatctattccttctggtaatcaataagactctgactcaaaatgaaataagggaaaatgttggtagaaaaagacttagcataaaggctgggtccttattgatagtgaaaatgatacttagaggagaagaagctgtttaaagcttgcattagttgtagaaaccccagcttgaggcactgaatctgtaaaaactggagacagagtttgggctgtatttaaaagagtctatcaagggctcctctttgtagaggatccaagtcagacctcctagcctatggaaatcagcttgtcagagcaaatgaatgtattggagactgaccctgacctaggtagctttcaagtcatccctgagaaagagcattttagaggttgaattgatgagatggctaatatggttattgaagttattggaggctatttatttggattttgcaatgattcagatttatgaaaatgaatctgtaatgaaaatgaatggtggaaataagctaatacaggaagtgttcagctaccaaagcaaacctgccttttcaataagacaaggatattacctctggaggatgaataacatatcatttgagatattttattaaaagttaactgtgactctcttttgaaggcagtcgctattactccagggagaatgaccttgaggctacttccttctttctcttacctttccttttcttttctttcaccatttcttttggacatacgctggtgaatgaagactgtggaatatggagtgaggaataaggaagcccactcaggctgagtcagatgcagtaggagatcagtgaaagggatttttcattagggagtgggatgtgttgatgtgataaagcttcttgaagtagaattttatggcaagcgtgatattgtaacttgcccatatttatgcagcttttaagtagtaaagctacgatttgaactgggtctgtttgtcttgaatgcagaggccccagggaatttaccaggtctggctctcattggttttggatagcagaaggttgaaccttaacatgtcagtcattttatttgctagattgattacattttgtctggaacatggtaatctcagactctagtcagtcttcagcttaggaaatattttcttgattattatttctattccactacttaagatttgttcttaaggataaaaattacttgtaaagataaatctccagtatttactatttttattatcttccctttcatatctttcaccttttctgattcttgggagaatttcctctttacatcaatgatttaatttttactgagaccgagtctcactctgtcacccaggctggagtgcagtggtgagatctcagctcactgcaacctctgccacccagttcaagcaattctcctgcctcagtctcccaagtagctgggattatttttaatcccatgccaccatgcccagctaagttttgtatttttagtagagatggggtttcaccctgttggtcaggctggtctcaaactcctgacctcaagtgatccgcccgccttggcctcccaaagtgctggaattgcaggcgtgagccacagcgcccagcctatttaatttttttatagtgccagttttgttcttttccaattccagggtaggattaatttggctattttgttaccttgcttttctcagccaggtcccttaataattttagactatattgccataaattgtctttttatctcatcacttatcatcatccctaaccttaacaagcgtaccatttcatgtatttacttgagaacccagaacagacgttcccagtttttttcttaatattaaattattattttttttttaaagaactagggttttcttctgcactttcagaacaacttttccttatttcaattttatagcatgtgtccagcctgtgctttttttttgccccacccccacccccaaatgtttacttttccttgagcatgaatccaaccctggaatttccaaaagtgaggcttctctgttttcccttattccccaataatttccatgagagtgtaatagatttgtacaaagctcttcactaatttttaggaggtctattagtatggttctgcctaaataaggaagtatctcctgcttccaatgtagaagatacttctttggctctgaagaagataatttttcatcccttgtaagttgaaaattttctagttcttacttttccaaaaacagagtatacaatggtcagagctcttcctatcttcactagtgcccactcaacaactttacattacgtcctacttggaatttctttctttttttttttttttatactttaagttctagggtacatgtgcacaacgtgcaggtttgttacatatgtatacatgtgccgtgttggtgtgctgcacccattaactcatcatttaacatgaggtatatctcctaatgctatccctcccccctccccccaccccacaacaggccctggtgtgtgatgttccccttcttgtgtccgtgtgttctcattgttcaattcccacctatgagtgagaacatgaggtgtttggttttttgtccttgcgatagtttgctgagaatgatggtttccagcttcatccatgtccctacaaaggacatgaactcatccttttttatggctgcatagtattccatggtgtatatgtgccacattttcttaatccagtctatcattgttggacatttgggttggttccaagtctttgctattgtgaatagtgccacaataaacatacgtgtgtgtgtgtctttatagcagcatgatttataatcctttgggtatatacccagtaatggatatatacccaaaggattataaatcatgaaggatatgaacagatatttctcaagaggagacatttatgcagccaaaagacacatgaaaaaatgctcgtcatcactggccatcagagaaatgcaaatcaaaaccacaatgagataccatctcacaccagttagaatggcatcattaaaaagtcaggaaacaacaggtactggagaggatgtggagaaataggaacacttttacactgttggtgggactgtaaactagttcaaccattgtggaagtcagtgtggcgattcctcaacgatctagaactagaaataccatttgaccctacttggaatttctgtaccactgggaattacagtcttcaactttttctataagggtaatccactaatgctgctttagggaaaaagcaaatgtcatgggagagagaaaatcatcctagatggcttagttaaccatttccttattgtattttcttattgtaatatatgtgggaagggggatgtaagatttctgatttctgcaggttggagagggagctacacagtgggagcgactgatggtttctgctacttttctagccctgtatatacacatcagctggggatgaggccacatgctcatcttatacagatgagtactgatttctcctgggtgctgaaaaactgttgttagatattatcagtttagttttcattgctatagttctgtcaggtcatattttttgtttttgtgtattttaatgggatgtagggagaagaaatgccataagatgtatcaacactttatttttatgatgtcacactaatgtattgctacaaacttaccctcagtagttataattttctgggatcattttagaatagatgatgtccattgttgagctcatgttttcctatccgtggaaatctagcatcagcagctgaaaccatcagttttgggatgactttcaagcctgatttgtcctgtcccatgatccactcaaggcacatagggaagcagcttggcgtcctggccggaccactaaccctggaaggcaggggccatgtatgacttacctttgaatcctgtgtactttgcaaagggcctggcacctgggtttctagaatatatcaaattatggttttttgtttgtttgtttgttttttagaacaaatggaaagcctataaaatttccagagaaaaactcagtcaccttttcaggcactctgtcttcagcttctaatgggataactattttgatatgtagcaaatgaggttttttaaaaatcttaagtgcagtggtaatttcatactaattattgcactggacaaataaattattttcattgaaaacctaagttatgcaaaactatgatttaaaagaaaagcagaatttttatttattctcaagctaacctattatttcaaaataagccaagtgccctgctttctagggtaaagctaatgcaccctaaaactttgtttactggttagcacgctccaaactctgcgttgctctgctctccatgaggatcttcgtgcagaggctgcagcttgctcagcttcagaaagtcatggcagaagtaataaaactgctggtagcagcatttaggtacccaagggaacgttctcacaagccagcagctgatcttgagttgaaagaggcaagtgatgagctacagaagcaatgcagcagtctgatatgccaagttctgggtacctgaccactggcaggttcagtatcagctttcagcctgctaaggcatgggtccggtttaccacctattttgtttgtataaaactatatagaaaatctatttcaatgtaattttttaaacagtggactgattgattatgtagcacatttaccatggtttttctgtgatttttcaagaatcactgatgtgtcctattgtatttttgtcctagttaaacttcacagcgtctctgtcagtgtactgttttttatctgcaattgcaaagtgctgataaaggtcctttctgttttccaaaagagcaatgatagagtgaaaaaaaaaacccaaatagtctcgtggtactcattgcagaaatatagtttagcccagagtaaaaaagcctttaaaacttcatattatcttgccacacttattacttctgaaaattttattagtgttttgatcttttggcaatttaaaaatgggagctgcatgtttgaaaactaaaattattgtttggaaatgtctaggaaatatggttttattgataaatttgggtttaagtgttagtggacatgcatagcttggtagatacataagatcccattatactatagccaaatgtaggattttaaaaattatgattaaaatgtctactacctgtattttaagaccacatgagtccgaatctcatagatttaacaaattcaggtagttggaactcagttgtaaaccaagaaataaagccaaaaggaatttggtgcagataaaattgatacccagaagcttgtatagtctcagctcttcttccttctcacctccctcccctctccccctacactatgggaggttcttttaggagcttgttttacagttctaatagttctctgttttttttttttaatagttctctctagttaaaaagaggcagttccaactctgccagaaaggcagacaaagaaaaatgataaaaatcagacagaaaaactctaaaagcattgggactatctagtgaagtgacaggaagccctgaatatttcatttgctctaatacagaacaatgtggatattcatcataaccgccctgacatgttaagggaagattaaattatgttcaatacgttatatcaaataaagttcagaaatgtacagtacatttcaggaagcattctgtgcaagaaagttattgtctttatgaatgtaaaggaaaaaaaaaacctcaactcagcagagaacatagatatccagaatagcaaccattgtatgattacatattaaccttcccattgttgatatgtactggggacctctgttgtttataagtgctgtgaccttggccgtgagactttatactaatacctatccctcagtaatgttctgtagattcaccaagatttatctttgtaaagtttttcacattgtacttgccaattagtatatatttaataattgtggctattatgcatttcaagcttcctgtgaacaaaaaatacattggaagccaggtcgcgtcaaggattacagaccacacattacattttcatgagcctacactgctaggtgttttcttgttgggtactctgaaaaatattacatgaactaaaagactgtcaacattggagagagtatgccataatcttgaagtagctggcattgttactggatatgtatggcttaagtctttggtttggaggtgggaggctgtcctgtgcattgcaggatggttggttaacagcatccctggcctctacccactggatgccagtagcacccctcctcccaccccagttataacaatcagagatataggcattgctcaatgtccctgggggccagatcaccccggctgagaaccactgcactagagaaacaaatgtgtaaatatggagcatgaagttttaaatagtggtcacaagtgaatgctgagtgtgtttaaattctcattccttttgtgctatgaggctttgactacatgtatctgctttactataattctctctctgtgtgtgtgtgtgtgtgtgtgtgtgtgtgtgtgtgtgtgtcttttcaccttataatttaggtgttgtttagtgacagttaaaggatactaagaaaggattgggatgaaacagtgtgttttatccagtattttgagagtaaggcttcccaggtgagcttccgtcactgattttttggatggctgtacattaattaacatacatttattgagtgcatacccttctaaaaagtcctgtgctaggtactgcaaggaaaagaattttttttttttttttttttttgcctgaacctcctggatgagggaatttcttttctggcatgtaacgtttcttttctcggcccatgtgtctggagtgctagttattcttcccctccagtcccaaacagcttcttttcctatggcttcactgacctttcgctctaaaatcctcatgcttgtgttcacctcttcccattcccccatctctattgcatcattatgcgggtttgcaaacatcatcatcttctttctggcatgactcagactcctgataacgttcatttctggttgccttatttagggaaaatcatcttcttcttctaggccatattagcatgggacactcgtccatctattactcagtagctctttaatttcaaaatatagtcctaatcaaaattttctagctctttattttacttatattttgggggactcatcagttatgattaaatgggtcaactagtaacagaaatctaagtaatacttgtaaactaaatagaattaattttcccttgatgtagaagtcaagaggctggtatggtgatgttgtgatttcatcagcctctcagtttttctcaatccttctattctgcgttcctattctgtagcttccatcctcaaggtcaagtcatggtctaaagatgtctgtctgtctattgcagctccaaccatcacatctgagttttagaaatagagatgtagaaaaaaagaaaggcctgtcaatggaatgctttctgcttctctgaagtccctcttaaaattgtttaaattttaacacctatctacaagggtggctaggatatgtagctgggcacattgttgctatcaacaatacagagattgtgttaataaggaggaagtgagaatagatattggccaggcagcagatgtctctgcacacagagaattttgagtggaatttatgtcatcgatgttttatacaccatatacaaaataggactttaagaagatgtttcataatctatacagcaaaatttactatattaatattgagttattactcctaaaatttgttccttgtgctcaaatacagaattggaaggattctttatcattgctccaaggaatgagggggaaaactgtcacattcctctgaaaagtaaaaaatgtggtccatcaatctagttgactattttttttttcacactgatctgtcagaagtggctgattagctgtgggtttctatacatagctagcatttatcagagaaatatcatgaggacactctttctgttgaatatacgaaaaccataaccagtttctacatgtaagggaaggagtggtacacaggtctgtcaaactgtgatgcagggtggtgtggggaaaggaacggactacgttcaagaagcctctcttctgcttcacgttgaacatttctgactctgtcacttttcctcaatcactgtaagcctctgcttttcatctataaaatgggactaatccttaactcggctatcatttgttgtgtcccttcttaaagatacattgaatgcccatctgtggcaagataccagagtaggacagagctattgttatgcttaaataaaatatcttgtagaaaatcatatgtaaattcaaagtgctattgggttgctgatatggagattatttattttttttatcatttagatccagatcagattttagccattcttggcaacagataaactctatttctcaaaaatttctagtagcaatcaattatctcaaaaaaattctgctgtcctgtgtgacactgcaactatgtattacccattaatgctaattaggaaggacctgggaagcacagccagataacctatagtttattcccagccctcctacttggcctccaaacttccacaaaacactagcttcctttgtgcctacttccaagcctaaaattcttaagtaactttattatttatttgtttatacagtggcaaaatcctgaaatccttcacatacttgttaggcaacattaaatatttgtgaagtctgagtggcacactcaccttaagaagcttcaaatgaggccaggtgctgtggctcatgcctgtaatcccagcattttgggaggccaaggcaggtagatcaactgaggtcaggagttctagaccagccagaccaacatggtgaaaccccgtctctactgaaaaataaacccatacacaaaaattagccatgcatggtggcttgcacctgtaatcccagctactcaggaggctgaggcaggagaatcacttgaactggggaggcggaggttgcagtgagctgagatagcgccactgcactccagcctgggcgatagagcatgattccgtctcaaaaaaaaaaaagcctcaaatgaggaatatatattgaaagagttttatttatttattttggtttaatgaaaatttgatctgttgtatttttaattagaaattatttgcttcaaggtttttatacaggacatacaggaactaatttggatatttttaatattatagatctgtactgcgttctcagaaggctacaaaactctgtaagagaaaaataattatttggcctgcattgtttaaaaggagatcatatctagttgaggaaaactggtggcgttggagcatggctttgacagattttgatgggcacagaaagcgaggctggctgagcattccaggaagaaaccaaaatgtagggaccagagaaactcctggggatgatttgggaaaagtgagattttttgattattctaaagaaatggactgaatgcctcaaaaacaagagctatgacttatttctcgtcaccactcctagcctagttacagtgatgacataaagagagcttggtgatcatttatcaaactgaattacaaccagttttaagccaaacccaaagactgcagagaaatggatatgcccaccgtctcttctgtaactgtcatgcttaaatatgacataggtgttccctaaagagcatttcacaatttctattagtgcaccattcgaaatatgatgttacagaaggctaacagtaagttctgtgtcacaacagaagtttattccaaggagagtagggccacagatggcatctactcaaattaacaatgggtgcttaagtctccctttcagtagccctaaaaagtgatgactcaccacctcagcataaattcctagtttattcccaaacagtccatcttgcaagcttctcttacatgagcatacaaagttagcctgtagatttcaggagtgtgttggtaattctgggttagaactgacgttttttggtataaggatattcaaatgggcggaagtccttcaaagcagtgattctcaaatttgagtgaacatcacagtctcctggagtacttgctaaaacacagacttctgggccctaccctcagagtttatgatttggtaaatttgtgacactagcctgagaatttgtatttctcacaagttaccagataataccaaggctgttgatttgggcaccacactttgagaaccgttcttaaggatattccgaagccaagagcaagtaaacatcctctgtggcaaagcttggagaatgaaaaacatagagaggatattttactttgctgcctcagggctggtctggctttctctgaacaaaacgatgcccactcagtctttctcctgccatacaggccaaaagaactaccttcctgggtgagctttgcactctcatccatccgggctgtcattcctgctcttctttccatgttggcacgccttcccttgctatgctccctattgaaatactcctccctcttcaaggcctagctaaatgccagaggctgtctctgattctcatgaacatgatgaattgttcaatgggttcccatagttccttgcttatatctttatgtcccacttgtaacatgtgcccatggcatacaattcgttttatccactttaatctctcctggaagtgtaagatctagaagtccagaagggcagggatcgtgtgaggtttgatattccctggcatctagcagagtgtctggcatagagtaggtgcctggcaaatagtttttgaataaataaatgagccttccaatctcttctcttctcacttagccacatcctctgcatgaataatatgactggagggaggggttgcattgataacagaatgaagctgaattgaatctagagactgacaattgaagcttagctctacatttattagttgctggacctcacgcagtacactgaacctctctgtcccatcctctgtctaaatcaaagggtcctaactctcagcggtgtttcaaagattaaacaaggcattacacatgagtgttttggaaaactgtaaatcctatataaatatgaatatgttagttgcttaatatttccatgtataacaaaagtatgtacatcttctacaatgacccaaagtgacagtggtttcaatatattttctataatgaactagaataaatgctttatttgtccacccattttaaatgtgttgcatataagaaaagcatcttatttttgtttttaatttgttttattttttattttttgtcttcaaaggcgaggggaaaaatgagattgttgaattgagaagcaggcctcttatttgccatataccagtaaatatcacttaacctccctcgtcatttattataatttgaaacaatccatagcttgacagggtgtgagacctggaagactctagggtatatcatctaggcccctaattttacagaagaggagctgcagttcagaaagaagtcccctgtccaggttcatatgactggtttgtacccaattcaccccacctgaatatcccactctgaaggcttcaacaaatgtcggttagtctgagaaggtcaatgttctgtttgctcatcagtcctgggactaaggtttctatcaacccattgacccaagtaattagaatgttttgtgtgttttggaaattcacctgaatttacacatttaacttcctagtaggtgtctgtgcctacgaatacaaaggacatagatgtacagatttcatctggaaactattttttggtgtccagataatcaatatcttcttagcaacttgagacattaggacagaaatatatttaacttaaaatcttgatcactgtttagaattaaatgttggtcaatgaaacccattatttactttttatattcatgttattcatatttttcaagtaaaaaattcaagctatcttgtcggatgataggacagaatatgtaaagtcataattttcctattggacatacattaatatgtggcattattttattatatattttaaaaaatattactcttgaagagatgctgtttcattccttaggtcaagaatacttcagatttattcagaaacttttatggaacatctttgtgtgccaggaactgtgctaattgctaataatatgaatttgaaaggtacacaggtcttgtttggaagaaacttatagacagactaaaaatgtatttaaggacaaagtatgacagtgaggtataataaattcaacaatgagataaataataggtatagggttggcacaagtacaagggagtgggttgttgtttgggtggctcagggaagctcatacagatgggaactgtctttcagaatgagtaggagtttatcaaaagtggaaactaggaaaaggatggcagttccagtagtggaaatagcaggtgcaaaggcatggagatgtgaaacagtatggcatattcaagtggttgtaagtcggtagacacctctgaaatgcagaatttgtgtaggttggtagtagaaactgaggttgaaaaaggaggtaaggacaagttcctggaaggcctttgaaggcccattaaaatgtttaaagtattctgcaggcaaaaaggagtttggagtatgtgtaattttagagacatgtgacatgatcagatgtactcttaaagagggtctttggggcttcgcccatgactctctttggttcttcttccttacagtctgcaacagtgaaagactgtttcctacatgaagtctgtgagagagagaacaggtttgcatgttgccaagttatcaaagaaaatacatttccttcaaaaccaacttatcccctgaagctgctagtaagaaaaatatgagcaaaatataccacagaataaacttaagctgcattttaaaaagactattatcttgtatgaaaataattcataagttaaaatgttaaaaggccagggaccacacctgtaataccagcactttgggaggaaggggtgggcagatcacttgaggtcaggggtttgagaccagtctggctaacatggcaaaaccccatctccacaaaaaataaaaaaaaaattagccaggcatgtgacggtgcacgcctataattccgcactcctacttaggaaggtgaggtgggaggatcgctggaaccgggaggcagaggttgcaatgagccaagatggcactgtattccatcctggaagacagggtgagactctattaaaaaataataaataaataaaaataaatagttaaaatgatatttcagtgtaattttagtaacacagaaaactcgatatatttattacaactcaaagttataataataagaataaaactacattgtcaaggcaccctatgaattaagaattaaaacggtcattagttaagcagcagaacgcttaaggagaagtcaatgaataatgagatttactgcactttgggagggcctagctctttccgcccattgaatagacattaccattggggtcactctacttactataagtgcttactatcgtatgcagtggctgaggttttggctgtggcgatcaatcctctactgttggataagggataggtgaaatcacttcacaggtcacagtaatgaatttttcactgtctgggacactatcagttaaatcatatcatggctacttataggcgtattgatttgagagctaagacaactgcaattggatagggtgactcaaaagccttcaacttttgacaccctgcttgtgctgatttttaacatgatagagtgaccccttaagattgcaacttcccttcctccatactcaataacatttactctaccctccaaagagaaggatgacttgaaatcattccaagaatgagttccttgatttatttgagaatccatattggagattaatcagctccaagtttggtgaactccctaactggcttctggccccatacttcaatttcagtttatatttagttgttactcaatggaaagccttacctcacagaaaatttattctgctttctgcaagcattgtttaaaaagtcttttttccttctatttttctgttgctcccttctaatgccatttctcatccttcatattttgcgtaaattttggagcacaaagcataatcatgaataaaataatctctattgaagcaatgattatttgcttaagagatgtttatctagttggagaagaatgaaaaccaacaaaagccagaaaattcatgggtttttaaaacaatttgcttttgttaaaaggggaaatatctactgatgtgagaatttgaaattctaagagactaaaaaaaaaaaaaatctaaatagtctttgttcctgtaagtccatggatagttgagaattgaccatatcgtgggggagacaatcattttgtgtatatagatgtatctcagtgccttacttttctttgtgaaatgaacaaaaaacaatgacaaaaatcaacaaaaccaacaaaatcaattattttttctaggatacattattatctggaccactagtcagttgttatagaccatttctgttatatcttatgccattatttactttctatctgacatttgtgtatatttttatcctacaataataaaaataacaataataatagtaaaaataatgatagaatattgtgtcatgtcagaatgtattggacttgatgtcagaagatttgaattgatataaaactgaatatgccacctcctagaagtgtgagtctacataaagtggccttacttttccaagcctcattttgaccctttgtgaaatggggctattctttctgcactgctcatttcatagagcagatatgaggatcacatttgataatagatgtaagtggggacctatcaaatactaaagtgtttttattcataaatatttttaatctgctattcttgagcagctttcctatttagtttgcttggttatttattcatttattcacatcttattttctaaggagttcgttaatttgatggaatctccatcatatattcgtgtgtgtatatatatagtgtgtgtatatatatatgtgtatatatacatgtatgtatatatgtgtatatatatatgtatatatacacatatatacatatatatgtatatatgtatcttcatttctctaaacatccataataaatgtgttaagctatgttccccaggttgatatgaattccaggtaattattcattctttgattattgactatcaagggaaagttgaaaaattgataagtccactttttttaatacttcctgaatacttgccattataaggattcagcatcctgataagtcactaggtttcttaaactagaaatataataaaattttaaatcttaccttggcagtcttcagaatgttggatgaatttaacccctctctatcttcttaatgaaatgaacttgtaggttagtgctggcagaataaatggagtgcaaaacaccccttctagttcattgatgaatattttatgtgagatagaacccaaaacctcattaaaaccccaatgtgttataactctgcctcatttttgatcaatcttatcattcagcacgaaggaggagacttcctaactgtacttttataaggtagcaagtggcaacgtttcataagacacatggatcttgtcatcttcatgtatttgtgatggattactgaaagcgttttcagtttctttccaagtaaaaaattaatcttatgaaactgaatttccaaagtcattgttaaatacagacataactcatttagccacaactcgttgaagacaatatcggttttcaaaattaattctggtaaaatcctacctaagcaagctctctagatctatctctatgttagtgtgtcatatattgacactaacaggatgcaaggaggtctcccatgacatttaaaaaaaactttattgatgtataatttacataccgtaaagtttacccatttaaaacatacaacgtactggttttcagtatattcgtagagttgtgcatctaccaccattatcaaattccagaacactttcagcactgcaaaagagaacctgtacccattcagcagtcattccccattttcccctctccctagcacctggcagccattaatctactttgtctctaacgatttgcctactatgaacatttcatattattggaatcatacaatatgtggccttttgaatctagctgctttaactgaacgtggtgctttcaagggtcattcttgcagtacatatcagtatttcattcttttgcatacctaaacagtattctcttatatggctatttcacattttgtttattcattccatgagttctttagtttcatcaaagtgttttgtggattcctcttcctactccccagaagagaacatttctggtggacaaattagccatatataatgactcatatatttatattaattgggagaaaggggctcattagtagataccatactgtgctggaaatggtcaaaatctaggtttcttttgtaggctttacttcccctgcctcttttattaaacgttgacttcctgcattccacactctgatgattgattgattgattgattgatattgtgtctcaagttatacattttctctgcataagtagatctctttgaactaacccctttctacctctcatcctgggtacatgtgagatgtcccaaccacactgaccttttcagtatcttgaatacaaaactgtttctcgttttggggtcttcacatatgctgttcccacttggggtgatttttcttagctaaccctttatcaggctttcgtttcagtttaaatgcccatatttcagagaggctctgaccatctcctactccccaactcagtctagattacatggcccctgctattcctttttaatagcactctacgcctttcctttctggaacttaacgtaaatttgttatcgtggatttgcttgtatgctctaaagtgtaaccttcactagaatgttggttccaagaaagctagacttttttttttttttttttttttttttttacctgttttgtcaactgctgtatcctcagcatctaaaacagtttctggcacagaataggcattcagtaaatatttgtagaacaaacatttgactttaattaccacctgtactctgatgactgcctacttggaatctctcccctagacatatctgatgctccattctggtatgggctgtcatcttgacatctctatgtgaatgttccacatgtacaccgaagtcagcagttctgaaactggactcattatctttcttcaccaactttgcttctacctgccctctttagtggaataaaaattcttcttactacctaagccagaaatctgagcatcatcttaaattcttttctttcttcagctattaatatggaactggtcataaggtccagttgattaagtgtcctaaacatttatttaatatgtttttatttccaccatcactatcttaattacttcttttctctctgttgtgctgttatgatatcctcctaacttgcctcaccccacccaagtcttatttaattcatacctcacaccgctgtgagctttctaaatctaatagttgaccatgtcaactgctttgttacgaagcctttggggattatttcttacaggtgagatcccaacttcattacttggcctgcaagccccaagcttctttggcttcagcaggagccatgttccagtcatgccaaactgcttttattccccgaaatatgctactttttaaaaactgtgtgccttttcccataaggtttccttcacccacaaagccctctttctcccatctacttaacaaacttatagtcatttttttaagattctgcccaaatgtcatatatttctcaaagatttggctaactaccctagaagagttaggtttccttccaccatgctcaacgacacctgtacttatctgaataatagcttgaaccctgtgaatttaatcatcatgatagcgatctgtaacactagacatgagcccttgaagggcaaaggctcttctctgctgacgtaggcttcagatgatggcagacttgtgtttaaatcctgattcttacttgcagtcccacagcttgggtgagacctttaactctaactgagaagatgtgtgtaaagagcctattatagtacctgacgtacaataagtatttacttaatgataattcttattcatattatttttaataatagaagtaacaacagtgtcctaggtgtgagacagcaactgacatttggtaacatttgttgaatcaatgattcaacaaaaattaactttgttgttggtgaatcatgatgaaaccatcatgcaataaaataggagtgaacataaacttatgaggtgatccagaaaacaggtgcacaaatatacgacaacaggggttttagcctagagtggctggagagagggctgggtgacttggactttgcttcccctcaacttgctgaaggccagatctgaaaatctgaaagaattcatacaagaatccaggactccaaaggtatgttcagactaagttattgaatgaagttatggtttgttctaaaaatgtatggacatgataacaatagcaaagcagcaaaacatgtatttacattttagcagtggacatcaccaactaaaaaaaattgttagggaagcaatatgatcaaacggggatgtatgggcacaaagagccagaagacccgagtcttaatgctgcgtaagtcgctttatcttttttagaccttcatattttatgtgtaaggctggaagttcagcctagaaggtcctttaggttttttagctttgtaagttctgaagtcacttggtttactcttcaagtggggtgtcagtgatttcagaacaagaaaacttccgataaatcaagacccatttattttgtgagaactcactgaggtgatttaccacagtatatgagttcaactgttttttcatttgtattgtttcaccaaaattcagatgccaagaagtttcccttatttgatagtcttttctgtggtttaaaaaatgtatatactatttataatttatatactgatataaaacagtaaaaaccagaatgatgaatgtataaaaataagtgccactggaaatggacactaataaagttcattaagaattcaaggaagcagagccttgaagagtggacaggatcagaatatgaaaattaaaaggaaaggacattcatattatttaaaagaacaaggaaaaatagtgtaatacaacatggctggtttgggagtagaatgagggacagaaagtataatttgcatgaaggagagagctcatggtggtaagattaaaatggtagattggggccagattgcagatacattcactgtgtatgtaatctttactttcaagattcacattggacaaaatcccctttggtggtagtttcctcactgattaagacagttggactagatgatctgtaatagttcatccaatcataattttttaaaaattttgtaattctccatgtcaggatcaattagtgatattctaactagctagctagagatagataaatggatatatattctaaatttatctatctatccatccatccattctaaatgatccaccactgttttcagaagcttagaatagtaaagaatttctctgatattttaactccaagtctgaattatttttaaaaaatcatgtctgccagctatgtgcagaaaactctcttgtgcaatatcattccatgaagaaacacttaatgattgtgaatatacagccaggtaatttgctgctggtaagaaaacgtaattgataggtgatcttactgtaagtcagagcatttagtagtaaaaaggaatcaaaggaaagaaataaagagtaggactccagatggattgggcaggactccccatgaagctcctcatcaggttcctgccagagctggcacggcgtcaaagagcagtgatgtgcttcatcattttctttgggctacaagtaaatggcccatcaaaacggatttcatggcaagggctatgctgacctccgattaacatttaattggaaattctcttttccttgagaaccattggagctatgtgaaatctttcctgagagagaggcaattcttactggtgggagttgctttcacttgatcatcttagtttggcaacttttgaaaaccttatttgttgaataagtaatatatgtgcatggtataaattttaaacaaaagaatagtaagtctttcctaacttcttctttggccagagacaaaagttattcctgattatgtttccagagataaccatgcacaggaaaggactgtcattgtttttataatattatcctttattatgttttggcttctctaatctcagctgtgattatcttgtatctttcaagtggagtgctgttctcttaggagcacttgggttctggggtcagggcaggaatctcttgctgactgaacagtgctcttaggaaagtgtttcgaattctcggagcctggtttccctctctgtaatgcagcaatagtaattatttccatgggctcctcatgtgagagattaatggaataatggatgtgaaagtgtttgagacagacagtaaagactgacgtaaatatggtttgaaaaggaggtgtcgactattgagaaattaggaaaaattctcagacatttggtatccttgatgaaacagtttgataagcccatggatgtataaccaaaacacagaaggatataaatcaagttctgggtatgtctaatttataaacaaaagatacgctgtttgcagacacacatcaacatattaaacatctcttcacagacgtcatttagagaaggggtgagcaaatgttttctgtgaagaatcagatagaaatatttcaggcttttgaatgctgtggtctctgttgccactactcactgtcattgtagcatgaaggctgctgtagacagtcagcaaacaaatggtcatagctgtgtttcaataacactttttatttaggagcatggaaatttgaattttatataattttcattaatcaaaaacgttttcttttcaaccatataaaaatgtgaaaggccggccaggcactgtggctcacgcctgtaatcccagcattttgggaggccaaggagggtggatcacctgaggtcgggagttcaagaccagcctgaccaacgtggagaaaccccgtctctactaaaaatacaaaaaattagttgggcatggtggtgcatgcctgtaatcccagctactcaggaggctgaggcaggagaatcgctggaacccgggagacagaggttgtgatgagccgagattgcaccattgcactccagcctgtgcaacaagagtgaaactctgtctcaaaaaaaaaaaaaaaaaggccgggcgcggtggctcacgcctgtaatcccagcactttgggaggccgaggcgggcggatcacgaggtcaggagatcgagaccatcccggctaaaacggtgaaaccccgtctctactaaaaatacaaaaaattaggcgggcgtagtggcaggtgcctgtagtcccagctacttgggaggctgaggcaggagaatggcgtgaacccgggaggcggagcttgcagtgagccgagatcccgccactgcactccagcctgggcgacagagtgagactccgtctcaaaaaaaaaaaaaaaaaaaaaagtgaaaggccaggcactatggctcacaactgtagtcccagtattttgggaggctgaggcaggtggatcattgagaccatcctgggcaacacagcctctgtctctacaaaaaaataaaacaaactagctgggcatggtggcatgtacctgtggtcccagctatttgggaggctgaggtatgaggatctctgaaggccaggagattgagggggcagtgagccatgatcgggacactgcactccaacctgggcaacagagtaagaccctgtctcacacaaacaaacaaacaaacaaacaaacaaacaaaaaaaaggggttttaactctcagcctatacaaaaatgggctacagtccaaaattggcccatgggtcacaatttgccaaacactaatttagagcaaattgtatatagaaaaatgaacttttaccaaccaaaatttttatttatttactcaagtttttaacacattttatgtaagattgggctgactgtgtggacactggcaggccatgttatcctctgaacctcacttttcctcctataaaataacggaggtaccattctatgacctcttagcagctttcttttgctaatattttgtgatttaatggctctgaataacctacctctgttggagttcatctttacttatatgtgatatataaaattagcctgtgaaaaacattctcccggcaagcttttggcttctattttattttatttcactcttttatttttatttctttaaatttaaaatataatttattgtccatatttgatatatacaacatgatgttatggatacatatagatagtaacatggttcctagagcaaatcagatttacatatccatcattgcacatcgttgcccatggttttttgtttgttaatgtcaagagcagctaaaatctgcccattcagcaaatacagcacacatttattagctgtagtcctcatgttgtaccacatcctccagatctgctacctcacaacctatgacctacatcccccatttccttcccccattcccatcccgtgcccctggtaacctctgttttattctcatctctgtatatttcactttttttttttaattctacatataagtgagattaggcaatatttttctttctgtgtttggcctatttcacttactggcctccaggtttatccattttgtggcaaatggcaggatctttttcttttctaaggctgaataacacttcattgtatatacagtcctaccttagtgtctataggggtttggtttcaggacctcccaagaataccaaatccacagatgttcaattctctgacataagatctacattacttgtaatatctaatacaatgtaaattttataaaagttgtttttctgcattatatagggaataatgatgagaaaaaagcctgtacatgttcagtacagatgcagtttttgtctcaaatgtttcccatctgtggttagttgaatccacagatgtggaactcatggagggcagactgtgtataccaccgtttccttatctatttgttgatgatggacacttacattgtttccatatcttggctattgtgaataacgttacaatgaatgtggagttcagatatgtttacaaggtggtgagttcatttttgggggcgtatgcccagaggagggattgctgggtcttgtggtaattctattttgaatttatttggaaatctccatactgctttcgataatggttacgttaatccacatttccaccaatagtgtaaaaggcttctcttttcttcacatccttgtcaacgtttgctatctcttaactctttggtaatagccatcctcataggtgtgaggtgatatctcattgtggttttgagttacatttcccggattattaatgacgctgagcacctttttatatacctattggtcatttttctgtcttctttggagaaatgtctattcaagtcctctgcccgttttaaaatcaggttatttgtttttctactattgaatggtatgagttctttataaatcttggatactgatcccttatcagatgtatggtttgcaaatatttttttcccaattcataggtttccattttattttgctgattgtttcctttgtagtgcaaaagcattaaatgcagggaaagccagaagtgaatttctacatcttttagggttcagtttgccttggttcggaagtttctattaaattaggtgttttggatgtgcattaattcttcaatgcctcctgggaatcatttgggacactgccatgttattactgcacagcctagtgaatctgatccgtgggatttttcccatccaatactcccacaaatgtgggctgtaactcatgctaaatgagcacatctataaaacagagaactaatacctaccttgtgggcatgtggtgaaacttaattagttaatgcttctaaagaactttcaaatccgtggataaaatgtattattcaattgctaagagctatcattgtttattatttcctctagtatttgccagtgagtgctttactgttaggatataatggcagtaattttgaaacaagctggcatttgactttgtttgcagagtgcatgaagctacaggtaacattttaatgaaatctttccctcttccccgcagagtcattaggtacacagatactgcctccttctcttaaagctttacacaattgagtagtatttaagtaacatcatcattgctataaaaagaatcaaaagaaagaatctttttccaactaagaccaagtgatttagtaacttaatccttgtttataatttttttgtcactaaggctatgtctaatggaaggaagaacaataagttgtattcaataattcactaatagttgtaattgaccttttatgttggtcagcattatagtttagataagagtcacttgagacaggccctaagttactctgctattatttatatatgtacatatatacacacacatatatagacacacacaaacacacacacacatagctttggcaaggcttaccatttttagatgtcatgccatttaaggctcacttgcaataatgtgaaagccagccagcatgttataatatgaatagaaagaacactggcctggaggcaagccacctctttagagactcagcttttccccttcttagcaagtttcttttctttctgcatttcaggtttcttgctaaattggacgattatacttgattttcaaattgtgctttttggaatttaaggcttagaacagatgcttcaaaatttctaccaacagttaagtactttccaacaaatattaaagacttatatgcccaagaaccctcatttattattttttcttatatatattgtttccttttacacttttatctgaagatttttattacttaggaaaagaattctattctgtgactcaaaagatcccttccagttctggcgtcctataatctttactctcaaaagaagctaaacaccacaaactttgacaagacttcctaaaaatacagctcttagcacagagcctatggtccatttaacagagaaggaaaatgaagctgaatgcagagaggtctaccttctgaaaggcacatttggtaagtggcagaggtgaaatttgaacccaggcaaatgtactttagtgcctgaatgcaatgtcaatgccatattgcctatagatgtttggggcaccatgctaataactgtcaggggccacaaatatgatacaaattttgtcctcctagagcttatggtcataatttaagctgaaaggaaatatgagtgaaagcactgaaagaaatgccaggcggcctgcacgtcggtggccagaggagaggtgcagaacatggctattctgggcgtcctgagaagagggccatagaagcttggcatcactgaagtgtcattataaaaccagccaaaagcattgtcagcattccgcaagatttccattgccttatccaaagaaataggagcgagggagagacgctataaaaggaagaataaaggaaacatctatttatcagctgtgttctcagtcatccctcacttggctgagctgacagcctatgataatcaggctaaggtggattgtcaggtaattctgtgcaggcccatagctctttggcttcctatcacctcccttctcccacctccctaatcagtagttaacactctcttcattgccattgcccttctcctctcatggcctttcttagtaccctggccacactgactgtatccttgtttccatttctgcttttaatttagtatgatacacatatagcattttggaattgtcctctctgataacatcgctgttgctctcctgagtgcctgagtcatcagggagaagtcccctgaagtcacctctgctgaccagtatggctaggttacctcatggcacagaaggattcagcaggcagagtagccaatagctatgactcttcctcaaactctgcaccaattctgatacatacacatgtacccacacccattttcaggggactagacactgtcatatccttgactcatgaaggagaaaagaagtaaagatgtagcatgacaccttggaagagatttatgaaactatttgttaagaattgacttgtgcagatttcaacatgatgaaatggtggtagtttatagtggttgttgaaatttgttcagagaactttctgcagcgatggaaatgtcctctgtctgggctgtctaatatagtggccacatgtggcatttgaaccctcaaaatgtggaacttgaaataaaaccaaggaaataaatttcaacttttatttaatttcaaacatttgactagtggctaccacatagaacagggtagctatggatcaaagtatccaaatattcagaactgacaatctagggtgatctagtgtcttcctagttatataacatataaggtgagtttctatacattacatgattgtatttgagcagaaaggtctcagtacatcaaggatttctattctataaatatttattggaagaacacatatgccatttatcctccagctccctgtctcagtctcagaatcttcctcagtgcagtgtttcgggtagctagtgtcaattggttgtatttgtgaagagagagacacctgatttctatctttgaggtgcttgagacaacatatattgtgtactttgatacagacatcatcaattaagacttgatgaccaaacgatctttaaggtctgatcatgagattatatgattccatcaattaaaagagaatcagttctacatcttatccagacttctccatagaacttcagaagagaaaccacctctatagcactaacatatactaaaaggatggacctctacttccaataaactccctccccacacgtaaaaaaagaacagaaagaaaaaaatgtacagcaagattttaaaccatctattggttgaagtgatatcaaataactgattgttttctctggtttctggattaatgtatacacggtgtcaggccaagtcataagcattataaaaacttactacggtcaagcacttttaggtgctggtatagtacagggtttaatgacaagttattaagtattgtaaagtgacgtagcaaaatcaacaaagctttaccaggttgtacttaagttaaacagtaattctctgtgatatatgcaataccatatatatgtatcaattctagcatcaaaatgtacatgtgtatatgtagggatttcagtgatttttaaaacacaatcaggttggcctaaagcaagaagagttatgagtaaagaggtacttgaaaaaaattaaaacattctaaacactaacacgggggacaagtgattctaaatcatgttatagctctatcttttaaaactgtaagaatgtcttacaattattatgtgattatagtaatagatcatagtattttaaaaattattctccgtcaggcgtggtggctcatgcctgtaaccccagcactttgggaggccgaggtgggtggatcacttgaggtcaggagttcgagaccagcttggccaacatggcaaaaacccgtctccagtaaaaatacaaaaatcagccgtgtgtggtggcacgcgcctgtaatcccagctactcaggaggctgaggcgggagaatcgcttgaacctgggaggcagaggttgcagtgagtggagatcatgccactgcactccagcctgggaaacagagtgagactctgttgcaaaaaagaaaaaaaattattctcatccctattgtgaacttatacctaaaatcagttattctttttaaacactcacagttattttcttcttaaatatataaattaattaatttagctaattaattttaagtaatttaagtttctataaagtcatttaaatatataaagtaatttattcatttattagtgatttattgtacaccttcttggaacaaagtatactgcagtatacactcttgagagatagtaaggtatggggcttcctctctcagatgtcggtttcttcttttggaattaggtggatgtgaatgtgtgtgcatatatgtatatatagtcatccctcagtatccatgaggacatcctgtggataccaaaatccatggatgcgcaagtcctttatgtaaaatggtgtagtatttgcatataacctatgcacatcctccctgtataatttaaatcatgtctaagttacttttaatttctaatacaatgtaaatgctatgtagataattgttatactgtattatttttaaatttaattttattcttattgtattacattttaattttattttttggatattttcgatctgcatttggttgaatccatggatgtagaacccatgaatatgagggctgactggacgtacgtgtatgtgcgcatgtgtatatgaatctacgtgtgtaggcatcatgtgtatacaggaagaaaaagatgaaagagagaaaaaaggaaaaaagaaagaaaaaggaaggaagaataaagtatgatgaaaattacattttgtttcgtatcctttgaagcaaagaggtagtgctatggtaattgaggagacagatttatatctgcactgggcctttaggaatgaatttagacctaaatggattttgagcatgcagatatgacctgagcagacagggatttcaggagaagcaacaacgatatacagttataaaaaggtggaggagatgcaggcacctgtctaattcaccttggtttaacataaaggcgcatgaagggttgttgagatgtgagagaggttactgaaaatgatggccaggtgtccagttcgggtatcatgagcaacaaaaaccctaaactttcagctgttggctgaagggagttgagcctccatataggactgtcacagatagttaatcctgtgctgattattgtaaattaaaagaagttgaatgaagcgggggcttttgcagggtgatacggaatgactccagtgctacagcagcacatcctaacttctctgacttgggcagcataatgttatagaaaaatggagtgaattggataagggttgaatatacttttgttgtggtcttggctccacatcctattacttgtgtgatttgggggaatcttttaactcttccgtagtgatgaatcgtgttttcccaaattaatgtccgccaagaacctaaggatgcgatcttatttggaaataggatcctgaattaagatgaagccatattagcttaaagggggtcccaaatccaatgattgataagacgaggagaggccgggcgcgagggctcacacctgtaatcccaacactttgggaggcagaggcaggcggatcacttgaggtcaggaattcaaaaccagcctgaccaacatgatgaaaccttgtctctactaaaaatacaaaaactagctgggcatggtcatgtgcacctgtaatcccagctactcgggaggctgaggcaagagaactgcttgaacctgggaggtggaagttgcagtgagccgagatcatgcctctgcactccagcctgggcaacagggcgagactctgcctcaacaaacaaacacaacacaacaaaacaaaacaaagcaaaaaggagagggcacacagagaaaaatgccaaagtggggatgaaagcagaggctgaattgatgcatcgatgagccaagaacaccaagtattgcctgcaaccaccggaagctaggagagaggcatggaatagattcccccccagagcttctagaaggaaccacccctgcagcacgttgatttcagagttctggcttctataaccatgagaaaatgcatttctgttgttttaaggtgcccctttgtgctactttgttatgatgaccctaggaaacaaatacaccttcaaacctttatttacttcattgtaaaatggggatgatgatttttacctctgagagtttcgataagaattaatgaaccagaatcaaattaagaatacatttatcacatttaaagtgctctacaaatatctgcgaatttaaaactccattttctagtgttgggaaatatatctaaccattactgagcattaactgtgcatcaaccaaagcattaagcacattatgcctgctctctcacagtagaattagcaatatttagttgtcattttacctgcttggcatttgaagcttgatgtcaacaaaattttgtaagtctttacttactgggggaaaaagtgagtgcagtggttaaaatgagatgattaatgcatttttactttctggcagtggttttttttagtcaaaatcatttctttttctctacagataagcaaaattgctatgctatggtttaataagtaaaatatgtatatcaagttaaaataaaaatttcagtgggtgttgaattccatgctctggttttcaattactactcaccctctcttaggaaagtcacacttctcatttgccttggattagatggggggaaggagctccatgtaccacatcgtaagtgtaatatggaattccaggagaaaatgcatgtgtaaagctatttagctcagttcatttttagatgatttggcaactgttggctaatttgtttgcgttgctctcctgagagaactatgagttgggttcttttgtaacatggaagctgaaatggagcagttcagtgatttactaatatgtaaaaggagtagatattgctgctggagctggactcccaggagtttagggctctactcattgatgagcttcccccactagcatgtgaagaccccaggcagcacccacaaactattcctgaccatgctttaaatggccaaataatttttctaggtttatagtatatcacatattgcaaaacccatttgctctgtctttagccttccagtttccattccactgccttatatgcagaaatacaatgataactataatggggtatgccacctgccttcaatgtgtcatgtctagtaatggagagaggaagttaaatcacagtgtgtgaagtggcatgccattttttagagctccactttaaatagacaaggccacttactttcagcaagaatgtggaggaattatgtagaccaaaacatccaggtgctaaacttgcccactggtgtggtacaaggagttaggaaaattatccaggtgtggctgcaaatgagggctcaatgtggtgaacaaatgatgttagcaagattttcagttatagttaaacagttgctgtgggaagccaggagtgctatactggatgaagtgacattacgttccagtagttgggctagatgtcgtgatggatgctagaggagtgtgaggacacagttagtctcaaatatccagacactggcatcagagtcgtaggacctagtgtctagcctgaagtttaggaataggactcttctctatgaaaggggaagtgaaaagcaaattcgggccagcaaatagatggaggacactgaactctgaagcaggttagcaaaaaaagatccttctcataagaacaaaggcaaaaaaagtggcaatggctcaggaactggagaaagagataaggaataagctgctggcaaggacttgatacgtttgaactccagaatatggaaccggagacagtttagtaaattgtgttatgaggcaaaatttggggggaaagccagaattggaagtgcctgcagatgtgaaacatagctttagcctcagctgttggggggaagaagagtgaagaagtttggaaccagactaggccataatatagtttttctaagaaaaaaaaaagtgggccgggcgcggtggctcatgcctgtaatcccagcactttgggaggtcgaggcgggcagatctcgaggtcaggagattgaggccatcctggctaacatggtgaaaccccgtctctactaaaaatacaaaaaaaaaaaattagccgggcgtggtggcgggcgcctgtagtcccagctactcgggaggctgaggcaggagaatggggtgaacctgggagacagagcttgcagtgagccgagatcgcgccactgcactccagcctgggcgacagagcaagactccatctaaaaaaaaaaaaaaaaattgaatttttttatagcaacaatgtgtcacacagcgttaagagcacaggaagcgtggaagagttctagttcagcctttgttaggtatcaggggcatgaccctgggtaattttttttttttagccctgatttccgtatctataaaatgaaagcatttctctatattaataattcccaaatagcaggccatgggctgtgtgttaggctgttctcgcattgctataaagaaatacctgagacttggtaatttataaagaaaagagatttaattggctcatggttttgcaggctgtacaggaagcacgatgttggcatctgcttggcttctggggaggccccaggaaacttacaatgatggcagaagccaaagagggaccaggcgcatcacatggccagagcaggagcaagagaggcgggcagggaggtaccccacacttttaaataagcagatttcttgagcactcactcactatcacgaggacagcaccaaggggatggtgtgaaaccattcataagaaatccaccccatgatccaatcacctcccactgggccccacttctgataccggggattccagttcaacatgcgatttgggccggagctcatccagactatctcaggctggcactaagttgctaataaggattacctagggagcgtgttaaaaatacgtgttcttgtgttatatcctcgcagattgtgcttgaaatagtcgcggacagatcccagaaatctgtgctttgaacaggcactccacgtggttctgaggtaggaatggagatgagactaccttagagaccgtgaagtctctgcaacattctgtttgtagtattttctcttatcatcatttgcctttgtacttttttgtattcatgaattgggatgatgctcaaagatccaataaagaagtttattggcacactctttccagcagtcacttgaagtctgggagccaaataatgcagggaagttagtttttattgcttactcagccccagcagcacaaacaatcaaaagtccaatctagaatctgttttcatctgacttctgagcccatttttgcagatgcagaagtttgcattcttgagatcgctggtttcctttttctattttatgaggcttttctgaagcctaactagtaatatctccccaacattttaaactctttagagaaaaagttttcataaataaatataggatcagtcatggtggtgattaggtgatttctgcagtaatgcaggacaagggaaaaactttctggagtttgtctcagatgaagtaaatcaacttgctgtgttcagtgggttacttttggagaacatgatatgctctagggcccacatgttaccttgttctccaaaaatagcatttcctactcattaagcaaattaattctttgtctttcagaagataaataatttacagattcttcctagattctaaacctcatagtcagtcatgatagtctgttttatcttatattcatataaagttaaaattaaacattattagaaactttgtagtttacagaaaccatgttccagagagaggaaatggtttgctcaagatcacacagtaaattggtggcaaaaacagtctcagcctctggttcttagctctgcattcagtggccaataaaaataataagaatattctccatacctatattagtcagggttctccagagaaacggaaccgataggattgtgtatgtgtgtgtgtgtatatatattaatatctatgtagaaagtaatggtaaaaaccacaattacttttgcgtcaacttttatagtaaaaagtatatatttatgtatatatgtgtatatatgtatttatgtatatatttatgtgtatatatacataaatgtatatatacttttttaatgtatatatttgctatatatacattaaatctataatgaaatcacaggctcacagtgtcctccatctatttgctgccccgaatttactttgtatatttatgtatatatatgaaactttggttggaatgaaaaatagtatatatatatatacacacacacactaatatatatatacatatatgtctgtgtgtgtgtgtgtgtgtgtgtgtgtgtgtgtgtgtgtgtgtgtattcctttggttggaatgaaaaattgtatagcctctctggaaaaaacaatttggcagtttttatttatgttatgctcttgagttttattccagaaaaacaaaagtgtattcccacaagaacctgtatatgattgttcatagcagctttatctaaaatagctctgaagtagaaacagcctaaatatcctaaaacaggagaatggtttaacaaactgtgttacattcataccatgaaatactactcaacaataaaaagaaacaaactattgatatctaacaacatggatgaatctccagggaattatactgagtgaaaaaagccagtcaccaaaggttatttactgtataatcacgttcatgtaatgttttttaaatgacaaaattttagaagtggaaaacagattagtggtttccagaggttagagatcagttggtagggtgggaaaaggaaaggagagtatgtttataaaagggcaacataaaagatacctgtgacaaaactcattttgattgtggtggcctccacatgaacctctacatatgataaaattgtatataactaaacacacacacacacacacacacacacatgcacacacacagagtacaagtcaaactgaggtctgtgaattatataaatgttaatatcttggtagtaagactgtaatagttttgcaaaatattaccattgggggaaactacgtaaagtatacacgggttctctctacattatttcttacagttgcatgtgaatctgcaattatcttgtaaaaatttcaaataaatgatatccctactaataagcaagttagaaaactgttagtatttttcttgtgcctcaaaaggatatttgtatgcttctgttgttgtcaaggacagaggaaaatagatacttctatactgtactgatgggagtagaaattgctgtacttttaacaataatttgatatatttaatcctttggcatgataatttcacacctgtgaaattgtcctaggaaaataatcagaaaaatgaataaaatttacatataagtgtttaattatagtattcggtatagtgtattatgatagcaataaaactaaaaataacctacataataaaatatagtattttatatgttttattaaaattatattttccaactatatttgttaattggagaaatgcccctgagacaatgttaagtacaaaatataagataaaattttatttattatattacaaactatatatcaaaatagatatctgactcctatgctactagctatgtgatattgggtgaattgctaaacctctctatggacttgttatctgtgcaaaggaatacaataggaatcgttcattttcttttttaattaaatgattatagctcttccaagcatatcctagcatgtagatttttaagctgataataaatagcagttgtatttggttagtagtaatacgtctcatatttacactcttctgtattttaaaaatctttaacagtgagcatgagcatgtgatactttttgtttaaaaataattagtataggccaggcatagtgctcatgcctgtaaccccagcacttagggaggctgaggtgagaggattgcttgaggccaggagttcgacatcagcctgggcaatgcagtgagacaccacctctaccaaaatttgtttaaaaattaactggacatggtggagcacacctagctactgaggaggctgaggtgggaggaccgtttgagcccaggagttggaggctgcagggagctatgatagcaccactgcacttcagcctgggtgacagagcaaggcccattctctaaataaacaaacaacaaacaaacaaattggcatgtatatgtagcgtttaacttattccttcttactctaatgatgactaattcctgtcgatatttaatttatatccaaaatgcctacagttagtccatttctgagagaaaaagacatgcaaatgtctacccagctgaaattttccttatagattctcttggatagtgacagagtctttgaatggagtatttaatttttaattttaactatgcccaaatatagggtgtatacttaaggaatatgatttgatcctgaagagcagaaaaaaaagcgttgaaaaatatttactgttaattttggtagtagataattaattgactgcctggaaaattaatcactgatgagaccatgaaataaataacatatgctaattatttcaaaagattgagatgatacattggtgattggcattgaaacctccaaccacttactgggtcaggttatgaagcatttaatcatttacttattcttggtgagcatttaatttgtgttaaaaatggcagtcattatagcagccgtgagaaaattttgtagactttatgcattgcagcactgtcagagcaaagagcaatctgaggaaataagaagctacagaatgtgggtcaacagggactgtctcatctttctaatatcatctatttatctaattttacccaacaagctagctatcaatttacttttaaccctttaatcctaaccttgggatcttgggaaaaattgcagttcatggtattaggtttttaaagtttagaaacatgacatctaataactgttttgcccattatttgtttccatttgtatttgttcatgcccttttccttttgaatgtattttgtgtttttcttttcaatattttattacctaaataccctttgggataatctagacacctagtaacaaagtacttgaaaaaatatgactttttaaaaaaagtttattttctgaaaatagagatttttcctttatgtatttgctcagtttttaagaaaaaacctagaatctgtattgctttctgaaaagcattagtgtttgacactaatgtttcttgtttaatttttaaaaggcagtaacagcctgaacttattaggttctcatttttaaatttttaatatagaaaaataatttcaaaacagaaaacattcaagtggctattaaacatatggaaatatgctcaatctcagtcttaataagaaaaaagcaaactaaaaattaaacatcaatataccatttttaaatccacaaattttcaaagatgagaaaattttataacacactctattgactcagttgcaaggggaacaggtactcataatacaagtatgagaattggtataatatttatcaaggacaatttggcaacatctgtcaaaattacagatatacatattttgatccagcaattctacttccagaaatttacctcagatatcctgggacatgtgaaagatgattatgtaaagtaatacatcatagaatcatctataaaagcaaaagattagacacaacctaagtactaactaaatgatggcacatctataaaatgaaatcctatatatttgaaacataacaaagcttttaatgtgctatatggactatttcccaagcttgttaagtagacagagcaaaggtacaggactatgacagtagtctgtaccctatttgcttcttattaatgttttcataaagtatctctggaagaatgcagtaaaacatgacaaaatggctgctctatggaagggtactgatggatcacaaataggggatagagacttttaaaatgtatggtctcttacactttcggtttttaaactatgtgattatgctacctaatcacaaaaataaattaattttacaatcattgtatacacacataatatatagtaaatggaaatgtttaaaagcaactttctccttgctacgaagctaattttttcctaatatagtcctttaacaaggaagatgctatataattattttataatactgatgaaaaatgattttttaaagtttaaagagaagaataaagctttgcagcattgaagtcagtttattacctctacttgtattattcacatgagaaaaaatataaatgaacacctaaataagtgaatcactttcccccttctccttcctcctcttctctctgctcctcctcttcatcttcttcttgtctagtttatctgtagcattcgctggtattggaaggattttcaaaatacattcacaaaatataggtatgtgcatgacaattgtaaattaatatttagatattcatctaaattatgtttttcctatgttgatataaatagaaacaggcctaactgcctttctgcacataccagccttattttaatagggattttattagtttttcattcagtttcatgtgggatttttttttttatctaagagattgttccgcatttgctactgggttgtatgccctatgtatatttctatggaaagtattagcaaatttcactaatttttgctattaccaactctaaagaaaatatggaaaaaaggaacttaaaccacggagcctcataatgtcatgtcatctcaatctagttcaagatatggtgtgttttcacatttaattaaccttctgtcacatcctgtgataacctagtcttaaaattgattatacagtcgagcatgtttttggaggctccataaactaattactttttgaaacatgcagttttggcaactagtcatgattacttctgaggctcctgtaaggggctgtcaaagaagggctcagctctgatgcaccatgaaaaaatccaacagggaataatagccgagagagaggtgaagttggtgaagttattggacttccttggtctctggctgattttcttacagcctctcctccttctgctgaatctgcactgcagtgactcgtttatgttctttacacctaaggaggacagcattctactgtaggcaaacgtatgaaagaaactaatggaagtctggtttccttcattcatagagccttgctctttctgcaaaacaaaaccaatacatctggataaaaaacagaatacaaacaaagtaaacaccagggactatgtacaaaacaaaagagcaatcgcaatttttagggcattatatttacaggattatgaagaaattcagttgaccttgaggcatcaccccccaaatctgtattagtagcagtttacactggcattcagataccaagcatcaaaacgtgtaattttagcaaacattgtaatcccctgatcagaaatcccatccagagctgttcacaaaaagcatatttggcttgcttaaatttttactttctgttgtctcatcagaaaaaagatgatacccccctctgtgctcttgtagtccatttggtactgacttcacttttgccttgttattagttgctttcatgtcaacatgaacatgaacatgaacaaacagaggacaaagaccatgttatttctatctttatctaccataacctctagcaggggacctggcttatagctgttacatggttgatgtttatttgatttaattgaataatgagtgacactttgattatcccaacgtaaacagaggggaaaggaagggagatatgccaggtttgatatagaaattggttttatttctaatatattaagtgcttgctgcaaatgtcataatccagaaagattgttctgtggtccctggatctaggagagaagacgccactgacttgctctccttggttgtccaggaaggccaccctaagaaaacaacaaaaccttgatttctttagccacgtgtgtgtgtctgtgtctgtgtgtaagtgtgtgtgcatttgggtcctcacctgatgaagaaaagtgagaaatctgtttatttgtgggtacaaggtgtttcacagtttatgaaatgcatctgtgcttttccatgatcatatttaatgttcaaaacggtatgagaatactttgtctagtttacaattatgtaaactaagcttcagaacagttaagtgatttgcctaagttctcctagttagtaaagattggaaccaagactggggtaaacttgaattatgtggggacctgccttgaactccacagtgactcccactgactggtggtccctgacccctccttttcctagtcactgtttccatgagagaatgttgtatgtcttgggtgtcttagggtactgtgaggattggaaatatctgatccaaggattggactcctagtttagtggtttctgctcagggcattctaccaatgacttacctactgtctcatcggttcgatgataactctagaatggctccatgtgaggttgaaaggagcactcctggatgactctgttcccgcatgtctctttctttccctttggactgctccatagccttcctgtctctcagttgctacattttgcttgatacccttgggctgagggagggcatgctgtggaaatgattacatctacataccagttggcacagagaagccatgctgtgcgtatttatttgtgcccatgccatttgacaacagcaaaatttagtacttggcttgcatttgtaaagaaattggaaaagaggccttttcctcagtgggctactcaccaacaactggaaagatctgagttctcaatcctggatggctgcaactttcttcatatacatctggcattatttgacttctcgtcacagggtaaatatttgggatagaagatatgtaccaatttcccttattgcccccaaagaacttgcgttgtatcatttccactagtggcattggagcacagtaccaagcgtcttgccaagctttccagatttcttgaggccccttctggttctgagagcaacagttcttagggctggaggcaggaggatgtgtgcaagtgtatgttccttttttttttttttttttttgtatttgtatcttgcctaagatattgctgaaaacttaatttaaccctgctacttccctaaacaaaagacacaattttctcatcaataagaatatctactttttgacaggcactatgctccacgagtcgtctatattatctctactctaaaatagccctgcagagtgggtgctattattcccaatatgctatgaggaaagtgagggactccatattttctctaagatcacagtggcagaacttcaattccaaatggctcttgtcgggcttcaaagcccatgctttttctggtatgcattactgcatagctgaactacacagaaacttagttttacaaaaggtgacaattaatttcacacagtaacttttacccaacctgctacctatgggaaaaaattctggacagaaaataaattatacaagaaaaaagaatttcattgaggaagtacatttctctataaaatttttgaggaaggaaatttatttatgaaaattaaccagctaaatgcaggcaggaaaggtgagggaaaagcgcacatatcattttgggggtgggtgaaaacaaaaacaatggtttttaatggatttaaagtcaacaatggattgcttgaagagaatgtaaggttgaggggaggagatgtttgaaattttcaagtcatatagaattatattcccttaatttacctgactaaaaatatataagtagtatgttagagtcagatgatgctgggagttaattctccaactttacagatggaggcttatgacctggagctcatactggtatatacgtagacctagaacctaagcttactgagctcgagcccaggtctcctttgtgagctgccatgataggctttggtagggaagtagatatcccagctctttcaacttgcctcaaaaatgaatccagagctcactgcattgatgttggggggctcacagctgggtacatgacagttcagacattttgatcttaagaatatatctggacaattctgaaaccaaatagacctcataaagaaaataagagtgagtctagtgaatgatatactcagggaggacacagcacattaggtttcagaacgtaaaagctaaataatatggactcttgatcagcagcttgccaggcaagaagcttgggcagcaggttggtggcatgctggctagcttagacagggtggcatttttcctaccgtatagtttttatgcagagcacactccaagcaaataattctcagcagggaaggatgcagattttctctagtatgttacagccactggggtagatgaaatatgggccctggaagcctttttggcaaactctccgattactgtaaggagtgcttataaaaggaagaagaatgtgggctcttttttagtctattgaaaccttgaaatatttttcaggtttgagtgtgtgtgtgtgtgtgcgtgcgcgcgcgcgcgcgtgtgtgtgtaattgatcttgttaaactgaatcacgaattttttttgtgaattcagggccagaatgtattttcacgtccccctcgatgaggaggatgagagtgaggtcggcaaaaatggagtgttgacaggaagtggatgccaatgggagtgaacctgtgttgtgggggatttgaataagagttccagtaagctcttctcgcccactgagcacaaatgaccacagggtatcccggtctgaaacaatcaataggtttctcaataagtatttttgtcctctcaacccatctcagctacctgtccccaagggttaaggagaagctgtcaacttgttggtttgggaactgattaaactccattgctaaaatccattcttctgctccagctgaaaattcgcccagcaggagatggtttcctgattgaagatatgacaaaagaaaacataggtctaacaagtattcctaattattttttcaagatgttaagaatttatggccaaatacgtttggaatagagcaatgtatctccaatttcgcacattataggaaaatcaaacaagcaaaatcaaagaacttcccatagagagtgtcagaattgggtttactacttggattctaaaatctcatacctgagcaagatgcagaggtaacagtcctcaaattagtgccagcccaaacttgccaataaaagttctgaggtcagtaaaggccatggctatgataccaaatgtttcaaagatgtcagcaggaggtgctcgggggaagcttggctagagcgactgatgggaacgccagtcaaggcccagatgtacttcttcagccttgtcctgcaccttcctgctatacgcactagtctaatcacctttcccagttcctgcccacacttttcacttccctttgcttttcatatatgcttttgttttctgtgcctggaaatgcttgctccttctttgaggcccagctcaaacatcacctgttctgtaacatctctttcagattcccacccatcaggggaggaaggaggaataaatttctctttcatctcatctcatttgcctgatagaggttacaggcagccaattaaaaaatctaataacatgctaaccacttaaaacaggactactaaaaaatatgtatatgtaaattagcaaatgtttaccaattaaattagcctttaattagctaatttaattagcaaacatttaccaatcccttgtatatattacatatatattatatattgacatatatatattttttataggcttattttaagtggttaacatgttatatgattttttaattggctggctggaacctctatccgactgtaagccaggtcttgtctgtgcattcccagtccctagcaagtgtttctcacttagtagggattggtgaacgtttgctaatttaaggcggattcttggaactgttctcacccaaagagcaaatcctcttactgttttttttttagtattataagatagtcgaactttgatctatgaaggcagaagccacatttgtaattgaacagcgttattacctttctttttcatctgtgaatctgttctggaagacttagcagcttcaaatgagactgaaattaaaattttgaagcagtccatttctgagccagagttttagagagaatatttttagctttaattctgaggagaaatcggtcaaatttattattgatatgctgccattttaatacattaactaactcttctcatcttgtctatcatactgtaagtctcctcccttccttccttccttcttttcacctagaagtgataatttttaaaaatcaatctatttattatcttgccttacatcaaatggcactaatctgccagaacttgatggacttgagtctgaggtcatgggatacacattgagcttagagacctgtaccagtttggaatgcaattctatcagcagtagcattctctggttaacttagcggacttcagaattttttttttttttttttagttccccatgatatctctttataaaagaatgtactctttttcaccttagtgattccattataaaatcagaaaaacgtacaataagaaaggaccttggctgtcacttcaacaagccctctaccattcctgtaagggttgcttatgttcatcttgaatacttccattccaagcgatttattatcttccaagttaacgcattcctttgttagtcaacctcaattcttctttgccatcctgggtatacagatggagtcatatttatatcaataacccaaatttattttcctttcctatatatatgttcttaaaatacctaggatagctggagtactcccagcgtttctgggtatgtctggattgtgtgtggagggtatttccagagtattcataaactaccatgtgggtttcggaccctgttcagcatctacccagtttttcctctcctacttagcattttccttgtcaatttcttctcatctcaataatctctactaaaactcttctacctggtggttgttggactagcactatcaaaattacgtgatagctcatttgaaaggtggaatcttgggtcccacctcagacccactgaattggatcagcattttaataagagcctcaggttggttgtattcttatgtaagtttgagagggattggtctgtctaaatagtgccttatgatgcctgtggctttgcccattcttataacaccaatttcaagactgaaagaggtgcttctggctgatttccaaaccagaatggtcaagttggagaaggttctgcacagaaagtgggagaatgacttctccaattttatgaccccctttatcactttgtagtgtcctaggcagccatgtcctgaaccccactctctccgtggagcttttcataaaacttgatcctccaacctcccacctcccccactttccttctgagggatcctggaaatgctatctacaccattatgttttttccaatgactttttcaaacttctctttaggttcttaatatatccctagcctattctccttaagtctgaaatttaaaagcttacctagaaatcagttggtgccaagacccttgtggacccacatacatcacacacatgcaaataagcctgaattccttctggatttaactggaccagcccgtattcatttctattgtactgacataccttccaaaaacttcttcattttctaatttttgtcttccgaagccatgaaaaaatatacttttaacctctcttccatgtatctgttctttaggtatttgaaggtcatttttatgcctgtgtcccccaaactttctcatttctgcactgcacattctgacatctctcacatttttctcatgtttgatttttcagttatttgtccagaatatagcttaactctctaaagagtggatgatacaagttgatcacaaaataaattgatgatcacaagcaggagatagcagaaggcagagaataacaacacaggacattctcatatacatgagggtgtacataatgccgtagaagatttccacatgcaaccaagctggaaaagaactctcttactttactacctctcatgcatcaaacagatgagctactcatcttctcttctcaaaatatcactgcccatattactttttttcaccagtttatttatattctagattttagtttctcagcacttatgctgagaactcttcaaacaacaaaattctgagagtctatgcctcaaaggctctgtgtgtccagggctactcaaattattggatgttaaaaacaataggcttaggaatcataataaatctgatgtaagaaatgttgtgatggctgaggcttttataagttgatgaggtatatacctaaataaacaataaactaacttagattcataggcttcactgatggtattccatttctcagattgtagatcgtaagactttagagacatactacgtttatttgttttagttaaacaaataaaaataagttaaataaaccataagtgattttgaaacttctctgaggctgtgacaatgtggcacactttcttttctttgccaatgattccaataaatacaacttaagataattttttcagtaaaatttgctctattggaatttattacatgtaagtatctataaaatatattagttgttggtatattacatttgaggttatatgtgttagattttaagaaaaaaattttgtaagcataaaactaataattattgtagaatttttaatgctataattgattatatttacaaagaaattaaaatcatccataatcccattacttgtagataaatgtgatattttgatgtacttttttcatttttaatcaatgaaatatataaacatatacatgagtatggttattgactctatgcaatgtcatattctgcttttatcacctggcataaatttccatcttgttaaatattctttgtctttaattcttgcataacaaagcagcacaagaatatgccatgctttgtttattttaccattatcttcttgccaaacatttagatttcttttaacattttattgctttcactggaatgcatattcttgtatatatattttgagcacttctgtgattatttccttataatggattctgtgaattggaatcagtgagttaaaaattatggacatgtcatacatatgttttaaatgtgtaggtggtttagtttgtccattaattaaaatgccacttgggtggagtggatagtgtgtatggggtctggcggggctggtaaggggtgaggaaatggagaattggagttacatattctcaaggaaagaaaaggaaaatcatttgttagtagatgattcaagatcttagctattaagtaattctaaacactctaaaatgtgattttataatgagaaatcttaattctataattatagagaagggagaatttcgaatcttttcatcttctaatagaataaaaaaacacacacatttaaagtgtgtaattagttgtttatcttggcataacactgagattgtataatctctttaaaatttttttaaaaggtttatattattttcttcctgtcataaaaggaaagacacacaaaatcaatactgtaaactccgtgaaggcaaaagatggcggctgtcccaggggctctgcatctcagtcccccatagatctcttgacacatgaagagtacacagtagatatctggacagtgtagagaatctcttccttgtgacttctggagtattaaatagatctggtcaagatgattttattttcatcaaaattcttagagagtgatataatggagaaaaaaacccctgtaaacaaataaaacaaaaacagtatgtaaaggccattctgaaggttgaagtacttagaaggctggaagtgctcctctgtctagagattgcggtagatgggatttttttcttaaccaggaaagtccaggaactcacagaaaacctttctctctctcacttttcaaaggccagttacctgaaactctgtctctctgttcttcctttgccttattacagcataaagaatactaaataacaccttcagaaatgtttccttttaaaatgtagtctcctacgactgagaaaaaaacggattagagttttaaaaaatctaaattctaccatttgtagcaatacaaagaaaacacactattctctgttcatgtatctaaggtaataagcaaatttaaagaataatacagaaaaagctagataaattaacttgaatgaaatagtttctttttttcttgaaatggctcaagtccttttcaaactaccactgaagttttttagaagttaaaaaatccatggcaggatataggtttcttccttcttgtcccaattaaaagcattctgaatactaaaactctaattttattctcttcactttcgtctagatgtagaaatacaagggcagatgagcaaaggatctttgtagcagattgtttgaaaaaaggaggatttaaaagaaaaaaattagctttaactatagaaaatgttgacccttaggaaaaaatttgtaaatgcaattaaaggaaaaaaaaaggaaataaaaatttagaaataaaatgatctgtggtagggatatacagagtgctacattgaacacacgttttcacccctcatactcctggagcaagtatatgttcaggagagatgaataacaatgtcttcagtgggaagcaatggggaaggacaagaaatgctaggatgccaggggagagcatgctcttatgactttgattcaataagaaacccatccatcattccaaggttgatcattcttaccactgataaatgaattaatttacattcctttgtgtaatggccttattgcaattgtaaatttataagtgatgttttaggatcttatgcataattactgaaaaaaaaagtttgcatttttgagcctgtacacagggttggaattttactaatcaaagatttcattttggatgtttccaataatatgagtgtaagtaggaatgtgtcttggtagtttgcttggtgtacctaggatcattcacctttgacttctcttaactgggaaaattgatcatacctatttttttctttgaacatgccaagactcttggtaaatatttgtaaatttttataaaatatctggaaaattgtgttgaaggtctacaggtcaaatagcatttgttccacagaagagtcctttattggacgatttatttattacatgttctccgaacctagatataataatctattcagataaaggtaaatgaagtaagtcctatattgttttgctttcagtctttagtgtcatatttttatagcaaacactttctcatcgtactgttccagaaaataaaacagagcaagatatctgtggtatacctgtgagggggttgtctgttacaatttcctctatcataaaagcaattcctataaaaatgctcataaataaaatgagaaagggtttggaggcaatcaataagggagaaattatacaataaagttactaatctcttttcagagataattttcatcaaatgaattgtacaaaaagtcttcaaggaataattgacttcaacaagctttccactggtcagcaagactttttgctttgaagtaaaacaaaataaaacaaaacaaaaaacagatcagaaaaaaaatggtaaataagaagtagtgcctacagatcttcccaccaagaaaaatgagcagggaaaggtcaccagcgtgtgttttcaggattatttgtctatcccacagtttgtggttccaaagtatttttatcagcattaatttgtttttgccttaaaattgtggaaacattcaactcagaagagttatgccaatttaaatctcaaagaaaaatttgggcaaggagcatgtttcttggaacagggggtataaaggaaaactgatttctatttatttggtttccattaaaacaccacaagttattggcttaaatgtccctattttttatgttttgaaattaatacatgttcagcttagaagagttggtatgaaataagcagaatatgaaaatatatagccctaataatgttatttcatagctataatttgtaggtcatttttatatcagaagtagctttgtatcctccaccctcacatttttttcttactttatggtgaccattttcccgtgacatttcccattctgcaaagtatttcaccatctaggtttatcataatgtatttaatcagcctcccttttagtagccatttgtctatttattcttaattaagatgaatatcatcaattgaatatgaagtcaaccatgtaagccaaacacagttatgaaattcagatgtgtgttatagatcccagttcggcataataaagcaaaacttcgtttctctgtcttccaagtgattcatttactttcaaaaggctaacaaaggaaatgatatacaaacctagtcaattaagaagtgcaaaaatgtggagaaaatataaaaaaaatccaggtagataggagcacccaaagtccagggtcatagaaggaaagcagaggatacttcatccagtcactataaacctttaaaaatagagccatttctctactactgtgactggtttgttttcgtggccaagaactggccttggttgcaattctacatggctaagataaatgggtatatagagagtcatgtggtggcatgaagcccaagtagtattataatcccagagcctctgcaggcctgtttaacagggttgaactcatcaatgactctccgtagaatgtctgcctcatctccctcaactcacttgagtgcagagagattccctaaaacactgaatctccatgaaatggagaatgaataatttcccaaatttatttgaacgtggggctatttactcacctaaaatagctattaacctttcacagatgactactgtcctttggaacatagtttgaggaacatagctctgactagacagcattactctttctcgtactcctctagcacttatatctgttgctccttcagtatacatccttttaatatgacagcaggagtaaaacctggagtgaatatgacagttacgtgggaagtacttaagaattcctctgttcttctttctgaaaccaggtcccaggcagtggtttggttttgagtttcttgggcaattctattatgaagctgtgttcagaaccattgcctgacggtgcactttttctttatgtattttacagaatacattcaatacagcttcagatatccttaaggctaatgcaaggaccttgtagataatagattctcaatagatatttgttgaatgaatgaacacacccgtaaaacatgctaatgcaaacagtatcaaagtaagatctaaaatcaaaattaaaaagacaatccctgataacagcctccttttctgaccactgtgtatgtaggctttaaaagctagaaataattccaataagtagccatacatgcttttcaaggatactctgatcttcccagaggcttaaagagttttaaattctacaagcaaagcagaaagcagagcttctaggtatgtagcttccacgtatggcattgcaatggagctggccctccatcttttcttcttttctttcttctatagctgattattaagtgattaatatgtaatgaacactattgtaggctttgagattatgctagtggacaaaacagacagaagttcttgcccttacagaagttaaaatgtaattggggaaaataaagatcatgataagggctaaagaggaaagtaaaacagaaacggttatagggagtataaatgaggctgcaatttttatataaggaggctagcttaggccctgctgagaaggtgtcatttgagcaaacaatggaatgaggtgaaggaatatttgggtgacaacgttctccaggctgagggcacagcaagagcagaggttttgagacatgaccacacacctggtatattcgagaaatagccagggtattaggagtaagagatagtcaaagaagaaatggggaagccagatcttgcagggccttgcaggttctaatatggacattggctttaattcttacagagatggaaagtcattgaggcttttgaataaaggagtgacctgatctgacattttaacaggatcactctggtttccatgttgaataaactgaacaaggtaatggatgtagcaaagagaccaggcagaaagcaattgcaataatccggatgagataattgtggtttggaataaggtgttaacaacgggagataaacagtggccagattttatgtgaatcttccctttgatctgtggaccaatataacaagactggagagaacacacaatttcctccctggatatacatcatcactgttcatattttcttggagctcagtgtacacttctaatggcttcctttttataattgcagacaatgtacaataaaagggaaatttgattcacattcagtaagctctcagcttcttttgcttggattctgactgaccaatgagtgaaagaatctgaagaggagatttctgtacccagcagcgggtggaaatagatgaatgtgagcattctttctaattctgagattctgtgattctgtgatccttagtaactctggaaattgaatgttcaaagactgaaaagttatatatgatagtggcaccaattgtcacaataaattggaagcaaatactaatgatcatggatgtatttaaaatatttcacacctgtcctagcacagaccagtcagaacagatgccaactgtaaacagcaggcacagccatgcatcaggctgaatattagttgtgcttatgctcaggtacaaatcaaattatattttagctgacatggtctgacaaagttctacgtctgtttgaaccaagtcaagtgagcaagtgcagtgaacacagatgttttgcctaggtttgtgcctgatattttgagaaaaatattaaaaggggtataaaatacagttatgaccttctgagtgtttttaatctgtttcagaagacaacactttgcactcaaaacaaattaagaatgttgcaacatatgaggccataacaactattttacgggttcttggctcccagcagcttgcccctaacacggtaactgtgtctttcctgagatttcagagtagtgtaataatgaaagaagaacaagcttacttgcaagatattaggaattgttgacttcatgatgcttgctggcatcttaagaacagacatgcaatgtctcaagccagcgttcaacacactaacttaggcaacagccgtataaggcaatatatcttttccatattcatgatccctccctcctaccctggtttgggtgcttcccagcactataagaaccaacaatcataagccaaagtatatctggagagtgggagaagcagtcctgcaaatgcagccttttcacacgcttcaccccccgtttatgattggcttcaggaaaatctgtgttgtatggcatctgatcaagtatggtcaaggtctgcctatgcatcatctattcagcatgtaacacagttagctgggtagagggtgtgactaccgtccagaatcaacacaccaggcttatataacaaatatggagagtttgcagaattttagtttatttgacctgttgaacccccgtcattaagaagaatctagaggaagaagagaatgatcacagctttatccagaaggaacacagaatttccaaagttagctaactacagattctgtcccttaagctggatgcccattatagctcagccaaatgccttttttagtatcctcctctttaagcctgcctcactaagctggttaagtgccagaatatgtggaactgaccatgcacttcttctgcattaaatatttcggagctggtaaatttagaacaacctaaagagtcatgttatgtctctctctactgcttatcaaattggcataagggttagagacttaaaactgggggctggattttcccagagggctgaattatttaaccgtcagcaattttgaggttcacagtaaagtagcaataatgaaatcatctgcttctagatgtaaaagcatcttctcggaaggccagaaggagtttgcagctttttctatctgttgggtgttctgggctctgcctaatacacactgtttatctgacctgaaatatgagacgattctgccataggagaataaattccatataaatttaaaagggagggtctgcatgtgctgatggctccttataaggggatagtttgtcaaatttggtacatattcctctccttttttaatttttaatttttgtaggtatattgtaggtgtatatatacagagcacatgagatattttgatacaggcatgcaatgcataataatcatatcaaggtaaatggaatatccatcacctcaaacatttatcacttctttgtgtcacaaacattccaattatactcttttagttatttttacatgttcaataaattattgttgactgtagtcactctgctgtgctgtcaaaagctagatcctattcattctatctaattatattttttgtacccattaactgtcatcacttcccactgcccccaccacccttcccaactctggtaaccatcattctaccttctatctctatgaggttcgattgttttaatttttagctcccacaaataagcgagagcatgcgaagtttgtctttctgtgcctggcttatttcacttaacaatggcctcaatgatccagttttctcatctgtaaaatgggcacaataatggcaaggacatgttcctaactgggtttttgtgatgcggaattcagtcagaagagggactggctcaaagtaagtgctcagggaatgttaactattcttcttcttctttttttttttttttttttttaattttcagtgttctctgggtatgttaactatttttatttgctcatggtgaaacgaagagagctgacaagaaaatttccaccaacgaactttttatgtcctttttaaaaattgtcaaagttctattgaaatacatggggagcttaaataaaattaatgaatcatacatcagagtaacaagagtaataatcattgtatttttaaaacagtcaattagaaatgaagaaaaccttttactccaacaaaggaactgacatatttttgaaagcgtgctatatgtcaggcatttgtaatggcattgacatcatatttagtcttcccttcaccctggcactactatcagcatgtaataaagaaactaaagctctagttaacagaagctctagtggaaagcaggatgaaaactcaagtctgacacccctgaaactcctcctcttccactaactccaaataccaccacattcttcgttcttccttatgccaggcctcaattttctttctgtggtgttgaagcaccttctctctgtgctcctctcttctttgctcagcagaacggctttctgatactgctcctgaacacatggggtttcctggataaggtggatttcatgggaactgctgcaggatgtggcagcttcatgtgggtttttgtccaactttagtcaaatagcaagcctcttatgtccagtagtcaatggctaatgactctggttgtagctgttaaataaacaacagtgaaaacatttcaaaagttacagagaatcagtcagagcataaatggtaaaattgtgactgaatggatagtgtacctgcgtgtgtgtgtacctgcgtgtgtgttgggggagggggttgtccttgaagctgtctctgcattcttatgaagttccagtaataaacatttgtattcacctggcttattcaacatgctgctgcaattactttaagatatttcacgctgtttggaagagggggatttatacctgggagtcagggggaagactgaagtttactggaggtgtggagcagggaattcccagttggaagctgtttgatagcccagacttgagaatagaacagatccaggttcaaatccttgcactgcttttaaataactgtatgaccttggacagcttacttaaccccttaagccttgtttcttcctgtgtaacaggaaaataaccatatcaatgttacaagattctctgtgatgatcaatgaagtaatgagaatcaagtacatggcacataaattagatagtgcctagtgaacagtgattattaatgtgcactaatttattattattattttaaatttcaacttttattttagatgcagggggtgcatgtgcaggtttgttacctgggtatattgtgtgatactgaggtttggtgtacagttgatcccatcacccaagtactgaacataatacacaatggttagtttttcaacccctgcaccctctttctccctcctctttctggtagtcctcagtgtcagttacggccgtctatatgtccatgagcacccaatgtttagctcccatttgtaagcgagaacatgcagtatttggttttctgttcatgcattaatttgcttaggataatgatctccagctgcatccatgttgctgcaaaggacatgattttgttctttttttggctgcatagtattccatggcatatatgtggcacattttctttatccagtccaccattgatggacatctaggttgatttcatgtgtttgctattgtgaatagtgctgtgatgaacatatatgagtgcatgggtctttttggtagaataatttatttccttttgaatatatacccagtaatggggattgctgggttgaatggtagttctcttttaagttctttgagaaatctccaaacttctttccattgtggctatactaatttacattcccaccaacagtttataagcattcccttttctctacagctcaccaacatctattgtgttttgactttttaataatagccattctgactgctgtgagatggtatgtcattgtggtcttgattttcatttctctgataattagtgatgttgaacatttttttcatgtttgttagctgcttgtatgtcttttaagaagtgtgtgtgttcatgtcttttgcatctgtatttttctgtttttgttgggcctttttaaaatgagattatttgtttttggcttgttcaattgtttagctttctcatagattccagatattagacctttggtggatgcataagttgtgaatattttctccctttctgtaggttgtctgtttactctgttgttagttgttttgctgtgcagaagctcttaagtttcattaggttccgcttgtcaattccacttgcttttgaggacttagtaatagattctttcccaaggccaagccaatgtacaaaacagtgtttcctgggttttcttctaggatttttttttttttttttgagacggagtctccctctttccccaggctggagtgcagtggtgcgaccttggctcactgcaacctccacctcccaggttcaagagattctcctgcctgcctcagcctcccgagtagctgggactagaagtgtgtgccactatgccaagctaatttttgtatttttagtagagacagggtttcaccatgttggccaggatggtctcgatctcctgacctgatgatccgcctatctcgacctcccaaagtgctggaattaaaggtgtgagccactgcccctgaccctcttctaggattcttatagtgtgaggtattacactgaaatctttaattcagcttgagtttttgtatatcatgaaagacaggggcccagttttactgtggctagccagctatcctagcaccatgtattaaatagggaatcctttccctattacttgtttttgttgactctgctgaagatcagatgattgtaggtgtgcagctttatttctgggttctttactctgttccattggtctatatctgctttgtacccatactatgctgttttagttactatagccttatagcatagtttgaagttgggtaatgtgattcctctggctttgttctttttgcttaggattgtttttgctattcaggctcttttgtggttgcatatgaattttagaatagttttttctagttctgtaaaaaatgacatttgtagcttgataggaatagcattgaatctgtagattgctctgggcagaatgaccattttaacaatattgattcttccagtccgtgagcatggaatgctttttcatttgtttgtgtcctctatgatttatttcagcagtagttcgtagttctccttgtagaaatctttcagttccttgattggatgcattcctgttgtgggaagtcagggaccctgaacggagggaccggctggagctgaagaagaggaacataaattatgaagatttcatggacatttatcagttcccaaataatacttttataatttcttatgcctatctttactttaatctcttaatcctgttatcttcataagctgaggatgtacgtcacctcaggaccactgtgataattgtgttaactgtacaaattgattgtaaaacatgtgtgttcaaacagtatgaaatcagtgcaccttgaaaaagaacagaataacagcgatttttagggaacaagggaagacaatcataaggtctgacagcctgcacgtgcatgcaaaaagagccatatttttcttcttgcagagagactataaatgaacgtgcaagtagggaagtatcactaaattcttttcctcacaaagactattgatattaatactctgggaaaggaattcattcctggggggaggtctataaacggccgctctgggaatgtctgtcctgtgtggttgagataaggactgagatacgccctggtcttctgcagtaccctcaggcttactaggattggggaactccatcctggtaaatttttggtcagaccagttctctgctctcgaaccctgttttctgttaagatgtttatcaagacaatacgtgcaccactgagcatagacccttatcaggagttctgccttttgccctttgtcctgtttcctcagaagcatgtgatctttgttctgctttttgccctttgaggcatgtgatctttgtgacctactccctgttcagacaccccctccccttttgaaatctttaataaaaacctgctggttttgaggctcaggtgggcatcacagtcctactgatatgtgatgtcacccccagcacccccagctgtaaaattcctctctttgtactctttctctttatttctcagccggccaacacttatggaaaatagaatctatgttgaaatattgggggcaggttcccccaatacatccctagatattttactttatttttttgttgatattgtaaatggaattgtgtacttgatttggctctcagcttgaacattattggtgtacagaaatgctactgatttttgtgcattgattttgtatcctaaaactttactgaagtgattaatcagttccaggaaccttttggcagagtctttaatgttttctaggcatagaatgatactgtcagcaaagagatataatttaacttcttattttcctatttggatgcctttgatttctttctcttgtccgactgctctggctaggacttccagcactatattgaataggagtggtgagagtggacatcatgtcttgttccagttttcaaggggaatgcttccaacttttacctattcagtatgatgttgcctatagatttgtcatagaaggtcttattattttgagatatgttcctttgatgcctagtttcctgtgggtttttatcatgaggggatgttaaattttattgaaagcttttcctgtgtttattgagatggtcatatggtttttgttaattctatttatagagagaatcacatttattgattttcatatgttgaaccaacgttgcctcctaggaaagaagcttacttgatcatagtaaattgactttttgtgtgctgctggatttggtttgctagtattttgatgaggatttttgcatttatcttaatcagggatattgacctgtatttttctgtgttttttttttttttgggcctttgtgcactaatttaattagaagtgccagatactcataaacagcaacgttttcctgggtcccacagtggtatcatagatcttttccttaacaagtatctattgaaactttgctgtttagaaacagttgcatacacactgtggcagcaacttgtacatgcctgagagtggacacttcttatcagcgttaattcaactacacttcacagctctgagaggatgtgtaatcatcaacatagaatttgatggataaggtggtagaaggatttgcttagttggatccttctcattttttaggttttgcacaaataccacctcctgggaaggagcttccctgaccatgatgtctcaaatacccctcaccttacccatgacccagccagctgtaatctgtcctctttagtattatttatttgcctactaattttttacttcttaaataatagactttatgttttgagccattttaagttctcaggaaaattgagcagaaagttcctatatatcctctccctctcaccacatacacaatctccccactatcaacatcttaagccagaataagacatttgttagaattgaattggtgaacctacattgacacatcattatcatccaaagtccatagtttacattagggttctctctaggtgttgtacattctatcagtttaaacaaatgtttaatgacatgtatccacctttatagtaactaacatgcagcatacagtcagccctccatattcatgggtgctacatctgtggattcaaccaactgtgaaacaaaaatacttaaaaaaaatggacagttgtgtctatactgaatatgtacagacttcttttgttttccttattccctgaaaaatattgtataacaactatttacatagtatttgcattgtagtaggtattataaagaatctagagatgatctaaagtacatgggagaatgtttactggtgatatgcaaatactacaccattgtatgtggattttggtatccacaggggttctggaaccagtcccccaggaatactgctggatgactgtagtttcactgtgtttaaagtcctctgtgctttgccgattgatctccccatcttcactaacccctagcaaccagtgactttttttttcttttctaagctgacctataataattgtacatatctgtgggggtacattgtgattttgcaatacatgtaatgtatatgatcagagaagggtaattaagatatccattatctcaaacatttatcattttcttgtgttgggaacattcaatatcctccttgtagctatttgaaactacatattattattaactataatcacactacagtggtatggaacactagaacttactcttcctatctagctgtaatttttatgttttaacagatctctccctatttcccctgtaccctactcttcccagcctatagtattctctgttctacttttaacttctatgagatcaactttttcagcttctacatatgattgagaactttaactttctattcctggcttatttcatttaatgtaatgccctccacttccatccatgttgctgtgaatgacagattttattcttttttatggctgaatggtatttcgttgtgtatttatatcatatgttctttatccattcatcagttgttggacacctagattgactccatattttggctattgtgaatagtactgccataaacatggggtgcagatgtctctttgatattgctaatttcccttccttgggatagatgctcagtagtaggattactgggtcgtacagtagttctatttgtagttttttgaggaacctccatactgttttccatagcggtgttatgagtttacattttcatcaacagcatataagagtaaccttttttctgcatccctgccagcatttgttattttctgtatttttgattacagccattataattggggtgaggtgatacttcattgtggttttgatttgcatttccctgttgattagtgatgttgagcatttttttcatgtatttcttggccatttgcatatcttcttttgaaaaatgtcttttcagttcatttgcccatttttaaattgaattgtttgttttttgctgttgagatgtttgagtttcttgtatattctggacattaatcttctgttgtatgaatagtttgcaaatattttatttcattttataggttgccttttcactttgttggttatttaatactacccaaagcaatctacagattcagtgaaatctctatcaaaataccgatgatattcttcacaggattttttttaatcataaaatttgtatggaaccacaaaagaccccaaatagccaaaacgattctgagcaaaacaaacaaagctgaaggcatcacactaccagacttcaaaatatattacaaagctgtagtaactaaaatagcatgatgttgttataaaaacagacacatagaccaatggaacagatgacagggtccagaaattaatccacatatctacagccaacatttaatttttgacaaaggcgccaggaacagtcattgtgggaaggacaatttcttcaataattagtgctgggaaaacaggataactatatgcagaagaatggaactaggtccctgcttctcttcctacacaaaaatcaactcaaaatgaatcaaagactgaaatataagacctgaaactgtaaaactactagaagaaaacatagagaaaacaattcaggacactggcacaggaaaggattttatgaataagacctcaaaatccaggtaacaaaagtaaatataaacaaatgggattgtatcagactagccactaactttactatctccacactttttttctctataatgtcatatagttggatactttatttttaaaacatatatatcactatttgtattatttacatgttttattatttatttttttctccctctagaatgacagctgcatgaaagcacagtcattctcttactttttaaatgtcgtatcctcagtgctagactatgattgtctcagaaaagtcctcaataaatatttattagttaataaatgagtaaatcttccctccattataattactctcatccttctgctaacattagaaactggtcgttggaaatacttacatagtggcaataacaatattggttgtcatttttattatcttatagatgccaggcactgtggtatacattctaagtgcattattttattcaattctcagaactaccttctgaggtaggtaacatttaacaggtaatataggtagtatataagtagtcgagatattttttaggtacaaaaatgagattcagagaagttaacttactgaagatcacatatttagtaaattgcaaagttaaggcctaaattcaggactgtaggattccaaaggtaacagtctttattattattattattattattattattatacttcaagttctggggtacgtgtgcagaatgtacaagtttgttacataggtatacacgtgccatggtggtttgctgcacccatcaacctgtgatctacattaggtatttcttctaatgctatccatctcctagtcccccaccccctacaggctccggtgtgtgatattcccctccctgtgtccatgtgttctcattgttcaactcccacttagagtgagaatatgtggtgtttggttttctgttcttgtgttagcttgctgagaatgatggttttcaacttcatccatgtccctgcaaaggatataaactcatccttttttatggctgcatagtattccatggtgtatatgtgccacgttttctttgtccagtctatcattgatgggcatttgggttggttccaagtcttcttaaactgtatgttggaatttagagtgagaggaaagtgtatagctaatccactccactctttggatttgaaatacggttgcttaatctaagtgccttgatatttaactctagtccatttaataattacacatctactatttgctgtgccatgtgctctagggttatcacctgacttttcttagaaatgcagacttttagctgtactccaggcctactgatgcagaacctgcatttaaacaaaatctccagcagctttgtatacatgagatatgtgtgtttgagaaacactgccctctaaggaatatcaagacccaaaactcccatgtccttgactagtgagcaaacaaggatcttagcttttagaataccttgcactttaggaggggtcatagttactcatgcttatcacacttgctagcactaatacacacccagaattattataaattatacaagcaatgaactatcagccagctagtaaggcagatagtgttgctgagggtgaacaagccagcctctagcccctcgacagtataaaatattcttttccaataatgcatagacaatgcaatttctttttctcttgctgtgattcactggtggcgtgggcatttggtgtcatgttagcttttctaactgtagttgtgtagagttctgttataccagttagactgtagtacatctgcaattatgcagtaatgtgcattgccaggaagggctgatattttactacaaatcacagaagagctactgcatgtccaccagggaagttgtgggtggtcaatcttagcacatcttgaggctgctgtgttcttacaatagggaacaaagtgttgactgttttctaacatctctggtccaaacaaacccaaccttcgttacccactttacagtttatgagcatttatttacacaagggaaaatgaattttgatactccaggtatgccatctatcccagcctgtctgcatcaaaatgccagattgtcatctccagtttaggccccctctttttctgctgtaagttgtatttcagtctgaggatgaattcagcactttaatcagtgcatttgttttctgctttgtcatccacgtaactggcaagtctggccagggcactgtttgcagatgaaatctgcctgtgtctggaatgcagagtggccagtttctccgacttttcttctctttctcagtcaacacagccactctttccatttgttcccagttctatgcagactataattatgtatatttcctttcatgccacttacacttgtacatttctgcactagggtgaatgcaattattccattttctccttttttcccctttgtggctcaaactgttgccttgttctttctcattgattcctgcactgcaaaacagtcaaatggaaatacaatatgttgcacctgacattcatttaaatcacctgccatgatggtaatacatgctggtgatttcttagtgtactagtcaatggaaaactgtattagtattgcaataatatgcctatatttgctttttctggaatatactgtggtttggtgcgtgaacgattcaatagaattttgaggatgtagtgggaatgagtaataacacttcactcaatatgttctttaatgttcaaatcctaacagtcctagcacatccttttgcccttccaataagttagggtaggaattaactcttattgtgcactctcactactcaaggccctggactaggtactctgtatgtacattcttagtttcacatatatttttgcgtaatccttattagagattaaaattttaacatatacatatactttattttacaggcaagggacttaacattcatagaattaaggtgaattttttcaaggtatcatagctggtcaatgacagaatgaagatttgtttgactccagcatttatccactttctacacactatcttcctctttgcaaagttttaaattccagaaagtttagcagcctccttgctatctgatgctgattaattgggtggaatagagtctattttttaaatctcactcaaagtattcactgcaaagctgccgtgtgtaaataattgtgtgtgtgtaaaatagatgctttctgtaatttgtgagtaatgtattatgggtccaattgcattttaagaatcttttagcttatcctaaatcctcatggcatttttaatctagttttcattgtgtgtcagtaaataatcctggtgagcaagactaaagatcaagtgctagccctggctttgccatatatttgctttgtatcctagggaaagacatgtcaagcctctaaaacttagcttatttatctgtaaagtagagtaatacacataccctattcacctcacaggattgttgtatatgttgaatgagataatgaatatgaaaagcttaggaaaccacagtcatacatagaaatgtatcattgtaagtcaataggtgtttgccaggtccatagcattagcctacgttagacactgcactgaggaggctactaggatttctttgccttcaaagaagttaaaatgtagacaaacaaaaaaagtagtcattgaacagtcttgacgtttcaataaatttacaaaaattactcattgttttcaatatcatcagcagttaattctcaagtagagtaggcatcatgagaaatgctattatctaatatgttgtaattcacattttaagagtatattatattatattatattatattatattatattatattatattatatttttgagtcagggtctggctgtgtcaccaggctggagtacagtggtacaatatcggctaactgcaacccccgcctccctggctcaagccatcctcccacctcagcctcccaagtagctgggactacaggcgtgcaccaccatacctagctaatttttatatttttggtagaaacagggtttcaccatgttggtcaggctggtcttgaactttagctcaagtaatccacccacctcagcctcccaaagtactgggattataggtgtgagccactgtgcttggctttcaaagttttttaaaaataagtcttactttactatgtcttgcattcaacttgtcaaattgttacagtgaaaaatgccttctaatctaccaagaccaagttcaaagcctaccacttactacaacaatgattttccaagtgtggtccctgcactagcaacatcagcatcatctgagaaattgttagaaatgcgaattcttgagtctcaccccaggcctactgagtcagatactctggggtgtagcccagcaatctgtgttttaataagccctcctggagattttcatacatgttcaagagtaagaaccactgctctactaaaacctcaaggtataagtcagacgttaagaactcaaaggctcaccgaggccaagaaggacacatgaatgagggaaaggactggaaataagattatcaggagtgggaggaggaaactgtgttgaattggagagctgcccttgcttaatgggagcagctagtgattattctagacattggttcccatttaggaatgtgaagcaggtccaaatataattttccaaaagctgaaagaaagcatgactgtcttacaaatatacagtgaacgtgtcaaagattaatttaactcataataagaatttagtaagatgacagctggttcaaaggagaaaatgagaggctggaatatttatacagtcaacagaaataagaatactgagagaaaataaagttagttaaaaaattggttaataccctacaaggaaacaaaactgttacctatggagttatttattctattgtacaaaaataatttacaatcactcaatcttctacaagttggcatctaactttatagacttttaactctaatcagtagtacacagtaaatgtaacaatattgcatcactagagtctagggcctagacaattgtatgagtcttaggcaggtatcttagtccattttctattgctgtaacagaatatcacagattcggcaatttataaacaaatttatttcttacagttctggagactgggaagtctaagactgaggggttgcgtctggtgagaaccttcttacggcatcataacatggcagaaaatatcacatggtgaaaggacgagagcatgtcagctcaggactctcttgctcttcttataaaaccaccaatcccatcatgggggcccaactctgtttaggatcagaccttatctgatcctaattatctcacaaaggcctcatctccaaaagccatcaacgtatgaatttggggattacgtttccaacacatgaaacttgggggacatatccaaaccatagcagcagattttttagacaatattctattatgactgaatgagcatgctgtagtccctttgtctcatttttgtcttatttccaaggcctgggtgattttttcttaacaagcaagtgtggcagaccttctacttttaaaggaaaatggagatcaagatttatatgtgaaattttttctttaacaaatataggctaaataaagtgtgcttgaggactggcaactgtggattgccaccttgcaaaccaggtaaaaccattattgagtgaatgtgtggactctaaaactagcccattcatcatgtgatgacactcattctattcattttatccattgtgtccagttatgcaccccgtgtttcactatcaaagcctgttatccaacttttgaaaataggcagtctcctgttcaaatgtccttaccagacatttcaagccccagctccactacgttctttggaaaattttagcagatttgctctttttgcataactttactctaaccgacaagctgcttaccctcttaatatttaagcaattcaaggcaagactaagaatgaaagtgtctagacaaagtaagaccaaaaccatttaaatccttattacaatattctcaggcagagtaatgcaatttgaggatttttataaaaagaggaattttttttcctggtttttcctttgttccagagccttctaccgtttgagccagtatctttcaagcctcagagggagggcagaagcaacccagaacaaagaaatcaatgcctagctttgaattgaaaaatgaacttttaaaagtgcaccgcagaaaaaataattttgaaacccaatgcaggcttcttgtgagattgtttttcggttcgtttgtttgtttagttccaaagattgactttgctaataaagattcaaagtttggtgaactcccaatttagagtttgttcattcattcattcactcatcctacaaacatttattgagtatctgtaaagtgccaggcactgggtattcagtagcaaacaaaataatgtgttctcatggagtttatgttccaatgggtggaaatgagcatatatcagcaaataaacaaatagtatgtcaggtgataataagtgctgtggggaagaagaggcagagagaaggagaagagggtcacagagggcatagggttgctattctacgtatgatcatgagggaagagggtcacgcaggtgcatggcagttgaccagacctgaaggcagtcaggaaaaagatatctggagtctaagcaatggggacagcttgtgcagaggcctgaggcaaaagagcagagtgttagagaggaggcaggaagggcagataatatagggcttcctgggtcaatatcagagctttggattttattaagaatgaaggggaaaccaatgaaggattttgcggaacagaagaatgatgctatgttacttgcattttaaagggatcacatggctgctgttctgaatataggttctagagaatcaaaagaggaagcagatggaccagtgaggaggcaatcacagtagtacaggtggaggatgatggtggctcagaccattattgtaatggcaggcaggtgaggaattatcagcttctgtatgtatttatcatagtcagtcagaaacgtgtgacatcaaagcagacaattttgtgcctaatgggcaggaaatagcactagaggagctatgagtcgagctgaggtgtactgagtctccatgaaatgctcaacccctcttccctttgcttgataccaagctctggagataaagagaagatggagacccttggagaaatttgagggaattctggaaagtggttttgtttttgttttgtttttttctgcaaggacaactatgccctgtgaagtatcctgcatcctgcatgatattatgatggtagaggagcaacaactgggcgaggagcttgggaagatggacaagagtgttgcttctcaaattcctatgcatcccgcatggtgaacaactaaaagtttcccataaccctaagaaagaaacaacgataggaggggaaaaaaccagcagaaaagaaggatctgtgactaggatcaggaggacacagtttgcaaataccactttaccaggacccgtgaaagggccagagatgctggtggcagtagacaaataagattggattccaatacctagaaccaggtagtctgaaatgtgctacagtgtacaccagcaaagacaggggcaaataacgaagacataatctcttctcccaaaaaggagggtttatcccaacagagctttgtaaaatgtgtgcaatcttcatcaacaagacaatactgataaaacaacttcagacaaaatgtctgtttactctatcaggcccgagttgaatggggagcaattataattctagaattttgaactaggtaaaagtatccaggtatacagggctacttgtcctaatagagatttttttttccccctgcctaacctatttgtattgcctacacagcctgtagcaaaacagagtagcaagagtagtcacttataagtagtttttcttataatttttttttctggttaaaccactgagattatgtactgtggcaaaaaaagaaaaaaaatgcttagcttccaattttatttgtggtaggaataatctagtcccagctttccctctacccatacccttccacccatccttccccaaagtcttcagattctccatctataacgtgaagggcttgtgcagaaaataattacagttcctttaattctaaacatggtggactttctattgccacgtaagcatttccaactataccatcccctttcctgtcactcacctcagtgtctggcacaatgccttgcttatgttgggtactaaatatctttttgccttatgagtaaatgatgcatgagaaagaagacttcagcctgagcccactgtagggccttgttgaggtaaagggcttgatgggccttggcctgaactccattggaaccagattataaataagccacaaccagcttatttcctgtctctttttcctcagtgccaccacttagctactttctggtttagtcctttaggaaaaacaataagcacctttctcatttcttctcttttccttcactggcagctgttttaaggcattaaaactgggagccgagcatgtccagaagtgaaagattctctcatgatgacaaattgagtctctatttttaaaaaatgtatgtaagagtgctccaactggtcatcaaaagggctaattagaaacttccaatccccaggagcactcaagtagaagacggatagaagacacttcttagagcaacactgctgctttggtccgactgtgcctatgaaggaactgggttttgcctggtctccatagataccgccttcttcactgactttatcttagactcacactacttgtttccaatacgagatagcaaagcatatgaatagaaaatgaagagaggtgacctgattggactgaggaaggcaaggccccttgaggagacagacagtttggtgttttgttagaaagtgatatgcatgggaggaagagggagagagagaactattcagagaactgtgtgagcaagggggagcagaacaaggtttatgtcaagaacagcaagctatcaggtcatcactgtggctggagctgtttttttgtttgttttattgggacagaaacttaagttgatggtgccacttttgagaggtttaaaatctaaggccaagaagtctgtatttcacaaaatccataattcaagaaaatgtggcaaggtccatgtgattatctgctagatgtgtggtacagagaggagtggaacatgagtaattgtgatccaaacctccatctttggccttgaagcaaaaggaagtcattcgttttaaagatggatgtagaaataatttctgttgataatttttgggcagcacttgacttctatggggtttttgattcagaataaatacttacctacataatttcatttatttgttctgctgaaaaatattgttttcctgctaaaaagaaaaaccttcaagtgttcataaacctttctgattatctgcagttctactgatatgttcacaaaaaaatagggataaatgaattcgaaatgtaggaatttaatttcctgagaactatgtatgttttctgaatgaattaactatctataaagtatgacaatgtgcaatgcagtttaggctttacaaatttttttcatggtttgaaatttttctctttatctgtgttctgattttatatatttccctggttccatacatatactggttctagaatgaatcactatggtgtctagttttacactcattaatgcatgaatttgatatctgaagcctgagttttaggttaaatatggtggtagggtggaaagagcaaaggactttgagagagaagaaccaaggttgggatccccattctaccacttcagagtccagtggcccttgagcaattaaaaaaaatctcccaagatcatttttttctcatctgtgtagtagtaaaaacaataccaacctccatcttggtagagaaggaagataagagtttctctcacaggtgctgaacaatcactattcttccctcttctttttccataaaatatattacttgcttgcatagtctttctcctaaaaattgtcattttctctgaaaagtcctcctaccgtgtgaccttaagaaagtgatttgtgtcctccgagcatcagtcactctttatgtaaagtgagggactaaaggagattgccaggggaccttacttcgattagtgtcattcagtgagtttgggggatttcatctacttcttgactccactcttccttgactgtccatttcctccctccatcccatgaatcctatagggtttcagtgtgacttacataatgggtgttctatatcagacatcctggacttgctgatgagatttaagcctagaaataagttgatagaatttgatgagacctactcatggagcaggcagtgtttttcctcttgttagctaactttcttttccattccaaaacattgtgatttgcaagtctttaagaattttatatcttctgacaatttagcacaacctgctcgtataaaatggtgttatacaatccagtagcagttgttttctttttttaaaaaattttaggacttttttttttttttgagatggagtctcactctgtcaccaggctggagggcagtggtgcaatctcggcttcctgcaaacttcgcctcctgggttcaagtgattctcctgcctcagcctcccgagtagctgggactgcaggtgcgcaccaccacacccagctattttttgtgtttttagtagagatggggtttcactatgttggccaggatggtctccatctcttgaccttgtgatccacctgcctcggactgccaaagtgctgggattacaggcgtgagccaccacgccttaaaaataagcttaaaataagctaataaagtgtgaaattcttgaccatgctgatacagtttctagcgacctctgtcacacacatccctattagtctcagcacttgagtattctgttatggagctcaagaagtggtcacaaatacatacaacaggtaataaggtaagatgataatatgtttcattcttttactctctagaacaaacattataattactaatttacctctcacctaaagaaaaatcccaggaattccagcgtgctttaatgtagtggaaagtgaactcaaataagaagacctgggtataaatactgtctcccagtttctagctgtatagccttggtgagttaatttgagttaattttctgagctttaacatcttcatgtataaagtaggaataataaccctggtatcccaggatgttgcatggattaaaagagttgatatatgtaaaataacactgtaaagtctaaaacacaaaaattagcattattataaaataacttctttcttgttcctaacatcgttactattattgttttaattttatttaatttttttatccagatgctgaattctttaatatgccactgttttataaaagaatttctttcttgttcctaacatcattactgttttaattttatttaattttttatccag

SEQ ID NO: 2915 - DNA, 710 bp, Homo sapiens
aatcactaatgacctcatcttcaaatggtcagtgataataaacaagaaggagggatttccaagggagcagagcattaataaggttttatctactacaaaggatatcacttgggaaggaatttcttgaaactgctcccaagagagccattggaccatgtggtaaacaactcctagctgatggattattgggtaaagataaacctggatgatcccatgctcagaaagtttcctgattataatgaataagatgtagcagtggcatgcccaatattccatagtatgctatgcacaaatatacatcacctttgtttttgtggatggcaagctattaaacagaataggaaagaccagtgggttcctgatgggattagagcagtaggtaccacgtagtgattctgacttcctctgggaatagccccaccctgagttgaagaaggctatagcaggcctggtatacagaaactaaattatgtctacctgtatcttgtatggtggactcagcattttgggtacaaaatgtgtattttagttgcactcaggctgttagtacccaatggcaacaacatgaatggtagaacacagcactggcctgtgagacagaaacatgctttaggggagacatcttctagttgaggcttcattggatgagctgaatttgcttttagtgaggagtggcatttggagaaaaagacttattaactagaatgagc

SEQ ID NO: 2916 - DNA, 5560 bp, Homo sapiens
caggacggaaaggggcaggtgggcagggatagaaaagtgagtgctgagtagacgcttctctccttaccagaaccagtaaccaccctgctggctgctcctctaatttgccctggcacaaggacagaatgtgttctgctgatacacgtttctaaagcaccaagcagcctctgctgacagctggcttggttgctgtgtcaatgcagaaaaagtgagagagcaaaagaatttgctcacctgaattgcctcccagagaactgaaacaaggcacagatgttcactatagaaccaacatctggaatctttgaaaactaaagatgggaggaatgccaaaactccaaactaagcaaacattttcctggttatctaagaacagaaaggacagattctgtgaaccagagttcagtaagtttgatatacatgttttcagtattggttcttgaaaaaatttgtgatgccagcatatatcccaaaagaaaagtcatgataaaataaccccattaactttctttaacaaagatattagacagtggatagaaaactgacatagatacatcataatttaaattaaagaaggtaatgatacaaactcttttgacatgtttggaaaagtgtcaatggtgacataaattttttgcagtaaccaaactaatgggtacgtatcgatagattaataatctagagggaagccaagaccatgtgctgttgaccagtgagttgaaggaagacatggagacagcctcatcaagtgtgtagatgacactttgctggagggatatagcaaatacattacatctggatttaaaaagatctccaattaatggaatgaatgctatgatgaaatcaagagatgcaatttatcatacataaatataaaatcatgcttttaattttttaattgcaggatacaatagtccttttgtggaaatatttgatctgaaaaaagaccagacagttcagttgaccacagtatatgataaagctgtcaacaatgctaaaatgtactatccggttacatgagctgatacagtatctgaatccaggtattggtggaagggattatcatactaaaatttccaagtcagataacctgtggaaaagagtatcaatatacccactggaagagggacattgacaagctgaactttattcttaaaaggtcaaatgaatttttagacacccaaaatgtgttggctcatgagcatttagcctaaaggagaaaataataatttcactaattatctataaatatgtgatggcttattttatgaaaagctcattctgagtttgcaagacactaaccaaagaccacagtgagaaagtacagaaagtaccttaggtgaacacacaaagagcccgccctagtaaaaccatctcatcatgggacatcagtgtcccagaaactatccagacagaagggaggaggtcaagtggagatcctacaagaggattccttcatttagtgagaagttgcacaagcttttgttctaagatctccaccactttatacttccataattttatataatcaacagtatctagagacatccagctgtgtagttaacaagtactatttgttaacttgtattactcagacctcagttgtcttcttatactgtccaagcaaattaagaaaagctgaggtatagttgaattatttgggtaatagtagctataaaaactcaagtagaaaagggggtagtcacaacttcaaatttgcaataaaaaaacaagtttattgtgaacccacaaatggatctggctagtattgtattttagtaagaatcaagagtgaataataaaacagctctgaaagtgacgaaacaactgtaccatgtaatatagacagtcagaaataaactttgttcaaacaaaattctatttgagttccacatacgtggcttttcctattctgggtctcaaaatcctaccataatagacacatagaagcagcctagttcaaatatcaatttcattagattctgtacttctgggcattatgaaggaaggattagtagagtggttgagagcctggaattcattaacttcagcataagtacatactgcaatctccaagggagttctaacacattttccagtcatcctcatataagggaccagtagaagtctttagcgagaataattaagggaatatttcagaagcatttctgttgtatacaaggctggtgatcctcttccgtgtgtctgtgcaattcttgtcctctgttggtctctattgcggtaatatttccttctttcaagagccttattattataagaggaacttttaccctgttacatgcataaagttaaatttacatacaaattactacatatcaactagtcacaaagcacaaagtgttgaaaaaaacttttgtaagcagtctttgcttacctctcaaatgctttgcaaaatgtctatgcctttttttttttttttttttttttttgagatggagtctcgctctgtcgcccaggctggagtgcagtggagctatcttggctcactgcaagctccgcctcccgggttcacgccattctcctgcctcagcctcccgagtagctgggaccacgggcacctgccaccacacccagctaatctttgtatttttagtggagacagggtttcaccatgttagccaggatggtctcgatctcctgacctcgtcgtgatccacccaccttggcctcccaaagtgctggggttacaggtgtgagccaccacacccggccgtctatgctttcttatattattaatttttaccttgaagttgcttttctatagtttgttcactgatacagccctgctgcctaacataggggccctttgttccccttgatcaatattctgttctccttggattttgcatgaattcatcctgctgttcatccctgttctaagcatggatatattctattcccttcaatgtgaagagaaatctcctgattgggggctgcattagagaggaaaggagacctccaatagaccaactcggagactacatgataccctatattacccattacccatcaattgccctcctggatggtggtggctcaatgtattgcttggtttggttttcctttatttcatgccccctgttctatgtactaagcaagcatgaaaataaaaggtataaacagaaaaatacttagagaaaaaatttaaattttttccatactatatcataggtaatatggtcctacacatctaagatattatatcaagtggctagttagcattttcacagggaaactccatttcactaagtttgacagttgctttgacctgaaaatcacttccccttgaaaactactgaacttttctcctggccatgatcagagacctctagtcatgcatcttctgtactttccctattatcactgtagccccaacaggctcagtgtccttgatgagttggtgaaaggggtacagaaataagaggtcccatttctcctgccaggctactttatgagcagacattatgcctcaatcttttgtgccttaggatctgttttctcataaagtaagtgtagtttatttaccatactcaagctctatgcagctacagtttgagttaaatagggtttagaagactgtcatgacaacgtacatagcatttataatgttatttctacaggggaatgtacccttcacttcaaagaattgatttacaaataattttttaatacataattatttgcaaattgatgagttgtacttacagtcttcaaaattatacgtacaccacagacatgctatggtatgtatttttcctatcagagagaactagaaagtatctttcccatttgagtgtaactaatatctaatttttttttttttgacagagtttcattcttgtttccctggctggagtgcaatggcacaatcttggctcactgcaacctctgcctcccaggttcaagtgattctcctgcctcagcctcccgagtagctgggattacagccatgggccaccacgcctggctaatttttgtatttttagtagagacggggtttcaccatgtatgtcaggttggtctcaaactcctatacctcaggtgatctgcccgcctcagcctctcaaagtgctgggattacaggagcgagccatcgcacccagccctaaatatttttaataacactaacttaagtccacatgatctgtaacagtaaagtatcaggtattgtatacatgttggtttattttcttcaacttgtcttgactcacacaccattttcacaccttgctgaaagtgttgggtgtcaataaagcaagatacaaatagatttgattcatgaatgtttgagctcaaggaacagacacctcctggcacctgtccataggtgggacaggtgatctattgcttctctgcaatagtctgtctgactgcaaaaaatatatgattgttgaaaaggtagctacttgtccaccttgaatgggaaaccttgctgacttcgatttcaggtcacaaaaattgttcggggttctactttttctgagatttgcagagcgctgcctaaagagcatgacttggcacaaagctcctttatttcagatttcatagatttgctgtattcagtatcaaaatatgctgtgtaggtagccaggaatattgcacgttatgtttatattctagttttgaccaatttttctaaacgacatcatctaaacttgccagttggcctaatgagagttaagagaggagaatctaaggaatgtggctttcctcaaaacaaactgaaaggtgaagtcacaaagcacacagtgttgaaaaaccttttgtaaactaataacaacagctgcttaataaatggcttttgctgggatggaggagggagtgcctgcctgcatagctctgcacacaggcaagtccatctcatgttaagtcagaggaaattcaacaatgttatctaaaacatacaaagggcataaactgatataactttaaatcaactgtgtaaatattcttaagtagatattaaaaaaatgttttcttttgtctaaactatgaaatatggaattgggtagctttcccatttccttttagattgtttaggactcacactacttctatttcctgttttttttccttctaatatgaactgtagaaatacaagcataaatttaaaaaaagaagaaaaataggctctggtctaactcaacgtgtattatgacttagccaaaatcacgtatacgtgatgaaaattaacaagaggtttccatctcaggaggaacatggtgtttcttttgactttgcattatgtaacatgataaaaggactccattttcctaaccttttctggccatttcaaaccacatttactagctaatattagttactgcttgtttcagttttttcttacatgtgaaagtataaaagcctccaggaagttaatattaaagttagatgctcaaatatacattgatagaacagaattttggaaacaacttgattaaagtacaatcatatacattaaaatttaatgagaattcaaacagaaaaaaatgtaagttgtactgatgaaaattataattgtagtgttaggtagaaattcatt

SEQ ID NO: 2917 - DNA, 2205 bp, Homo sapiens
gttttgggaccagggagggagttttgaccccttcagctctatatggccaagagtggttatgcctgagacggtgggtgggcctgcccctgtggggcacatagctggggaagagaggaggtgtgggtgaggatggagccttcgagagctctcttttagacgccagcagaggaaacagttataagaagaggaaactcagaccatagttatgaatttagaatctgcatttggttttaataatttacacacagtgagtttcccaaagagatggagaagtcaactgtttggaaccaaaaagccaaagctggaaagaaccacagtgccctgagtcagttctgcatttgatggacagatggacgggtctcttgagtccactgaatttccatttcatcacagtcaccctcccggcggcgcctcccccagaagccgttcccaggggtggtgatgactcaggctacgccacacattcaccttaaccttcatgagaccacaatgctgcagatggctgtgggaaatagaaggtactgaacactcaacaaggaggcgtgcaatttagagtagttttcactcatctttagcatgagtgcttaaatggttgtaattagaagggatgacctaggacctgtgcggaaagtgtgacttaatattttaagtatttttgggagctattaaaacaagaaaagtgttctttactttgtcaaattttgcttttttcttttccttgatagaactcgatcaatgtcttagctattatataatctgtcattaaaactgtgaccttgggcaagttacctaactctccctgatttcattcatgaaatggagataatagtatttgtttcataaggttcttatgagaacaaagtgacgtgacatgtagaaagcccctttgtacatattggcagtaaagtgtagttgttatgagtaggaggaagaaaggggaacatgatggtgtttggtgtctttaaggaagagtgaaggaagggtaagaaggcacgggagcatacactggccacccatgggtggtgctcacacctggcagttggatgtttgggaccggagatgtacctaacttagataacttgttgtgtgctctacgctctagttgttttgttcgggtttcctgcaatcagacatagctggattgtaggatgtcatgaaaatggtgatagtaggaaggaaagtagttataatcctgtgttggattaaaaagatcatcaactttgggttatgaaaaatgtagtgccacgaaagtatgaaaatgttaaaacttagaaacataaaataacagtttatgaatgcaaagcttgggaaatgaattatgaaagtctactatgtttttaggagcataagacaaaatgaggaagacaaaacttaaggaaaacccatgaggggatccagctgaacaccggatcggtacacactaagaaaataactgaaactcatgtgagttcaaacgcaagtgttaatgctttttatcaagcaaaagatatcaggatgggtaacactttgcttcccaaactctgaacatcacaaagggagttggggaatggcctcaggatgtgtgttaggattatcaatccctgtgcccttttccctcccatctttctgaaatctaatccaagggttgtcacacttttggacttcacgttcaaagaacacttcaataaaatttgtgtggatcaccataggtcgccagcttttagttctggcaagcaagtgctttttaaaaaaatctgtcatctcttatcaccattactgcattaaaaaagaagacatttaacatgcacacatgcatatacctacacacacacacacacacacacacacacacacacacaaagaagagcataattaaagacaattttttgatcaagtaaagttatctttatgagaaattttctttgttgtcttatcttttcttcttttcattgtggactgttaaaataattgtccacacaagcacaaacacagacctacagaatctggccagaatttactaagtactggtccagctgttgtctacctgctcccaggtgaccagcccaggacagcttgggagacagaaatcctgccaccttcgctgctacaaacgcagggctgaaaagaccaaccctttttccggaccactttgtggcccaagccaagttatcaaaaggatctttgttgccaggggatgtttttttcttttctgagagtaggttgggt

SEQ ID NO: 2918 - DNA, 4874 bp, Homo sapiens
cctctcagttgctcctgcctgagcatgctcctcttttccatctgtgttgttttttaccccagcatactgttggaagggttgctcgaaggcatttgactgaagggtacttggaaagaccaaacccaaaccacagtagtgaccagatacttagtggcagccccagctgcagttatggcaagaagtggccaaggaggggaatcaccatgaccacagaggatgcagtgggcattagggacctggcatttgctgtcagaacaatccagtcagggtaacaggtggtgttgcaggagatgggtggagcacacagcagggatttggggaacaggagatccatggatatctacacatgctgacagctctcagcatcgggttatctggcagctcagagcagttgctttgcctggagtggttgggtactcagcctggctgaggcttgtctgggagaactttctctgtcattgttcatcttgatctgtgagaagctgtaggtgcccctaaggctcagtgggaagataaaaccccaacaagttggtctggaaaatcgaagaccagcaagtgggaggcagctgtatggaggccaatatgcagacaagggaagtaactcaggcattttgggggagaggtacagaaagaagagaaaagactgaactgactgctgttctgaacaagaactgtgactatatgtggtactcccagaatggtgaggtctgggacacttgaataatatggctatactgtgaatgatgttacctagacagaatgtttatcccagttaagtgataggtagggaactaaggtatcgagggtctcaggtataacgtcctgaggggtcccatgaaagcaaagataacaggtgtatcttttatgcctcttagagctgtacgaatgctgtaactcagggatctataaagccctaagtcaagcagaggcacaggtggaaaaaggggcaaatttgataacccagagaagaaagcctggtgatcaaagcaaggagacaaacctgaggctgccatcaggtgctgaatatgaagtgaggctgtcaagggacacaaggtattcagtagcggatggggtgtgcacagagaggaaggctggacaaatatctgaatcagggccatggcccagggctgatattttctgaaatgcctaaggcatgatatgtgagcaggccactatagttagagtgacacagacagagtgacagaatagaacaaacagcagaatcagtttagtgttgagtgtgttcatctggttagactaatttcctagtcacaaagataaaactgagaacatgtttttttcctctagccaagtggtcctttacaggcagattaaagacaccagctatagataaacatgaaagcagctttactgctacttcccttcgttttcagttctggtgggcaagtaaggagtctcccgctccaagagagagtaaaggtttagagctactcccagcagggttcagggcatgcttatggcagagaggagacttgccttcccagcctcctgcaggccctaggatgccctgggtctagccagagaaggacaacagtgagtcagcaagttagaatgggtttaacagtaacagccgggtggagttcacgttctgtttcctcaggcttccacaaagaaaaccagagatctcttatgtaggactaaccaagtataatcttgtcttactgagtatagccaagtattcacagtttgggtcactgtgaatggaattgttaacagtggagaattcgtacgggtcggcagcaacctcaatcggggcataaggcagagggagagacccaggcaagttttagagcaggagtgaaagtttattaaaaagctttagagcaggattggaaggaaaggacacttagaagaggtccaagtgggcgacttgaaggacaagtgtggtttgacttagggttttatatgttggcatacttctggggtcttctcccctgattctttcgttgagggtggtttgtccatatgtgtagtgacctgctagcacttgggaggtgagcatgcgcagtgtgtttactggagttgtacttatgctcacttgaaacattcttccctttactggtgacatgcccccagaagatcaaataccagttaaactccgccattttgcctcttggtgctcatgtgtgagtccgcacgcccaactcctgggatcttatcaggaagctgatgatcaccagtttcaggtttcttctatctatagggagactgcctttccctggagctggctgcaaccaattattattttagagagacagttaacaatggcctgaccatcacccgatggtcgcctgactttcccggtggggtgtggggaccctcttctgtcctgtttgtgtctgactagctacctactgtaacaggatgaccatataatttatcattcaaactactagacacttttgagagtgaaggggggcactattagttatgttggcaaaacaggtgtgaatgtggatgtctctggataatcaatatctacagccatccaactcatatatggtaacccaatcctttccattttttctaaaaagctagccatgctcttaaattaaaacacagcatttgagtctaaagtcggattgccagttaaaatacaagatgctctgttaaatttgaatttcagataaatgaatacttgtaagtataactatgtcctaaatatttcataagacatactaaaaattatcacggtttatttgaaattaaaatttcactgggcattctgtattcttatttgctgctgacaaccctagtctaactagggttagactagtttaactagtctaaagttaaactactgtgttgtattcaattctatcatcctgcttatgatgtaagtcttttaggctccaaatgatttaggacatagtctggttagcaaaaggagaaaattgaggcatctgttccaattggaccagtcacctgagccactaaaatcagctttcttaaatgtctctgaactaggaatacgctgggactaggtcccagtgcttggggtgagccaggccagcaggtgagtgtcctcagttgtgggacaaggagcttagtagataagcatcttctccctgctcgatgttcacctttgcttgatctcctaggccagtggttctcacccctggctgcatattagaattgcctggggagcttgtaaacccactgatgtttgagccccactccagaccaattaaatcgggatctccaggggcaggctgtggcatccatgggttcccaaaagttcccaggtgattttaaggttctaatgagaaccattgtcctatgccctcgctctgttcccagtggcatcagttcttgtttaattcttctcctttaaataccctctttgtagtattggacattttatagcccagaaaatatgactggagcacctgttctgtgttaaaatggcggcatggatgggatttgcccggaagggttccttgtccttccatgaccttgtcttgtgctgactcctggctctctccaagcctcccttctcctctctcctgcttaagcctctcttcagctttggctttccttgtctcctccttctctgtttataacatgtcaatttccattttgcagctggtttcctttcagacccatcaagtggccatcctattggcttggactgaagacccccactggagaactgtctctgcagcctatactgatgacactggccactgtccagggctccaccccaaggagtccaagccccagacatttagccttagagagaatccagattttgcatttccagtgcagggattgatggagccttgtgtatcaaagtgccaatttctttctaacaagctagggaggataccgttgacagcagcagaaaggggtagcagtggtttgctttccaaatggtaataagaagggcctggcagtggcaacctgtccacgtatcattaaaaatggactctcctgcttcgtttggaattcaacccaatgaacttgaataaactctggacaatgaccagcacagagccctaagcaggatacagcaagattatttgctttactcatccactgagtacctaccatgtgccaaatactatgctatatgccgagtatacactggcaaataaaacagatatggtccctggagcctatgaatcttaccccatctagccacaaataataaaaataagaagaatctgaaggacaagtgggacagaaatactcaagcagaatgagggtgagattgaagtccctgaacatacagtgccctttacacttgatcttagccaaaaggccgagaagagattacagtgctttttaaaggtagcatttcacccagccaataatcaatccctttggccttcttgaggtgcaaggccacacactcaaattctttaatcaaacaataggctagtgcaaatggagctatttcttaaacccagctgtttacacagcagctacaaatctgttcagaaggaatcccccaccatccacaactgtctatcgagcagatgtgcaagagtatttgtctctcaccaccagggttgcagtcaggacaagagagcaggtttgaacgtcttcggctcctagaactgcacaagctgtgtcttcagtgcccagaggcggctgcaacgtctccccagttctcctctcagaacaatggaaattttttttagaggcgtaataggaaggtttgcattgaattattaaacaatgggtattgaaaaatatgttttctttgacctctgtacttctagcttttaccagtcagtgttttcttgtaccaaggctaagatatgtataacactgaaatggatgtcttcttatataatattttacaagcttttgaaaacctgtgccctttaataaattttaaaacgttt

SEQ ID NO: 2919 - DNA, 9663 bp, Homo sapiens
gtttgattgcctcttcatttctataacaactgtgaaatttgaaatatgaaatgagctactgtaaacataatcactacataagaagacagaatctggctttgagtaatagtatgaattgccaatatattgttttattgtactttatttcttaatgttaacttgataagcatatacttaaagattttataaaactctagtgctggaaagaataatctataaattctatcttaaaaaacccagctgattaaataaaatattctgttgaaatgtaaaagaattaacacaatcactttatgaattaataaatttagttttttcttttacaaacacatttggttaattttaattttgctttgaattccttgtggatatatcactttctcttttaatactatacagtattagtacatggaaaagtgaaaggcctgttttatatatgagaaaggtggtatatgaagctgtgaagatgtctcaaatttaaaaagaaagcatttacacagaatgggagaaaatatttgcaaactacccatctgacaagtgattaataaccagaatatataaagtgctcaaacaactcaataggaaaaaaatcaaataatctaatgaaaacatgaagaaaatatctgaatagacatttttcaaaagaagacaaatggccaacaggagatcctaagaaaaagcttatatgttcagtgtgcaataaaaagtgttcttcagcatcaagcctacaggaacatagaaagattcatgagatatttgattgtcaagaatgtatgaagaaatttatttcagctaatcagctaaaacgtcatatgatcacccactcagacccactctgaggagagaccgttccaatgtgaagaatgtaaagctttgttccggaccccattttctttacagagacacctgctaatacataacagtgagaggactttcaagtgccatcactgcgatgctacctttaagaggaaggatacattaaatgttcatgtccaggtggttcatgaaagacacaagaagtataggtgtgagctatgtaataaggcctttgttacaccttcagtgcttagaagtcataagaaaacacatacaggagaaaaggagaaaatctgtccatattgtggccagaaatttgccagcagtggtacactcagagttcatatccggagccacacagatgttgccaagcctttgtcctactgacttggaaaagccacaccttcccagagtcacgatgatcctaaggtcaataattctaggtcagcttacctagtgcaaaggttgattttgtctcagagaagttggtgagcgtccctatcaatgtccttactgtgaaaaaggattcagtaaaaatgatggactgaagatgcacattcgtactcacaccagggagaagccgtacaagtgctcagagtgcagcaaggccttcagccagaagcgaggcctggatgagcacaagaggacgcacactggagaaaagccttttcagtgtgatgtttgtgatttggcttttagcctgaagaaaatgctgattcgacacaagatgactcataatcccaatcgtcccctggcagaatgccagttttgccataagaagtttacaaggaatgactacctcaaagtgcacatggacaatatccatggtgtagctgacagctaataggggctgtaaaggaattaaactattcagaagggctcctaatatgaatcccagatttttatcacctgatcagcataacagaagtagccaaaagtgacttactggtctcatagttcttatttgcctacatttagagtctgtagatgcatatgcaaccaaaaaaaagtcttacttttaacaagaaatggtataaatggaaaaaaaatacaactccatagccttgcaaaatgcaacttgtgctctgtcttataaaaatggagaaaggagtcatggctctctttcttggccatccctctgtaatgaagtttataatatacttccctaataggcctttttattttattgttattctttgtgtgtctgtgtgtctgtgtgtctgtatgtgtctgtgtgtgtgcactcacttgcaaatgccagttgttgcagctggttttaccaatttaaatagaaataaatcaagatatccaactatttctttgcagatgaggataagaataagttatcaaagtctcaagtttgataggaaaataaatagttgctattttataagacaaaccaagagctgagcttatctaatagctctgtgcaacaaatgagtttaaaatagatatttgataactaaaacatctattaaaatattgctcattttagaggattcttaggaaacattatttattctcatcattcagatgcagacattcatggtctggaatacttttataagttctacacaaaaatgaccatcacatttaaatattcagcaggctacccctcttgaatttagaccatttagctttagaaattaacagtataccaatatatataattaaaaatagaaaccaaatagattctctgtatttggcaacagagtggcagaacaatagtggcatctccacatttgttaggatgaacatagccctttcccctctccttccataaaagtgcacagaacatgttagtgcagatacagtcctcagaacattaacattccattttgcaaaagacattttccagaatcttggcagtaggtaattctgaaacacttttgaattaccttcaatcatcccatataattaggaatccagaatacaaagtacaaacttggcaattgttatgattgaaactgtcactgatgcttaagggaaattgaagcaagaagcataatttcttcctttaggttatatttcagcaaaatacttgacagcaacatacaatgaacagcttgtttggagagatgatatgatacaatgtaatagtgatgtcaaaataacctggaggaatatccaaaaaccagaaaaacgttaaaatgaagcccaactcatgaacctctctaactgaagcccagtcaaaagaaaggaagtatagttttaaggaagttatttggttctaatgagttaaggagaaaggttatctgagacacagttctttgacttcaggaatctcattttagaattatattcatgcccagttccagttttaaaaagaaacataaagattcaatgtagacatttgaatgttgtaaaatactaaatttgaaactcagaagagataacttttaaaaacataaatcctaaaattatagtttagaagatatttaagtatagttatatgtagtattttgaatctgaaattatagactgtattttataaaaataaattttggtcttgtttctcactatatcatttgtttcaacaatatatttttagatctaaagtgttttcattttaatatgatagtgtgtttaatatcatttgaatataaaaagacagctgtaaaatttgatagtgtgtattatttaagcacatcctgtatatttctttgaatgctgctttctctatatgggatgctttatatcccgattatgtgatgaatgtaaaacttgaaaggagtccaaattccaattttgtgtaatctcagtgagtcacagttcacatggctgctggggaaattaccctgaaaactgtggtgtcgctatgctgtggagtaaacagacaggcaagaggtgctgggctttatcctgctgaaggtttatagacatggaaatctttagaaaatggtgtagaaggacctacaccagagagtggtacaccactctctcctttcagaggactgaaaccaaaacaagtccttagtagactatttgtatgctgtaaatttttatccaaaagacaagtattcatgggtagtttcagatatattagcatttgcttgctaaaacttttaaattacttagtaataaccaaaaaaagacactattttaggcatgattgatcaattgaaagcatagataatcataaggaaaagtcttacagacaagctgaagtacaggtacctactttgaaatgtcttctgtttcctgctgtgaaagattttggctggggtattttcttgagaaaagaccagacccttaggtgcctataaagtctaagtaattgagacttagaaattggctaagtaaatttaagagacgttcaataatgtaggtgggttcagatacccttttataataactgtcttcttagtatattaacactcaagatgtttgtgtatctttaatttgcctttgtttcacaataactggcttttgttttccttttcatggtgtgttgttggctatatagaggcatttattggtaaattataatcagcagttgcaccatggaagtattcttggtgataaattcttggggttacatagtatagttaacatgttattttcaagaaacatgagtgtgtgtgtctgtgtgtgtgtgtctgaagagtatcacttatatgcagtgcatatacatgtaagtgcattactttgctcaaatatcttctgacctattacagtcaactcatgcatgagtgtgaacatgtattacagaaggtcttacagccttagtttctgttttagattttatgtgctgcttcctttctcaaacaaaagcatgaaaggaaagaggataagtactagaaatattcatttttttccttcacaaatctaaatgttgcttatgaaaactcatcttagagtaatgaatatgtggaagtgggtaggtaggaggaaatgtgcctctttaaaatcctaaaattttaccattgatattgacatttgtttgcgtgtatataaatggagcatgtgtaaatatagaattccaatagcattttttattttattataaatctataataaatatatataaatcactaccagacttggtgttagcattttattttactatagaactatggtaccattctatggtaaaatccaaatgaattgctttaaagttgtttttgatgaatgaaagaaatgtaattgccattacctccagacctcatgcttttatactttatacatccaagtgtttctcaatctgcaaagtacctctgaagttgagccaagttggtctcagggctataagagatattttccttgcctctcttctcattcctggttatacaaagaacaatgtgaaaaggatcatcactaagaatgaatgaaacctggtaactaagaatgaatgaaacctgattagtagcatcttaagtaaaaataacttgatgctcacaaatataatttaagggtaataaaagttatggcaaatgtttcaggtattccttttattttaaatttatgtttatcattttgatgttgccccaatcttgtgagattttcttgatacaaaaaataatcatctgagtagtggatttagaaattatgcattcatttaactttgatttttcagaatcagctgaggcactagttctttggagctgactcatagccttagctagcttgggcttaaaactgtattatcactctacacattgttaatttgttgtatgacagaataaaaaattaactctggagccttcattgtgggcatgttaaaatattctagatattctaggcccaggaaatagtctggaatgtaacaactacttatatactaaaatagtgctgcagatgcaatgtccaaattcctcttcttccttttttaaaaaaattcttaacacaatactgaaacaaatgttcatatttagttagaaaatatatagtatttaatttcctgaaattaaaacatatatttagttacctaaatatttgattagcatgtttagcttcctaataatgcaaacttttagccaattagaataaggtcttagtccttgaacccatgccaccttagcatactacatggtaggaggaaactaatctaagatgttaaattatatcaataatgcatatgtttaaaattaagaaagcatataggaccactgaagcttgatcatctaaatcaatgcaaaacagttcaaacaaaatatcactgctcctgacaagggaaactgtagacctactaggaattagctacacttaaaaaattcaaaaaatatcaatttatctctttaaaatagtataaaaatgaagagagtcccagctcacaatggatacgtgaatcactccattactattttttgattttgtcttcttacagactatctaataatgctttctttccttaattttatctgatatctttttctttaatgtttgactggcatatcttttttcatttttctactgaaaacttttctgtgattatatgaaaattttacattttttaaatgaactgatgttaagatttcttattttttatcctgtctgacagcactgaattgagtgcttttcagtccgcgatgatggctttgtcctgcctttctcactgtctcatcttgcctcatttggatggtggcctgagcttgtattggaggcccttctcaaagagaaatctggtgcttcatacgtagcatatgaaatttatctggacacatgtatagtaatacatttaaagctgaatgagttcattattggaattagtgttaaaacaatatattatctattcattccttagtatctgataaatacataaaaacatgaagtacattgaccccaactctatactttttattttctaaagtaattattagcatctgaagaaccaaaattgcctttaatggatgaaaactggttggaaactaaatgttaatgacatgtgagcaaactatatagttctcattctgtgtaggcatataaagagtatggagatggggagcaatgtgacatttaattgattataacacttttatttaaattggcaaactgatgggtccttttgtggattactacatgtagtaattaagaattttgaggctggacacggtggctcatgcctgtattcccagcactttgggaggccaagttaggcagatcacttgagcccaggagttcgacaacagcctgtgcaacatggcgaaaccccatctctaccaaaaatacaaaaattagctgggtgtggtggcacgcacctgtaatcttgcctgtaatctcagctactcagctgaagcaggaggattgcttgaaccctggaggcggaagtagcagtgagccaagattgcaccactgcactccagcctgggcaacagagcgaaaccctgtctcaagaaaaaagaaaaaaaaaaaaaagaattttgaaaatctaactagtggaaatcaatcattacttttgacttgtctagttttattactgaaatgtaggaaatcttctctagaccttacttctaatcaaaaggctcaccacataagtaaaataattgtttgctgctcatcttccacctgacaaacacagtgcatagctttatccagaaaaaaaaaagaatataaagcagggtcaagtacaactgtatcactttcattctttccttctctcctcgcataaaatccatctcttatgttgtttcagctgcagtataactggtgtagtctccagttctacccttttaagagtgacaagctggttttgttcctggactcaaattatgatatttaggatattaaattgtttcctttctgctctgactaaaatatgaaattggggtctacaaatttagctggttaagatactattagactaagtatgtgagttgagccagttggctttatcctgataaaaactattccacagttttctaagctacagatctgacccgagttgcatcagtgcagtaaagggcagatgacttgttgtttaccacagatctagataaagggggtatatggatggcacagagtcactagaatgaaacgaggaatacaaaatatatgttctataagccaaaacaatcctgagaaagaacaaagctggaagcttcacacatcctgatttcaaaacgtattacaaaattactgtcatcaaaacagtatttatgccagtttttactggcataaaaacagatatgtacaggccaatggaacagaatagacagcatagaagtaaaccttcatgtatacagctaaatgatctttaacaagagagctaagactacacagtgggaaaagatagtctcttcaataaatggtattaggaaaactagatatccacatgtaaaaaaagaagttggagccttacaccatatacaaaaattaactcaaaatggattgaagatctaaatgtaaaacccaaaactttaaaactagaaagaaatatgggggaaaatgctttatggcatcatatctggcaatgatttcttggataggacaccaaaagcaaagacaacaaaagcaaaaatagacaaatggaactacatcaaacttaaaaacttctgcacaacaaatgaaataatcagagtgagaagcaacctatgcaatgggagaaaacatttgcaaaccatgtatctgttaacaagttaatatccaaaatatgttaaaaattcctacaactcaacaacaataaaaaacaacccaattgaaaaatggacaaaggacttgagtagacatttatccaaagaagataaatggccaaaaaaaaaagcatacaaaaacatgttcaacattactaatcaccagtgaaatgcaaatcaaaaccactatgaagtgtcacctcacaccaattagaatggccacttcaagaaaaagaaaatataacaaccattgatgaggatgtaaagaaatggaaagcactgtgcactataggtgggaatgtaaaatggtacagccactatgggaaacaatatggacatttctgaaaaaaataaaaagaccgtatgatccagcaaacccacttcttgttactaatctgtattagtccattttgtgctgctatatcataatacctaagacttgataatttataatggatgaaaatgtattgctcacagttctggatgtcgggaagtccaagatcaaagtgcaagcactggcaaggatgttattgttgtgtcattccatagcggaaggtgaaagggcacaagagaaaaggggattgaactcatccttttataaggaaactattctcacaatagtggcattaattcactcataagggcagagcgctcatgacctaatcaccttctaaaagtcccacctcttaatactgttacaatggcaactaaatttcaacatgaatttgagaggggacaaagattcaaaccgtagtattatcccaaagaattgagaactggatttcaaagagatatttgaacacattgtagcattattcacagtatcaagaggtagatgtagcctaaatgttcatcagtggatgaatggataaagaaaatttcatgtacacctacaatggaataatatttagcattacaaaagaaagaaataatttcatatgctacaacatggaaacttgaggacattatgctaaatgaaataagccagttagaaaaagacaaatactgcatcatttcacttaaatgaggtatctaaagtagccaaactaatagaaaatagaatgtaacaaccagggaaggcaaagaagggaaaataagagttgttaaatgggtatagggtttcagttttgtgagatgaaaaagttctagaggtctgttacacagcaatatgcaatagttaacactaccgtgctgtatactatacacttaaaaattgttaagatgaaaaaagaaaatgtatgtcctatagatagggttacaataatactcttctaaaaat

SEQ ID NO: 2920 - DNA, 2116 bp, Homo sapiens
gaaaacattaaggattatttacttttcacaaacttagtgatatagtttctcttttttaaacagctttattgaagtataagtcccatacatattattcacccatttaaactgtacagtttaatgattctttggtatatccacagatatgtataatcatcatttcagtcaattttaggatatttttatcacttgagaaaaagaatctgtactttttagctaaccacactcccatctccccactccatctctgtccaaaatgcttgagactagaattctttcagattttgggtttttttggattttaggatgcttgcatatacatagtgagacatcttgagcatagaacccaagtctaaacatatatctttcatatacacctcatacacatcggctgaaggcaattttattccatagttttattaattgtgtgcatgaaataaagtttgtgttaaatacttatgtgtggaattttccacttggtggtgtcatgtcagcatttaaaaagttttgaattttggagcattttggatttggggttttcagataagggatacccaacttgtactactctactttctgtctctgtagatttcccagttttagacatttcctatgactggagacctttgatgtgtggtcttttgtgactggcttctttaactttcctggtagaataaagtccatcaaagtgttttataatgataaaaaagtcaatttataaggaagatataataattataaacatgtatgcacctgataacagaacaccaaaatatgtaaagcaaaaactgacagaaatggagggacaaatagacaattcaacaacaataattggaaacttcagcaccccgctttcaataatggatagagcagccaggcagaagattgacaaggaagtagaaaagttgcccaacactataaaccaactactaagagatatctattggacacgttaccccacaaacagcagagtattctgaggtgaacatgaaacattctccagcacacaccagatgcaagaacataaaacaaatttcaatacgtttaaaaggataaaagtaatacagaacatatttgctgatcacaatgtaacaaaattagaaatccattacagacaaaaaatgagaagctcaaaagtatgtggaaattaaacagcacactcctaaatgaacaatgattcaaaggagaaagcagaaaatattttgagatgaatgaaaatgaagactcaacataccaaaacatgggatggtgccaaagcagggcttagaagaaactttagagctgtaaatacttctatgaagaaagaagaaaggtctcaaagcaataacctaaccttctactttaaggcaacggaaagaaaagagcaagttaaaactaaagcaagcagaagaaaagaaatcgagatttgagcagaaatcaacaaatgagaaatagaaaactaatagagactttaaatcttctaaaatgtctaacactttacttactataataaatcaaattgtaatatttacagaagacattaagcaaggactatttatttttcacagtataagtgatatactttcttaatgtattaaaaaaatttaattttcaacatagcttccatacacctgttgtaaaaagcaaaaatcttcgtgaaaatatccaccaggcactgtctttttctcaattcatatttactttggaagctgttcaccaaatcatgagctcatttcaaaccgtagctgttgagaaagctcacctaatcgaaagagcacaatttcgggaattgagcaaatctacgactgattccttgtacctccacttcctgcaatgtgactttgaataagttgctaatttctttgagacttattttcctcatcgggaaaatacaggtaattttctcactttgaaaggagtaagtaagataacatacataaaagagccgaattcaatgcctggtacatagtaggtgcttgtttaatatctagtctacattcatttgatgatttaacaattgatttggtcctggtatgcggtatacatatatgagtgttcttgaaagaaaaactagaagaagaatctaatgttacatcttatgtaccaggtttttggctagcgatattatctataactg

SEQ ID NO: 2921 - DNA, 615 bp, Homo sapiens
caaatatgatgcctagaacggcatggacgctcaaaatctgttgacaattgattttcctagcacatatgatttgggtaattctgtcaagacttagtgatgtggcagcaaaattagtgatgtttatttaggagtagttttctggtaagaggttgaatggggaaatgttaaactcctacttcctagatacagctacagggagaggaggaagagtcatgttattttgatatgattgtaaattaacataacccccctggaactccttttcctacacacgcacttccttccttcaggatcacaccaacctaaaggtaaagccagagcaatagtaatgtttatagaccatctttcttataaatgccactgctcactattgtacatatgtctttttcaagtatttttggaagacctccctcctctgctaccatatttccctaatgtctgtgaaactaaccaccacgcccggccttatttgctacattgtttagagatggaatcttgctctgctgccaaggctggagtgcagtggtgatcaaagctcactgcagcacaacttcctgggttcaataaatcctcccagttcagcctcccaagtaactgaaactacaggcacatgcc

SEQ ID NO: 2922 - DNA, 6005 bp, Homo sapiens
cagtatgtcatttagaagcttgctaaaaatgtagcaagaggccaggattatttttagttggaaaagcttcatttacttctcacaagctctgtggcctgttgtgcttcaatttcgtcatcttcaaaaccaggaagagctatattcatcttatctcacaaagctgattaacataaatgaaggagccttggaaaatggaaagcattatacaaatgtaagttgtatagagttccacggtaattgctaaaaatactgaggcaaagataatcctttgtagacagaggttttggttaacttgtgagaatagagttagtagaatgctagacatagaaaacagatttcagtgatttcaggagaaaatcagagggaaggaagaaacatgaggtgggtccagaagtggaagtcttcaattcctttagaaaaggcacatgtagctggaagcagtggctcacgcctgtaatcccagcactttgggaggccgaggcgggtggatcacaaagtcaagagatcgagatcatcctggccaacatggtgaaaccccgtctctactaaaaatacaagaattagccaggcgtagtggtgggcgcctgtagtcccagctactcgggaggctgaggcaggagaatcacttgaacccaggaggcggatgttgcagtgagccgagtttgcactactgcactccagcctgtcaacagagcaagactccgtctcaaagaaaaaaaaaaaaaaaacagtccccggtgtgaacatggcacgtgtatacatatgtaacaagcctgcacattgtgcacatgtaccctaaaacttaaagtataataataataaaataaaaaaaagaaaaagagaaaaaaaaaagctccttttgggttccgatctgtttcctcggggagaaattattctcctcaacctctctttctaagagagtggacagaaatgtcttatctctccagtgggtaattataacttctctgtaagctataaataggcaaaaaaattccctaaggatgtatgcctggggtgttgtaggttttagtcatacctgaaagggttgctccttcttcctttttcagagtactctgtatcgttatctattcctttcattttttttctgaatattttcctaacttattttgtccacatgttctacaggtaaaccttaaagattaaattctgttgaccctgtgctttcttcagtctaactccttggcacactgaaaccacatttgatattgaatgttttaacataatctatttcaggaagtaaaaaaaatcctagagctctctcttattttcctttatgttaaataatcaccctctctgacattgtagctttttaaggaacacatcatgtagaattgataggttcttttggtagaattcccaactgtgatatttatttcatgactacacatcattctcagcaggtcaaaaatcattgtattatgaacatctaaattggttctttaatatatttttgttagcagcagcacatctcctgaaaagcaacactgaagtcgattctgcggacataaggatgatttggcattgacatctgtcagcctgttaattactaaggaagatttggctgaattaatttgtttcctggttagctccttttctctgctccattatgccctttactatgttgcaaacttgaacaaattaaagatacattccaagatatgagaagaattttcatcaaatgtatgaaaatcaagtacatgagaaattcagtttccaaaatatagggcatcattgtgcagacgaacagctttttgaacctttctgttgaggaacacttccagttctataacatttcttcagacatttaatgacagtttcctctgtgccaggcactctctgtaaggtgaaagctcaggctgggaagaggggtgggagtagggtgaatgggaagcgggtggggacaaggaaattaacataagtggacatgcacaacaaaaaggccctttcgggcgttaattttgtatcacctgcctgtatttctattcaaacatgaaaaatttttgaaacaaatttgaagggggagtggtccttcaccaataaggcaccaataaggcaggttattttctcctttgtactggcaaccatcttttctgtagtttatgctctgctcacaccctatgtgcttgtttcccatctgagataaccctgccccttttctgttttcatgaccattattcaatggaaaattggaataaagtaaaacaggacaagcctgaattactttgggctctttgttatatctcatcattttttttggtctcttttctccactacatttaaaacaaaaaataacctttgcctgtgcttttccctcacttctaaatatgttttttttaaccttttctttcttctcttttgtgcttgctttcttagttaacattacaaattttctgttttttctaaagctaattttaaaaggaggcctataatatttgtgtaaagtttttcattcctccagtcatcccattttctatatgactttaatgtgttatctgccagaacaactagaatagatatctccattatttctgcacagatggcagagtgaacaagactttgtccttagaatttccatcaacaaaacaaaaccaaaccacttactatatatgtattgccattcatgtttaagtgctgaaaatggacttggagacttatctcagcactatcacttatgtactctaactcttctttatttgagtagggaatccttcttgtgacttccttcagggtgtggacacattgaaagattaattattcacatatcagctggaaaaaagtgaggtgacaagtgttgacatttgcgtttctgaaagaggcacattgttacatcaaaaaaaggataatgccaattaggatttcatatgtgttgttttattttcacaattacaatgttagaggaaagctcaaaagtaaaggcttttgtgaaaatgatcagatgataaatcttgatacctgtgtaagaagtgaaagcaccagagtttttttagaagatgaaaaatgaaaaaaaaaaaaaaaagaaaaagaaacaatttggcattgttagaaattctttattgggagtggaaaaacatgaaataaagggaaaatagctttaatcaactccaaattccttctttggaagtgctgtgtgtaatctccaataatggtggtgtacatttcccccaactctattaaaaccatcattatcattgtcatcttcatcaacatggtcatcatcattgaacacacactccatacaaagtaagatgttatgtgtttgtattataagcagagattagacaataactctaatcacaaggatgctgtaactagtagtgtagatggtagatgtgcacaacaatgaagggatgtttgatggtatctaagttgtgtaatcattaggcttacttgaagagtttcccctaatttttctatttttctttttccttttttttttttttttcaaacagggtcttagtctgtacccaagctggagtgcagtggcacattcctcatggctcactggaggtgcctcagcctcctgggctcaagcaatcccccaacctcagcctccctagtagctaggactataggcatgccccacaccagctcattatttatttttttatttttttgcagaaacatagtctcactctttttcccaggctggtctcaaactccagggctcaagcagtcctctgtcctcaacctcccaaagtgctgggactacaggtatgagccactgtgcctgaccagaatttttcttgaatgtgatattctccttcattctattacacataatttctctaatcttcataatttaattatcattgaatttcagtctatctgattcatgtaaagacaacctgtcattccaaacatgatttgtcctctttacaaaactaatctgatatgaactgtatttgattcactagagaacagagtatagtgatgcctcaagttattgatacctgcattgatcagggtaactaaggcttactactggaacaagcagtgctgtaaatctcatgggcttaacatgaagtctgatatggatttgggtgggggctttactagggggcttacctctaagcagtgacaaaactatgtaggctttattcaattgtgtggctctgtcatctttaagtccatcacttcctgcctcagctacagaagagagaaagaatgaactaccaaatgagactttttaggactatatcacatgtggcttcaacttaagagcaacggtagctgggaaatatcatcttcctgtgtacctcccaaaaaataaaatgggtttgtgaatacatagcattttctttattacactatagaatatccaaatagagatcggatattttatagtgtaataaagaaattgggaaattaggagttagggctgaatgataaatatagcctttgaagacagtgacaatgatatacagttgattagttggatattggataataaaacccatcacctaaagaaagagcatagcaaatgattaaaaacaggatttaaagaatggtttttacaatgagggacaatggtagaagcttattgtggtgtggacttgtaattacctcttaatttccatttttttcttcctttgtaacaaaactctagttttttgcctaactaaaagactgttgtgtacccttctttatagtagggtataaccacatgactaatgtcacatataaaaatggagaacgggtgcacattaaagagtaggtaagtggttaatatactttttctctctcaatcctcccaacctgccctctttacctttatctctccaaaataacatgtttgttgtttaatagagatgacatcgtcctaatctaaggcttaagattcctgtaactcttaagtcacactttgccaaatttttattcaatcactgaaggctcacattgcctctgaaagaaaaaaaaaaagcaagtgaaatatttctgactgtgagtgttcttatattggcatcttagtgtgaacttaggggatatgttagcgttgactgttttctgtatcacctcaggtgtattttgtctttcccctcttgacttcacttacccactcactctgactaatgtcctagcagtggcaagcatgtagatgtctaaaaatgtagaaattgtaagaaagaggctgtttcagggcagcatttggaagtggctattgtgtagggctaaccatatctctctcctgccagaggtcatggccttgttgatggtctctagtcaagagcaatcccattagtgaaaaaaaaaaaaaaaaagaaaaccagcactgacagtgactgcttccaaatattctcctgtctgctactatagaatttcctagtgtttcccatcttgtcaattcctttccctcaccttttttacactgagtgaacaacttttatttgaagtgttaggtactaacccagttctctcaccctttactctgcttccttcctttcttaaatgcttcctgctttgtaaccctctgcagctagtgatacattagtttatgtttgtgttttctcaagaagtgaaactgttgtaggttgacctattatatagaagtacatactcctcagtagaaggcaacttatgattgtagaaactgggtgtttcgtgagaagttgctacttaactgaccaattaggaaaaggggtacagaaatgattgagacctccaaggagatacagattcatttaagttgagtgtactgctgcagacatcattttgaatatctgtattacgagtaaatggtggaaatttgaagacaagtccatactttatgaaagtaagagaacaagaaatttgtttccctaaatctgtgagcataccctataattcatcagaaacagcaaattcacaaacacaaaattgacagaaatatgtaaaacttttccagcagtttacttctgaatacattagaaaatgtgacagaacatagtaaatttcttgtcattttacttcccaagggaagtgctaggtttgtaaatcctagaatatca

SEQ ID NO: 2923 - DNA, 2732 bp, Homo sapiens
cgaggatattgctttcatctttgttaaccagaaaatagattaagcaaaggttagctggtgagacatgtacaaatcctcaagtcaagctgagtattctgagagcctaaggtgaattttttcttttcccctaaaagtacaacttttacctgctgagtgtaacgatctattttgacttgtgcctcaggacagagttcgatatctttggctccatagacagcctgggcaatggtccttatcttgtccacaattggaagctgcagaaacacaaattataacaaaattgtgtaagtttaatctggttaaagattttttaaaaagtttagtgacacttactgtaattgcttaaaattcccttatcagggtaccccctcagcaactgcaggattcctcgcaaaccctcttttttccttttagcaccctaaagcactgaaattttcagtgtcagaatagatcagatgtcaactagcaaataagccttaggtgttcaggcaatttagaggctgcttagagcccacgtagaatctgcagagggaggccgggcacagtggctcacacctataatcccagtactttgggaggctgaggcgggtggattacctgaggtcaggagttcgaaaccagcctgatcaatatggtgacaccccgtctttactaaaaatccaaaaaaactagctgggcttggtggtgcatgcctgtaatcccagctacttgggaggctgaggcaggagaatcacttgaactgggaggcagagactgtggtgagacaagattgtgccactgcactccagcctgggtggagtaggactccgtctcaaaaaaaaaaaaaatctgcagagggaagagggaagttagtgccttacagagggcttctgactaggaagccccagaactgcggccgaccccttcctctccctgcctcacccctgcagaaagacctgcagaaaaagctggaaggggtgggatggtgtgtgtgggggtggggactggggctatgcagtttccagacctggtctttggcaccctctacaggacagttccattcccacacctgagctttggacaactgaatcctatgccccttcccacccagggaacctggtgccagaaattcccaggacttacccaccatccaccacgccacatagcaagtgtcctcagtgtctgcagaccagaaacaactcccttgtgtctcagcactgggccacctgctgaaaccccaaactgcctgccccattgtttgagacccagtcaggccttggctccaaaagtcctcttggactgccactggcccccagggtctctcctgactgcacctcggtcccggagctcccacaccgctgggccccgagccccatgccccgatccagctgtggctcctttacgggggccttgctggcctttcctaagggaggtgttttcccgagggcaggtggactgctcctcagactaggggccctcggagggccaggcctgggcttctacctcctctcgcaggctggtgtttctctgcaaatatggctcgtgtgtcctccttcctctcagactgggggcccctgaggactgggcctgagtttccctctcccccttcagaatgggggttccctgaggactgacccagggcctccccccgtcccctccatctggctgttaatctccaacactttcacctccagtcctattctgcacagcgctccccagcgctgggagctcagaggcctcttcagccttccccagggctggggctcagggagggcttcctcaggcgctggccccagagtcaggctgcacattggcttggaggacaggcctttcctctgggactgtgaggcccagagtgcccacccagaactccacctctgacctcacaaaggcctgcttcagaactcggtctccactgcactgctggccagacgagggatgttattttgggcagtgcatctggacttggttcaagtggcaccagccaaatccctgccttactgacctctcccctggaggagcaggagcagtgctcaaggccgccctgggagggctgagaggcaggctctggactggggacacagggatagctgagccccagctgggggtggaagctgagccagggacagtcacagaggaacaagatcaagatgcgctttaactgagaagcccccaaggcagaggctgagaatcagaagacatttcagcagacatctacaaatctgaaggacaaaacatggttcaagcatctgggcacaggcgaacatacatatgatagttgagaaagacacatattctgatcatgaagaaataaacacaagttaaatatgactaagcagaaagatggaaggaccaggaatggtgatgctaacttggaaccacgatgcaggctctaaactcctctacaatcatcctcccttgtgagaaaaatacataagatctaaggcacatgagatgatatgctttctgtttgagtttctcctttatgttacgcatactgataaaattgttgatgccagttgatctgaaggtcccagcaaggagccgactcacagaagaatgcagttttcacatcatgatgatttaatcttccttgacctgagcaattgacaaccccaattctccagaacctcacccgccacaatccccttaaaaaccctggcccagaacccctcaagcagacagatgtgaagcttgaggattccttcatctctttgcccaatggcattgtgattattaaactctttttctgc

SEQ ID NO: 2924 - DNA, 50749 bp, Homo sapiens
atttttttcaaatataagaatttgaatctcatatatttctaagacttagttaaactggatcatacaaatatagagtgatttgttttcgtgaacatacattttcagaaattatctaatgtgccttgttgtttcttctttaccttgggtgatttacaaatgtgctgtttcgtttcaaaatattgaagattttcttcatcttagtgaattttaattcaatgccattgtggtcagagaacatacactgtaaaatttcaatatttttaaatttattgctacttattttatggtatatcatgaatgaatcttgaacatttttagcatttgaaagggatgtgtgttctgcaattgttgcagtagtgtcctataaatatcaattaggttaaaatggttgagatagtgctgaaatcttctacttacctactgatttttttaattcattaacgaactttagtttttagaggagttttaggttcccagtaaaattgagtggaaagtacagagagtgtctctatatgtccctgtccccagacagacacaacctccattactatcaacatctcccacctcagtggcacttttgttgcaatctattgacacatcttttttttcttctttttttagttttattattattatactttaagttttagagtacatgtgcacaatgtgcaggtttgttacatatgtatacatatgacacatcattattaatcagtgttctacattatggttcttgcttagtgttgtacattctatgaggtttgaaaaatgtataataacatatatacaccatcatagcatcgcacagaattgtttcattaccctaaaaatcctctgtgttctacctgtttacccctccctatccctacctcttgataaccactcatctttttactattcccatagtaacattgagcatgttttcatacacctattgaccatttatatgtcttctttggagaaatgtctactcaagtcctttgccaattcttaaaacattttaaaaagtgggttatctgttggttttgctattgagttgaagggggtctttatatattttggaattaactcttcctcagatatatgatttgccaatattttttctcattctttaggttggcttttacctgcagattgttttctttgctgggcagaagctttttagtttgatgtagtcccatttgtctatttttgcttttgttgtctgtattttcagcgtcaaattaatgaaatccttgtgaaaagcgatatgaagatgttccctaatgatttattataagagttctatagtttcagatcttgcatttaagtctttaatcgactttgagtttatttttgtttatggtgtaatataatggttcaatttcattattttgatgtggatattccattttcccaacactatttgttaaagagactattgtttctccattttgtagtcttggcacttatgtcaaaaatcatttaaccaatatatacatatgggtttgtttctgaactctttattctattccattgatctatatatctgtcttgatggcagtaccagattgcattgattatgttgctttgtaatatgttgaagtcaggaagtatgaagcttccagctttattcttctctctcaaatcattttggctatacagtgttttgttgttgttgttgttgtttattttttggtttcatatgaattttaggattttttttccatttccacaaaaaatgccagtgggattttgatagcaattacattaaatctttcggtcactttgggtggtctcgacattttagcaatattaatttttccaatctgtgaacatgggatgtccttccattaatttgtgtcttctttaatttctttcaacaaagttttgtagtttttagtgtacaaattttttacctcttcagttaaatttattcctaagtattttattatttttgatgctattgtaaatggaattattttcttaatttctttttcaaattatttggtattagtgtatagaaacacaaattatttttgtttgttgattttgtatcttgcagctttgctgaatttattatctctgtttttctgtttgtttattctgatatgcactttagaattttctctatatgcaatcatgttatttgagaacagagataattttacttgatcctttctgattttgttggattttatttattttttcttacctaattactctagctaagacttcaagtactatttcagttaaatagaagtggtgagactgtgcatttttgccttcttacagatctcagaggaaacatgttcaattttttaccattgaatattatgttatctgttggttttttatatatagtcttcattatgttgaggtaatttccttctattcctagttttttgagtgtttgttaaatgaaaaagtgttgaattttgtcaaatacattttctgcatctattgagttgatgatgtggttattacccttcattttgttattatggtatatcaccttgattgatttttgtaagttgaactatcatcacatctcaggaatatatgttaccacctggtaataaatacatgattctttcagtgtgctgttgaatttggtttgctagcattttgttgagaatttttacgtatgtattcattgggaatataggcctataattttctttcttttggtgtctttgtttgtctttgctatcaaggtaatggtgtcctcataaaattagttttgaagtgttcccctctcttcaattttctacaagagtttgagaaaaaatgatattaattcttctttaagtgttttgtaaatagaattcataaatgaagccatctagtcatgggctcatcctttttggaagactttttggtgctgattcaatctccttacctgtaattggtattattttatgtctgtggcatgagttgtaatgtcacctctttcatgtctttttttttagacttatctgtttttttcatactctggctaaaggtttgttgattatcttttcaaaaaaaaattcttaattttgttgatttctttctattgtttttctacttgtattttatttatttctactttaatcttgattatttcctttcttttggtgactttgggcttaatttgttcttctttttctagttatttcaggtataccattaaggtttttatttgaggttttttttcttattgcaggcatttactgacataaaactccctcttacggctgcttttgatgcatcccatacattttggtatgttgtgttttcatttttatttgtctagcaatatttttaagtttcccttttggctttttctttgactcattcgttgtttatcattcaagggtgtgttgtttagtttccacatatttgtgaatttttaagttttctttctgcttttaatttctagtttcaatccattgtgattggaaaagatacttcgtataattttaatcttccaggagctcaaacaaccctataggaaataatatccttaaatttgttaaaactccttttgcgacccaacacgtgatctatcctggagaatgttttgtgtgcacttgagaagaatgtttatcttctgctgtagaatgtttcttacatgtctgttaggtccatttgataaatagaattgctcagctcctatttccttattggtttcttctctgtatgtttggtccattattgaaagtggagtattgaaatctcctattatcattgtactactgtccatttctcccttcagttctatcagtgtttgcttcctatatttggttgcccatattttgggtgcatatatatttataattgttgtctcttcctggtaaattgacattttaatcattatataatgtccttctttgtctcttataacagttttttacttgaagtctattttgccttaaataaatatggttaccatgattctctttgcttatcatttgcatggaaaatcttttccatctcttcactttcagtctgtgtgtgtccttaaatctaaagcaagatttgtttatatcttatagttggatctttaaaacaaaaacaaacattcagccactcaatgtcttttgattgaagagtttaatctatctatatttgaagtaatttctgatagggaaggacttatgattgccattttattagttgttttctgtctatcctgttgccttttggtcctcctttcttctcttgttgtcttcccttgtgttttgttgattttttttttaatagcaacatgctttgatttattgctcactttctttggtgcatcttttatagataccttttattgtgtttaccaaagggcttacattagacattttatagttgtaacaatctctttttagctaataatttcaattgtacacaaaaactgccctttacgtctcctccccatggtatcagtgccatcagttgtaatgtctccccgtgcacacactatgctatagatgtcacaaattacatcttttttttttttccccgagatggagttttcctcttgtcatccaggctggagtgcaatggcatgatctcggctcgctgcaatctccacctcccgggttcaagcaattcccccacctcagcctcccgattagctgggattacaggcacctgccactacacctggccttttttttttttttttttttggtactttttagtaaagacagggtctcgctatgttggccaggctggtctccaactcctgacctcaggtgatccacccacctcagcctcccaaattgttggggttacaggtgtgagccactgtgcctggacaattacatctttttatattgtgtattatcatgtttttattgtcattttttgtacttttatctttcaatttctacaccagaattaaaagtgatttatgcactacttttatagtaccatactattctctgattttctatttacctttgccatctagctttaaactgatagtcttattgagcctcccttgtatgtgaaagtcactttctcttttgctgctttcaaaactctctcattgtctgacttttgacaatttgattacaatgtggcttgttatagatttcttatatactagttttatacgagttgaagtcttttggtattcttgaatatggatattcatttctttccacagatttgggaagtttgggcccattacttcttcaaataatctttccttccctttctctttctcctcatcttctgagaccctcatattgcatataatgaacaccttgatcatgtgccataagtttcttagtctttctttactctttttcattcttttattcttttctcctactggataatttcaatgacctgtctttgagtttaccaattctttgttcagctagatcaaatatgcagttgaacccctctagtaaatttttcaatttagttattgtattctttcattccaaactttctgggtgtttaaaaatattttatttttgttgatattctcattttattcatgaattcttttttttttccttagctcattgagcatctttatagtagcaatttaaaatctatttcatgtaatctccatacctttgtttctttgggttcagtttctggagatttattttgttccttttattgaaccatgtttctctgtttattatgtgccttataactttgtgttgggatctcttcatttgaaaaaatagccatatatatcagtttttatgaactggctttgtataggaaaagatctttaccaatcagcccagctagatattctagagagcttctcaaacttttcctatggatgcctcttctctggacttgtgcatataaattcattagagagatttgccagtttctttttttaagaattcatcatctctttctccctctaatgtgtctgtttgtgttctttggagctgccacaaggtgcctagctctcttttgctctcagtggcttctagtaaatgttgggacacatcagtgcactaagtccgaagacacagaaacaattccccccagagagctccctgaaaagccagaccactagaggcatactctactcttctcttctggcatgaccccacaaaggagagaccaccaaatggcataggcctctgtctgttgtatgttatcagtagcagcagcaatctgcccagctctattttgtcctctgtgccttgcaagtacatagagtattcgaggtccctcccatccatcctccaagacaggcaagacagaatctagtccttcgggcagtcccttgaaagttcagaattttggacacacactttaactctttccctccacagggataagccaggagttgaggcttctttttctccctactcattctgcactgagccagaggggaagggtatagaattttggtgagcgagtgtttgttagtctaaaccattacttttgttttcagtggtccccaacctggcccttttgtttttctgtgcttagagtcaggcaggagataaaccagttccttgggcagcaccgcaaaagtctgagttttggatgtgttttagtcttttcgtttcctccccagagagaagccaggaaatgggagttttctccggattgtacaactctgagccgggggttggggggactatggtgtatgagtgacacgaattttcttactggtttcaatgcatttggcttcatatttgcctgaggttcaggaacctcataactggtttatgggtttctaacaagggacatttgtcactgaattgctgttaaatggtgtcctatgaggggaaagaggttctgggcttcttattttgccatcttgctcttctattggctttttaagctgtgctgctttatttatttttagcagttgtatggggattaaaatatgtattcttaatttattattacttacttagagttaccattgtagtatttcatataaaatgtaagaactgtattataattatatttatacccttttccatctttgtggtattgctgttatatatttttcttctacatatgttataaaccctacaatataatttcttttttttactttgactagtaagctgcattttaatgacatttgtaaaagaaaaaatagtttctttatatagattcatatattcagcacttctaattttcttctttccttcttgcatatctgtgcttcaatctggtatcctacttcagtttgaagaaccattaataacaaattattatagcgtatttttactggtgacaaattttctcagtacgcatttattaaaaatgtttattttatcctcatttttgaagtatttccactgaccgtggaatactggcttgactttaaaaaactttcagtactttacagctgttgtttcaagatcttctggcatgtatttttttctttttttttggtttatgttttgttttgtttttgtttttgagacagagtctcaccctgtcacccaggctggggtgcagtggcatgatctcggctcactgcaacttttgctacccaggttcaagcgattttcatgcctcagcctccggagtagctggtgttacaggtgcacactactatatctgcttaatttttgtatttttagtagcgatgggatttcaccatgttggccaggctggtctggaacccccagcctcaggtgacctgccagcctcggcctcccaaaatgctgggattataggcatgagccaccatgcctggctggcctgtatttacttttctgatgaagagtccatcatctttcatcttttttcccttcatatgagggttttttttgatacattttaagattttctttttaccattatctttcagcactttgattataatatactcagtcaaggttttctatttacatggtttagggtttactaaatgtcttgaatctggagggtaatttttaaaacaaattttgaattttgaattttgttttttgcttctttttctctccctaccttttcttctctcctactttttctcctcctccgtctccttttcttcttcctctggattttcacaaatagttgaattttctgaggtaccagggctctgcttgttcttctcaatcattttcttttcattgtcttcagattggttaatttatattcacatgttttcaaattcattgaccctttattgtagtgtctaatctgctgttcagcccatctagtgaatttattcagggaaagtattttttattatagaattctcattagtcctatgttatagttttcttttctctcctgagatttcccaactcagcattgtgaatatattatttctacatttttctttaagtttatatctatatctctacatatatatctctatataaataataacatatccacctatatatctatatttatccacttttaaggtctttatctccttattccaacatctctatcatgttgggatttgtttatatcaactttttacttttgactatgggtcacatttttcctacatctttgcatgtctagtaatatttgactgtatgcttgacattatgaatggtatgttgtgggatggtatgtattgagtattttttttttctttgaggagtgtttagttttattctggcaagtggttaactactggtggcttgttttgattttgttagaatggatttatactttatttcaattttatccttagttctatggcatggccattattttaggtcacggtctttcctcctaggcatggtcattccagcatctcgaccgaatgcttttgttgctcagtgaagctttctcactctggctgcgttaggactttaacatctatgagcactgtttaatgtctccattcagatgagcactgaaggatttgtcactgctatagttgttctcttaagagtgtcacagaatactctcctgaacaaaagtagcccatcttttggccaagggcctgagggcaacctctgtgaagatttcttgcttcccctagtctgcgaagctttctctcctcagtacttggccacacaaattctagctaccttaccagcccgaaactctgatctgtgccttctcctctcagtaaaattgtcattctctatttggcctctgtctcccatgctgcccctggaaagtgaccccgggtagaaagctggagttaatacggggttaacttacattttccctttctctaaaatatgacagtcctgcaccatttgttatcaagtgcttgaaaataatgtgttaatagtttttgacccagttttataattgtttatggcagaaggataagtccaatactagttggactttgtcatggctagaagcagaagtgttgtttttatttaatattgcatacacaatctattcctagggttcctgacctaagtgactctctaaacctgacagttacatgcgttccagggagaggaagctaaaataaatggggataattttgctttttgtaaagagagagaaaaaggtattcgtatctttaaatatttgagtattttaaagtatttttaaaatttcattttaagtcttctacaaaaccttcattgaattatattctttttcttaaattagctctgaactctttggttatgtatcagaaattttcccctgtgtacctccaatctacctttttctgcttacctcctactttatctcacctgatgctctagttgtgttatactatttgttcttttaaaactataccctacctatgtaattttctctttgtctgaaacggccctcttcctttttttaaggcttagcaaacttgacatactacattctttgttacttatttctgcattactcatggttcttcagagaaccatggttcatggaactcatggttcttcaataggtgttgtatatcataatattatatctgtgtaatatataatgtaacatatgcaatatataatatgttatatatgtaatatatgtaattacattatatattatgtatacacacatataatctattatatatgtatgcacatatataggaaggaaaggaatatattatatatgtttgcacatacatatatacgtgtgtgtacaaatattatctatgcacatacatatatatacatacatatatatctgtacatatacacatatgtgtatggtctctgatacacctcacatcctgtggctcactcaagtggacacataaaattaaccatcccaatttccttttttctatatgtgtaattatatatacatatatatatacacactcacacatatacacatatataagtgtgagtgtatagatatatgtgtgtatatataatatacatatatagagagagacagagagagacagagggaggagatttattataagagattggctcacatgtttttggaggctgataagttccaaggtctgcagtctgcaaactagagacctaagaaagctgttgtgtagcttctgtccaagtctgaaggcctgaataccaggaatgctaatggtgtaagttccagtcagaaagctggcaggctcaagacccaagaaacgctgatatttcagtttgagtctgaaggctgaaaaagaccaatgtcccagctcatagcagttagacagaaggagttccctcttgctcagcctttttgtctattcaggtcttcaattgatggataaggcccacccacactatgaaaagcaatctgttttactctatctactgattcaaatgtgagtctcatctagaaacaccctatagtcatacccagaataatgtttggccaaatttctgggcattctgtggctcactcaagtagacacataaaattaacattccaaatttccttttttctattttcaaatgtgattttatcctccttttcatttgttcctatatctgacactttatacactttaccatgaataatcattattctgtcatgaataataaatgtctatttttcattttgagccccttttctacttagcacaattccaggagcttggacattattgcttcttcttctttacttccacacacaatcaattactaagttacattaattattagaatctgttcttttatttttatcatgactgcatttgccatcgtttagggttttacaatttgttgtcaggtcatattggttttctctgtctccatactagtaccagagtaatcctcctgaatcacatatatagcctactaggagttaaaatctttcaacagctttgatagcatttttaaaaatccagatttcttagcctgagcaacagttagtgtaattagcttgcctggtatggtttaggaagcataaactattacatccactttaatgcctattaagaaatgtggcagtggtttataatagagaagtgatgtagagatctatgaaagactttttttgatggaagaaacacaagtgaagtattttttcaggttataagagacagggttatattgcaatgaattattcccacaggaacaactgtagattagttatggaatcagctttcctttccattttttaggttaatattgccaggttttttttaatgctgtgtgttgttattggtgagatgaataaaaatatcagtaaatgtgttagaagggatataacactacaactgggtaaatacatgattgtctttgagtctatctgctctgaaacacaatggtggcattattagagaatagctatcactggaattaataataatgttcagaatctggctaatacataccttgattaattagttaaccccatcttagacacggtagatgagccattgtagtgtcactgaaaatacaggtgatagccacacagttgataagaatcaatctagcaaaatcctctggaaaagggatttagaagtgaaaaggcttgaagtctgctccaagttgagtaattatgttgtgagtttttctgagtgattcatttccctatgcctcagttttttccatttgtacaatgaaggcattgaactgtgtaatgtctgaaatttatatcaattctaatattgaatttgaaatttaagaaatatttctgattcgtgttttatatttttaaacatgtgtatcaatgcttcgggaattaaggactttaagttgcttaatgttatctattgtcaccaattcaactggtaacagctctaaagtctctctatgtactagacagcaaacacccttcttctctccctcagcataccctgacacttaaaaaacaggaaatgtgtatttttggatgttattcaaatttacttagaagtatttactcacttagaagcaatttactcattttgaagtatgctaagaaaggcattttcaaatcctgtagtagttggaaagttttttaaatcttggtttcattttttgacttcatttctggttctagtcatctacattctgaatgtacagaggcctccagtaaattttctagctaatacttgggaagcatttgtaagggaacagagtattatctcccagcacatgttgaagaaaatgataacagaagctatagaaaaaacagtgacagaagctatagagaagaaaatgataatttttatcgcagtgactgaaaggcaaccctggccagtgctgtgatgaggaataatactagtttcattggttaagttctagcattatatacctagagcaggtatttttaagaacaggttggagaacgcttcctgttggttttggattcagttgtgaattcagcaaactgtttagaatccagtatcatttctatgtggccaattttactgcaacataagctataatttgtatacatattgagatttgtccacaacaatataccattgtaaagataataacctgttataaattataataatcatttattagagacaaccttcctgaaataacttggtatcattgaggtgatgaaagagagacattgggggagtttattgcagaagcagagactctataaagaaaatggtgaacttgagggagttgagaactatgtatagtttgattgtggattattctattgtgatcaaactgaaaaagactaattcatagagactacttataaaaaacatttaattaatgagtcagatgctgatggatacatttacactgggagagagacgtcacctgctctactaccaatggaaattgccactctgttttctataaaggattccatacatggcttataaaaagccaaagagtcatcacaaggtttcttttgatatgtgaaattagtacagatagagttgggtaggtctaaggaacatttgtggaggctcagctagaatctggtttgtcttgccccactattgtttttttgagaccgggtctcactctgttgcccaggctggagtgcagtggtgcaatctcagctcactgcagcctcaacctcctgggctcaagcgatcctcccactgcagcctccgaagtagctaggactacaggtgtgtgccaccatgccaggctaatttttgtattttttagtagagatggggttttgctgtgttgcacaggctggtctcaaactattgggctcaagggctctgcccacctcagcctcccaaagtgtggagaattataggcataagccaccccacccagcccaccctactattttgtaaatagtcattggttattagggtactgagttagggttcactcatttgtcaataaaagtctattgagtagagactatgtgtcagaaatagttctggtctctagaaatacattggtgaatcagataaagttcctgccctcataaagcttacattctatcaggaaggaataagcattgaaccagggaactacaattaaacccttattctccagttgtggttttggtgtattctttatctgtcgaaatatccttttttttttttttttgaaaagtagcaatttctcatgacaaacatgttacagattctaaaatttgctgcgcattttaaatttctccttaatttatgaattatatatatataattgatttttccatagatgatcttaaaaagctgggatcactgtggtttgcacctaaagtattagtgatgataggtttaatttgtttagtgcctattgtaagccctgtagtgcggtagtcactatatgtataatatctcatagacttcttacaatactctataatgaggcattcttatctatatttagaggaaacaactgagactcagagaggtcatgtaaattgtctaagatgacacagctaataaatgacagaaccaggatttgaatcaaagttgtccagactcaaaagttatgttcttttccaccacaccactctgtccctcatttactaggtctttcctaaggcaataattacagctagctaattacatttcattctgaaatgaagttatgacttcttccttagtttatttgggtggaatccattcagagcatagagatccttatgcctttaatcagtcagattggactacttttcttttcaaaatctctgagatctaatttgtcttagagagtgtagccaagtggttcaacgtcctttgcccacagctcaaatgtcctctgaaagtaaaaagaagctcactatgagtagagacaggtaattccaactgtggatggatttgagaaagagaatattttttaatattgagttgagaattgtctccttaaagtaccagcatctaccacgctgaagaattacaatattttatccataaaagaaccctctggatattatgtggacaattttgttttcttctggaagctactttttctagcacctacagtttcattctcttcaccatgtgtcactcgcctcgggataggggccagctgagacaagctatagctatgggacgtaattcacagctttgctagaaggtaaacatttcacaaaagctatgcacatacttgtgaagggttttctgtgggagagaaagatcagtggttgtggaggaaagctttttcagaggtcgttgaaacatgactattcacagctgaagactgttatttgtgatgctcactgtcctttgtgataacatttatcatgtggatgcacatggtaaatgcctcctggaattcagtgccagggaaaatatgttggtaatgataaattggtacaattgtcttgataattaaggcttatacacaagtagttttgggggccagagtgcaagtgttcggttggtacctacataaaggaatatcctgtagtatttgattccccaggcagttgtagttggcacagaaatcccctataatgctatgctagagagtgctgcttctcataggtgtttctgatcattgtggggctcgcttcccttggacatggctcagttgatcttgcgtgagtctttgtaccagcttactgattattcaagttctccttaagctatctcacctgacttctcctccatctcctcttccaggaagaggaaaagtcaaagtccagacaaagtagttgcggcgattgccctgaaataggtgtctgctcttagacagacctgttgacttacagactgaatggaaatacaaaggtctgctatactcacgactgtaccctgattctgtgcccaagcttatacaacttgtgtgggctagacctggaatgagagtctaaaaagtctagctctagaatcagctctcttaaaacctacagtatagtgcttcactaataatactttaaaataataaaatgaatgtgaaatccagaccctacttctataaaaaaaaattgtaaaatttaaagtgttgtagagagaaatctatatgttttgttatgtgttaaatagctcttttggataactttaatactgagataaaataaatttacagtaaaattctcagaaggatgagataatttacatgagttcactgtccagatatcgaaacttactccttctaaaaattaaaatatcagagaggaaggcagcgcaagatggccaaatagaagccttcactgattgtcctcccagcaagaataacaaattgaacaactatccacacaaaaaagcaccttcataagaaccaaaaatcagatgagcaatcacagtacccagttttaacttcatattgcttaaagaggcactgaagagggtggaaaagagagccttgaattgccaacagtacccatccccctccccccagcagcagttctgtggcgtggagaaaaaaaaatctgtgtgcttggaagagggagagcacagtgattgtgggactttgcattggaactcagtgctgtcctgtcacagcagacagcaacaccaggcagaactcagccaaagctaatggagggagcaatgagaccagccctagcaaaggggaattgctcagaaccagtgaacttggggggcatgtgacctagtgagacatcagcttgaacagcaaagagagtgcttgcactatccgttccccagccccaggcagtgtagcttgcagctctgggagatacttcttccctccaccttaggagaggatagggaagagtaaagaggactttacttgccacttggataccagtttagccacagaaagacagggcactaggcagagtcctgagggccccatcccagaccttaattccaggatgacatttctagacacaccctgggccaaaagggaatccactgccttgaaggggagaacccagtcctggcaggattcatcatctgctgacaaaagagcccttgggccttgaactttcagcagtggtagctgggcagtactcgctgtgggccttgggtgagactcaaagacatgctggcttcaggtgagacccagtacattcccagctgtgatggctatagggagagactccgtctgcttgagaaaaggggagggaagagtaaagggagcttcgttccttagcttaggtaccagctcggccacaatggggtagagcaccaagcagactcttggagtcctcattttgggccttggttcttgaatggcatttctggacctagccctgaaccagaggggatcccattgtcctgaagagagtgtcccaggcttggcagcattcaccaacatgctgactgaagtgcccttgggctttgagtgaacatcagtggtagccaggcagtactcgccatgggtctggggcaagggtggccacaggcagaaactctgtgcttacagaaaagggagggaagagtgtgaaggacttagtcttgtggcttgggtgccagctcagccacagtagaatagagcaacaggtagattcctaaggtttctgacttaagggactggcttctgaaaaacatcgctagacgtgactggtgctggaggaaactcaccattctgaatggaaggacaaaagccagagtggctttgtcacctgatgattgtagagccctagggatttgggtgagcataggtgatagtcaggcagtggtaaccacagcccttgggtgagaccccagtaccatactagtttcaggtctgacccagcacagtcctaatagtggtgacaacaggagtatttgtgtcacctctcttctagcctagttagctcagcacagagctgagctgtttgggagaacgtaaggaaagagaacatgagtcttttcctggtaatccagacaattcttccagatctgatccaagaccaccaagaagtatctctataagtctgcaagaaccatattgttactgggcttggggtgctccctaatacagatggggctgcagtgaccagaaacttagagcacaacacccaagtgcctttgaatgcttggaaagccttccaaagaaggacaggtggaaaaaaaaaagactgtgaagactacaataaatacccaactcttcaatgcccagacactgacaaacatccacaagcatcaagattatccaggaaaatatgacctcaccaaatgaactaaataagggagcagcaattaatcctagagagacagagatatgtgatctttcattcagagaattcaaaatagctgttttgaggactcgcaatgaaattcaagataacacagagaaggatttcagaatgccatcagataaatttaacaaaggaattcaaataattaaaaaagaattatgcagaaattctggagctgaaaactgcaattgaaatactgaagaatgcatcagagtctcttatcagcagaataaatcaggtggaagagataattagtgggcttgaaggcaggctatttggaaatagccaggggagacagaaaaaaagaagaagaaaaaagaatgggccaggcatggtggctcacacctgtaatcccagcactttgggaggccaaggtaggcggatcattcaagatcaggagttcaagaccagcctggccaacatggtgaaaccccgtctccactaaaaatacaaaaaaaaaaaaaaaatgccaggcatggtgatgtgcacctatagtcccagctgcttgggaggctgaggcccccaacgtcaaagataaagaaaggatcctaaaagtggcaagagaaaagaaatgaataacgtacaatggagcttcaatatatctggtagcagtcttctcagtggaaacctaacagatcaggagaaagtggcatgacatatttaacgtgctgaaggagaaaaacttgtatcctaaaatagtagatccagtgaaattctccttcaagcatgaaggagaaataaagatttttcccagacaaataaaactaaggggttttattaacatcagacatgtcctccaagaaatgtaagggagttcttcagtctgaaagaaaagtttgtaagtgagcaaaaaaaatcatctgaaggtgcaaaactcactggtaatagtaagtatacagaaaaacacactatattttgacaccataattttgatgtgtaaactactcacatcttaagtagaaagactaaagatgaaccaatcaaaaataaactacaacaacttttcaagatacagatagtgtaataagatataaatagaaatagcaaaaagttaaaaagtgggggacacaattaaaatataaacttttaattagttttctctttgtttatgcaataggtgttaatttgtcattaatttaaaataatgggttataagatattatttgcatgttttatggtaacttcaatcagaaaatatacaacaaacacaataaaaatcaagaacttgaaacgttaaaacatatcgtcagagaaaatcacccttgctaaaaggaagacagacaaaaggaaagaaggaagagaagaccacaaacaaccagaaaacaagtaacaaaatggcaggggtaagtccttgcttatcaataacaacttgaatgtaaatggactaaactcttcaatcaaagcacatagagtagctaaatggatttaaaaaaaacaagacccaatgataagttgcacttttccataaagacacacataaactgaaaataaagggatggaaaaatatattgcatgcatgtagaaaccaaaaagagcagcaatagctatacttacatcagacaaagtagatttcaagacaaaaactatacaaagaatcaaagaaggtcattacataatgataaagaaatcaattcagcaaaatgatgtaacaactataaatatatatgtacccaatactggagcacccagatatataaaggaaatattattagagctaaagagaaagatagactccaacataatcacaggtggagacttcaacaccccactttcatcatcgacacatcatcctcacggaaaattagcaaggaaacatctggcttaatctgcacaatacaccaaatgaacctaatgtatatttacagaacattttatccaataactgcagaatacatattctcctcagtacatggatcattctcaaggatataccttatgtcaggtcacaaaacaagtcttaaaacattaaaaaaattggaagttatatcacgtatcttctgtgaccacagtggaataaaactagaaatcattaacaagaggaactttgaaaactatacaaccatgaggaaattagacagtatgttccttaatgaccaatgggccaaagaagaaatgaaaaaggaaattgaaaaaaatcttgaaacaaatgataatggagacacgacacactgaaaccaataggatatggctaaagcggtactaagagaaaagcttatagctataattacctacgtcaaaaattagagaaacttcaaataaactacctaattatgcttcttaaagaaatagaaaagcaagaataaaacaaacccgaaattagtagagaaaaaataataaagtttagagtagaaataagtgaatgtgaaattaagaaacaatacaaaaatcagtgaaagaaaatattggtttttagaaaagataaataaaattgagaaaactttggccagactaagaaagaaaagagagaaggaccccaaaaaaatcagaggtgaaaatgaagacttcacaactgatactgcagaaatccaaaggatcattagaggctactgtaaacaactctatgccaacaaattggaaattctagaagaaatgcatacattcctagatgcatataacccaccaagattgaaacatgaaaaaaaatccaaaactggaacagacaaatgacaaataagcagatcaaagcagtagtaagtcacccagcaacgaaaagcctggaacctgatggcttcaatggtgaattttaccaaacatttaaagaagaactaatatcaaccctactaaaactattcagaaaaatagggcaaaagggaatacttccaaacttatcatatgaggccagtattaccctgataccaaaaccagacaaagacacctcaaaaagaaaagaaaactataggccaatatccctgttgaacattgatgcaaaaaccatcaacaaaatactagcaaactgaattggattcaataactcattaaaaagatcattcatcatgaccaagttggatttattccagaaatacaaggatggttcagcatacacaaatcaatcaatgtgatgcattatatcaacagaacaaaatacaaaaaacacatgatcatttcaattgatgctgaaaaattatttgataaaattcaacatcatttcatgacaaaaaccctaaaaaaaatctgggtatagaagaaacatacatcaacacaataaaacccatatatgacagacccacagctagtatcatagtgaatggggaaaaatggagagcattgtttctaaaatctggaacatgacatggatgctcactttcaccattgttattcaacataatagtggaagtcctagctagggcaatcagacaagagaaagaaataaaaagcatccacgctggaaaggatgaagtcaaattatcctcgtttgcagatgatatttttgttatttggaaaaacctaaaggctgcacccaaaattattcaaattgatcaacaaattcaataaagttgcaggatacaaaattaacatacataaatcagtaacatttctatatgccaacagcaaataacctgaaaaagaaatcaagaaagcaatcccgtttgcaataactacaaataaaataaaatatctaggaattaatttaacaaaataagtgaaagatttctacaatgaaaactataaaacattgatgcaagaaattaaagagcacaacaaagaaatgaaaagatattccatgttcatggattggaagaatcaatattgttaaaatattcatactgaccaaagcaatgtacagactccatgcaagtccttcaaaataccaatgacattctattcttcacagaaatagaaaaaaaattttgaaaatttatatagaactgcaaaagacccaggaaaaagctagaattatccagctaaagctatcatgtgcaaaaagaacaaaactagaggaatctcattacttgacttcaaattgtactacagagctatagtaccaaaatagcatggtactggcataaaaccagacaaatagaccaatggaacagaatgaagaactcagaagtaaatccatatgtctacagttaacttattgcataaacaaagatgccaaggacatacattggggaaaagacaatatcttcaataagtggagctaagaaaactggatatctgtacgcagcggaatggaactagaccccctatctctagctaaccatatacaaaaacaaaaacaaaacaaaagaaaaaaaacggattaaaggcctggtgcggtggctcatgcctgtaatcccagcgctttgggaggccgaggcgggcggatcacctgaggtcaggagtttgagaccagtctggccaaaatggtgaaaccccatctttactaaaaatacaaaaaattagccgggcacagtggcacacatctgtaatctcaggtgctcaggaggctgaggcaggagaatcacttgaacctgggagtaggaggttgcagtgagccgagatcgcaccattgcactccagcctggggagcaagagtgaaactccatctcaaaaaaaaaaaaaggttaaaggcttaaatctaagaccttacactatgaaactaataaaagaaaactttgggaaaacactccacaacactattcttggcaaaaatttcttgagtaataccccacaaacacaggcaaccagaccaaaagtggacaaatgggatcacatcaagttaaaaaccttctgcaaagtgaaggatacaatcaacaaagtgaagagacaacccacagaatgggggaaaatatttgcaaactatccatctgacaaggaatcaataaccagaatatatgagaagctcaaacaactcaatagggaaaaaatccattaatctgaataaaaaatacatgaatatctgaatagacatttctcaaaagaagacatgcgaagtggtatataacaatatgctcagcatcactgattatcagagaaatgctaacaaaaactaacaatatgtcacctcaccccagttaaaatgatttttatccaaaagacaggaaatcacaaacactggccagcatgtggagaaaagggaatccttgtacactcttggtgggaatgtaaattagtacaaccactatggaaaatcgtttggaggttcttcaaaaaactaaaaatagggctaccatatgatcccacaatcccattactaggtatatacccaaaagaaaagaaatcagtgtatcaaagagatttctacaccctcatgttatagtaacactattcccaatagccaagattttgaggcaactgaaatgtccaccaacagacaaatggatgaagagaatgtagtacatatacacaatggtgtactattcacccataaaaaaagaatgagatcctgtcatttataacagcatgaataggactggaggtcattctgttaagtaaaataagccaggcacagaaagataaacttcacatgttctcactgatttgtgagagctaaaaattaaaacaattgaactcagggggatagacagtagaatgatggttaccagaggctaggaagtgtagtggcggggaatgaggatagttaatgagtacaaaaatgtagttggaaagaatgaataagatctagtattcgatagcagaatggggagactaaagttaacaataatttactatatatttaaaattaactaaaactataattggattacttgtaacaaaaagaaaggataaatgcctgaggtgatgaataccccatttaccctgatgtgattattatgcattatatgcctgtatcaaaatatcttatgtaccccataaatacacccagtatgtacccacaaaaactaaaagttaaaaaaatcaaaatatcaaaagcaaaaatcttattttatatatatatttttaaatgtcttagaaaattctcaacatattttacaatttttgttaatgtctcaggatcattattattaattttaatagttgtattgccctgtaaaatacactttcggagacttgttgacaacttgataggctttctggtgttatttgtcttcacacatgatggcaccatgtattgtgactttggagggcatgatatttgttggtttgttgtttgcttacttttttgctataaaatagttatttctcaccatatgttttaaaatctgtctatttcaacttttgcttcttgataagaggttagcagtccttttctgctaagagccagatagtaaatattttaggctttatggaccatatagcctttgtcacaatcactcgactcaggttgtagcctgaaacagtcatagacaacacagaaacaaatggctttggctgtgttccaatggaactttattttcaaaaacaggcagtttgctggatttggtgtgtgggttgtagttctagaccgttgagcgtggtgaaatagccgtgtagagtaatatgtaaaaaagtaaatagaatttttaaaaatgtaagtacatattgtattaggacataatgttaccctacaagctatgtaaaatttagtgctacaattttatgacagcatttgtgggtggttagatgtctttcttttgtcccttctttgcatcttctttcaggtttgtatctatgtggcagatatttggggttattgaatgaatgagctctagaacacttgcttcatatgaaaacgtgcatatgtatgtttatgtatctcagatacagctaaattcattgtaccaattaagacctagctaagattggtttgagctccattctatgaattttagagttcagtagtgcccaccccaaccaccagcaagttgtatgcaaattttcagtgtgagtttatattttcaaggtctcctctggctctgaattctgcttctgtcaaattatttcattttagagattgtacagctatccttgttctctgaaaaagtctcttggccatttctatacctcagactgcagcctcctaccatggtttttggttttccttagtcccttccagatggctcacaggagctccaaattcttctcacattgttctgcagattaattccatttcctccagtcttactcccaaatttctctctgactcctctgtgcatgttttgatctaccaagatgctttgctgaagaaagaagacctattctcccttaattgaactgtcttcctaagaagggagttttaattttaagtagaattttttccctatggatatatggatgaaagactaggtggatggatggctaaaaagatgttatacagtactgtatattaggatagctacttcatatggaggctagtaccaaatatgaaaaacctatttttagcttattatagttgattttgtgatctagatattattcagcattgttcttcaaatcccctgccatagccaaaacacaccttatatactatttcaggaagaatttttttcatttcttatttgtttcattttataacatatcctaataatgattttattacaaaaggagtcaggaataccacttcatatgatagtctactaaatcttaaaaatagaatataagatcataaattgtgtaaggtaaaagttagacttaaaatcaaagtatccactgaaacttacaatagtaaggtggtatttctatttggaggaatgtctccaaatctccaatattagaaaaatagttatcttattattattaaatagttctaaaatcggtaattttaaaatgattttattcaaaattagtattattcagtcatatatgaattatcagccactcttaattgtctacaaagagcactgcaaagaacatcaaataaacagatacatttttaatagactaaagagcatggtggttcatgcctgtaatcccagcactttgggaggccaaggcagggagatctcttgaggtcaggagttcggtaccagtccggccaacatcacaaaaccccatcttttctaaaaatacaaaaattaggtgtggtggcatgcacctatagtcccatctacttgggaggctgagacacgagaatctcttgaacccaggaggcggaggttgcagtgaggcaagatcataccactgtactccatcctgggcaacagagtgagactccatctaaaaaataaaaataaaaataaagagcttacatctggttttgtttctggaagtgatagaaatatgattaaatgattagaaaaaatcagaagtttaaaatataagttaattttttaaaaactcacatttcctgagcactacagtaacctaaaaccagcttctttgaagtttactcagtgtgttgaactgtaatggaaagctagcagctatactgcttatacttttttcttagaatcactagaaaatatttgaccataaaaaatagattctgagtaaaattactttttttaaacaaccaaacctgatccttttgtagttcgtaagcatgatgattgggtgttcacgtgtatgtgtgagatgtgccacccttgaaccttgtcaagacatcggcacattacccatctgatatgaaaaaaaaaaaaaccctgtcatcttataaaaattcacatttataaagaggaatagagataggacactgaatgctttgggtttgttttgtcgacatttatgttttcaagcaggcttgcttcatccaatttttatattcttttgaggaaaaatacactgccaggaatcacagtatgcaatgcaaattagacacagaactattccctatggactttctagcctatggagagagatatgcatgcagacaacagagaaaaatggggtcgcttctgatgtttggactggcccacgataaactttaataaactagaagagacatagaggacagttttggctaaggaaagaaaatgaacagaggctcaaaagttcaaaagtctatgtccaagtaaagcaagtgcaggcttacattttactgtctttaatttctaaattcaagaagctctgaagaccactgtgtgtgttgttgtttttccttaagctacagactgacctgaattgacaggaggctatttatagtctttatttgtcctacttatgagaatatttatagattttactgcagaaatatcaatgtatttcattataggtgcaggccccaacatacatggattttgctaatattttatacattaactgtattactttaaaaaaataccaccttgttccccaaaaacctgaattacaaaactcactcggccccagctgtttctggtaaaggattgtagacttgaagtaattatgggggaagtgatattatagaaactatgtccagaaagctaggtgaagattgtgccagttcttgaacataccaagttacagattttggtaatttgactatagattgtaaggaaccattatacacttttgaagaagaagtgaagtattcaaccagtttttatcaaaattggttgaatccctgagcacacgctattttaaattttttctccatgcaattacaaaaactctgagtaagatggtgtcagatgaaatgccttttgaaaatagatatttacatccatcatttgttttcttgtgatggtgtgtaggagaaataaggttagagaaaacaattctagatcatgtctgcagcttgctaagtgtcatgccacataaatatggtcagagtttgatgtccccaaatgactatgcattaaaaatacaagaattgtctcatagaagaaaaaaataaacaagcaaaaaaccataagaaatagtgatttatttcatatttgttcatgtttcttgctaaaaatacctgaaggcaaattccagaaaatttgtttctgatttggttaagaaaattgagaaattaaaaatgttattgtcattgttgtgtgtacagtgtatgtgtgtcactcatagtgagtctttaaactctgcctttaagaacaagcatcaaaagtttggtacaaaatcaatgttcacaaatcagtagcactgctatacaccaacaacgacaaagttgagaatcaaatcaagaactcaattgcttttaaaacagctacaaaaaataaaaaaaatacttagtaatatacttaagtaggtgaaagatctctacaaggagaactacaaaacaatgctgaaagaaatcatagatgacacaaagaaatggaaagacaacccatgctcataaatgggaagaatcaatatagtgaaaatgactatactgctcaaagcaatctacagattcagttcaatccccatcgaaaggtcatcagcattcttcacagagctagaaaaaaaaatcctaaaattcatatggaaccaaaaaagagcccacacagccaaagcaatactaagcaaaaacaacaaatctggaggcatcaccttgcccaacttcaaattatactacaagactatagttaccaaaacagcatggtactagtataaaaaataggcatgtagaccaatggaacagaatagaaaacccagaaataaagccaaacacttatagctaattgatcttcaacaaagcatacaaatacataaattggggaaaggacaccctattaaataaatgttgctgggaaaactagcaagctacatgtagaagaatgaaactggattttagtatatgctaatccagaatgtaggtctaatgctgagtgtctaggaagaccatggactaaaaacaactaacaaacaagaaagcactatccaaataagctgccatcagattaacacctcctaagcaaaagctacttatattcctcaactcaaggtgtcagtgacagcatcaagcgtgtggtagaaaattaaaggagggggttgatttcccaaattttatcttcacataacttcctttcaaaatataacaacccaaaatgttgttaataactttaagttttaaatttcacctttaagaaaagtattttcatttgctttaaaataattatacgttttaaaaatagggacgaccagtgggtgtttcataataggttctgaccggagaaaaagaaaaaaaaatacccaaacctcttttttcggaatgtactagtccttttgaagaagatcttctgtaaatggggagtccactaagtgctaatctctatgttaagcatttccttttctttctttcttttttctttttgccacaacaaacctcaaggcagactattagctttgttttgcaaatggggaaaatgaaattaaagttaagaaatgtgtccattaacacacagctgggacttgaactcagcaatgtgtagctctcaagtgtttcttgtgatgtcatctaagactttgacaaccaaactgatcataatctctacaatgtggagtggacaactgaaatgaaaacaggaaagaaaaaaaatcaccactctaataacgtgtgtagctgtaaactatcttgctgtccaatatttttcttatagttttaaaacattaaactgcagggctgggtgtggtgtctcatgcctgtaatcccagcactttgagaggccgaggtgggtgcatcacctgaggtcagttcgagaccagcctggccaacatggtgaaaagctatctctactaaaaatacaaaaattagctgggcatggtggcatatgcctgtaatcccagctacgtgggaggctgaggcaggagaattgctcaaacccggtaggtgaaggttgcagtgagctgagattgctccattgcatgccagcctgggtgacagaacaagactctatctaaaaaaaaaaattaaaatgcaattcagataccataaaatttacccttttaatgtgtacagttcagtggttcttagtatatgtataagtctatgcacccatcaccactctaattcctgaacactttcatcacctcagaaaaaaactccatgcccattagtattcacttcttatagaattttgatgaagcaaaatccttcaaaagctttctactaaaagtccaattttcttagatttctccttcaaacaaagacaattcttaaatattttatagatacagaagagaaattattaaaataatctcaaataacaaatgagcaatattgctgttgttgaataaatcttcaaggatgaaaggatgaaaaggattattactggtagagtttcccaaaagtcataaatgtcaataagcttctccaccatatcattaccacaatttttaaggacctacgatctggcaggcaccatattaagatattctatctcaatttattctgacaacaattctaaggaagtatgaatactcactctattgtacacatgaaaaccactgaaagaaggagcagtcgtctcatccagtaaatgtaagggttgagaggtaatcctaggtccagtttgatttcaaagctcaacctctaaacactaagctccaccaagtgagagaaagtggatcaaaagagaatgtagatgtcaaattaaaaaaaaaaacaggatggagagagaaggatgaacagaagtgggttaagggtacaaacatacaatccaataagaggaataaatgtaatggttggtagcagaataggatgaccatgcttgacaaaactgtattatcctcaggtgatggacattttagataccttcccttaattgctacccattagatatgtgtaacaacatttctcatgcacctcactgatatggtttggctgtgaccccacccaaatctcatcttgaattcccatatgttgtgggagggaccccatgggaagtagttgaatcatgagggtgggtctttcctgtgctgttcttgagatagtgaataaatctcacaagatctgatgatataagggggagtttccctgcacaagctctcttcccttgtctgccaccatgtgagatgtgcctttcaccttctgccttgattgtgatgccccccgagccaggtggaaccataagtccattaaacctctttcttttgtaaattgcccagtctccagtatgtctttatcagcagcataaaaatggactaatacagtaaattgataccagtagagtggggtgctgctgaaaagataccctaaaatgtggaagcaactttggaactgggtaacaggcagagattggaacagtttggagggctcagaagaagacaggaaaatgtgggacagtttggaactccctagagacttgtcaaatggctttgaccaaaatgctgataatgatatggacaatgaaatccaggctgaggtggtctcagatggagatgaggaaattgtgagaaactggagcaaaggtctcttgttatgtgttagcaaagagactggtggcattttgcctctgccctagagatttgtggaactttgaactttagagagatgatttagggtatctagcagaagaaatttctaagcagcaaagcattcaagatgtgacttgggtgccatcaaaggcattcagttttataagtgaaagagagcgtaaaagttgggaaaatttgcagcctgacaatgcgatagaaaagaaaatcccattttctgaggagaaattccagctgactgcatacatttgcataagtaatgagtagctgaatactgttccccaagacaatgaaaaaatgtctccagggaatgtcagaggtcttcatggcaccccttcccatctcaggcctagaggactaggaggaaaacgtggttttgtgagtggggcccagggtccccatgctatgtgcagcctaggaacttggtgccctgtgtcccagctgctccagctgtgtctgaaaggggccaatgtacagctctggccatgacttcagagggtgcaagactcaagccttggtagttccaatgtggagttcagcctgccagtgcacagaagtcaagatttggggtttgggaacctccacctagatttcagaggatgtaaggaaacgcctagatgttcaggcagacttttgctgcaggggcagggctctcatagagaacctctgctagggcagtgtggaagggaaatgtggggttggagcccccacacagggtccctactggggcactgtctagtagagctgagagggccaccatcctccagaccctagaatggtagatccactgacaggttgtaccgtgtacctagaaaagctgcagacacacaacaccagcccatgaaagcaactgagagagaggctctaccctgcaaagccacagttgccgagctgcccaagagcatggggacccacctcttgcatcagtgtgacctggacctgagacatggagtcaaaggagatcattttggagctttgagatttgactaccccactggatttcggacttacatggggcctgcacccctttgttttggccaatttcttccaatgcttgaaccctcattgtatcttggaagtaacaaacttggttttattttacaggctcataggcaaaagggacttgtctcagatgagactttggactgtggacttttgagttaatgctgaaatgagttatgactttggaggactattgggaaggcttgattggctttgatatgtgaggatatgagatttgggaggggccaggtgtggaatgatatggtttggctgtgtccccacccaaatctcatcttgaattcccacatgttgtgggagggacccagtgggaggtagttgaataatgggggtgggtctttctcctgcgctattctcctgatagtgaataagtctcaccagatctgatgattatataagggggagtttccctgcataagctgtcttctcttgtctgccgccatgtgagacatgcctttcaccttccaccatgattgtaaggcctccccagccacgtggaactataagtcattaaacctctttcttttttaaattgctcagtctctggtatatctttatcagcagcatgaaaatggactaatacacccataaatatgtacaaataaaaaaataaaaatgaaaataacagttcagtctaaatggattatttacataagcccaggatgctgaagatggttatctagtgctggctcctagaagcattattgcagtgattttcatatctacatattgaatgcttacaatgtgcacttgcataagaccatagaaaacagatctttctgatccttccatttttcattatttgttaattaacctataaaactagaaatggaaacaatggcaaaatctggaagtatacaacctttcagactaatactatgaacctcttctcccaggtctttgtctgttggtcttccaggatctttatcctaaactagtcatcatcttagtttattttctgttgttataacagaatatcacagactgtaatttataaagaaaaatacatttaatttttgcagtcctggaggcagggaaggctgctagcatctggtgagggcctttttgctgtgtcatatcatagcagaaggcaagtgtgtgctagctcaggtctctcttcctcttcttataaagccaccagtcccattgtgagggccccactctgatgatgttatctaatcctaattacctcccaaaggccccacctccaaattttatcaatatatgtttggggattgagtttctaacacatgaaattttgaggacacattcaagtcagcatcaatttaagggttccaaaggctccttttctcctggcttgcatttcttttggattttttcaagacttcctttatttttatcatacttgaaaccatgtggtaggtgtgtcattgatttttaggaaagacagaaggcatgacgcatactgcttttgttgtaactgaaatgtaaggttataataaatttgattaaggctttatcttcagtcgaaccatatggttaactctaaagaaacagaatcatataactattctgcaactcgggtaaagttttcaattcaattcagcagatatttattgaccatttcctatgttttgagtagcatctgtatattgcgaaaggcagaaatagtaatatttcatgatgaatgacttttaagacttaccatgaaagggaacaaaagtgactgtgtttgtgtctgtgtgcatgtgtgtgtgtgtgtatgcgtgtgtgtgtttataagcttgaggtgaggaactgtatataaagcatgtgcccaactaattgtgacacaaactatgatgtgataagtgcctcagcatttcctgattcctctggctaaatcaacacttctaccacctctttagacaccataaaatcatgtacttctccacttttgcagccgttacagttgtaataatatattagtttgcatgactatttggctaaattttcaagaagtactttggctttttggaaatcagagactattgtgtgaaagttctgtgctaagaaatatgcgcaggtaagctccaaagaagggcacctaatccagccagggaaggtttattgacagaggtgataatgaatccaatttttgaagggttggtgtgaactcactggaagaagaaagaaagcaggatagtctaagcaagtgaactatcatgtgcaaaaacatgtagacatgaacatggaagtgtgactcaggccaggcgcggtggctcatggctgtaatcccagcactttgggaggccaaagcaggcatatcacgaagtcaggaaatcaagaccatcctggccaacatggtgaaacccatctctactaaaaacgcaaaaattcgctgggcgtggtggcgcacacctgtagtcccagctactcaggaggctgaggcaggagcatcacttgaacctggaaggcggaggttgcagtgagccaagacggtgccactgcactccagcctggcgacagagtgagactccgactcaaaaaaaatagaaaagaaaaaaacggtgagactcaaggacatggatggagttaagttcatgtacggagataaaagaagacaagcaaatcatcgtaggttttatgtaccaaacttacactgtcgacttaatcttcaatacaatgaaaagtttctgaagagccacattctttagggacttaagttttggggtgattattttggcagtatggaggctaaattgaaggcagttggaatatttttgtaaatatgttgtagtaattaggcaagatgtgatcagggcctgaaggaaggcaagaataaagtgatggatgttagagatgttaaacaaatagtatctgtaatactctctgattggagataagttagcaagaacagtctaggatggctcacaaggctttgaatttggaaactggatagttagatgtagttgctcattaaaatatggagctcaagaagtttacagagaaagatacgtgtccagttgtagttattattattatttttttgaaatacctgtggatcctttagcagaggtttccagggaaacttggaaatggatgattaaatctatgtaggtatcttgtcagcagacacagatccaggagttatcaatagcgtaggaattttaatgtgtaagaagatgcctagtaacagtaaaaatggagaagagattgaagcttggtaaatagtaacacttagaggatggcagaaagagaactatgatgttaatagagaagtagaaggaaaaccgagagaaaaatgatgtttctgaagatgaggaagagtttcttgaaatagagtgatcaataatttcaacacatataattactgcatctttgtagcattaggacaaaatgtgtccattttatctggaatagccttgattatggtgattttataaaaagaactttggtgagattgtgcaagcaggaggcagcactcgggtttaagaaagaaaagaaatgctgaagtgaaggtagtacatatagcctcttctttaagatgtttgtatgtttgtggaagggaaaaaagagaggatagaaaaataatgcacaaaggagatttcaaaattccacatgtgccttttgcctggtatgtgagagtggcaactttggccttaacctgtgttctgcacaggcagaaagatatatacatacgtacacttgtgaatatatttgtgagcataacaatcaccttaaaggggctgaaatattcattctccaaattacttcatgtccaacaagcctttgatatggatcctaatgaacatctccagttaaccctttttctcctcctttcccacaaccatttgtattaggacagttaaaagcttgccatcaggaaagttagccaaagtcataagcttagactctttcctatgcccttttctgaaagttaacactaatagaaagctcagagtttactgtaaaggcaatgcttatttttattggtcagatctttaaatgaatggctgccttctgcttctaaaaagcagacaatttacagagaaaattcaatttccagggaaaggaaaaatgccctgaaataatttctatgcctattatcaagtaagtttgattctgatgctatcaaaaccaggggcagcatcatagtgtcttttggagaatgttgcactaggaagggggcaggggttctgagccacttagttgcagccctgctgctgggggccaggtgactttagaagtcactgtcccttttttgtattttttttttctgttaaaggatggagttagaaaataaatgtctaccatgagttgacttatgttaaaattttattccctaaaaccccaaatgaagtcattccacatatacatatcctttttctatctgcattttggaagaacctcttctttacaaatatcatgatactgctatgtggttttacatggtttgcatccctcctcggcaatcagaatcactcttctcatctgtgctatcattaccacaggcttcacatttctctatccatctcaacattgtttgtatagctatctattatttccatccctatgagatagtgagtccactgagggcagggttatatttaaacaaaatatgcactcgctaaatgtgcagtgaatagaaatgaatattgtttaattcatttaacaggtggacttaatagtatcttataaaatttgatgaaagttttatttggagagcttggataatacgaaagctaaaagaggttgggtgaatctttattatcagacttgggtagggctctttattactgttttggtgtctttaatactcaagattgttgaaattccagaagggcatgtgggaatcaaacatggtttataacaatcacatggaagtaactatttttcccaatgtcacctaaatgtaagacttcccatttaaaaatgaatatatagtttaaaagtaaaataagagtagcacctcagatttatggcactttggaaatttcttatcatttcctcatgcatcccttcatcctagaggataatgatcatcaatacttgaactccttttggtaccaacattctactgttaggctctgagaagttatgatgttcacttaggtcttctgattctcaaggcatcaagactatatcctgttgcaacttagaaataacatttctagtccctgtgtgtctccttcacattctggatttttgtattttaattaagcttagtaataaatatgttttaaaaatcaaagccaaatttatataactgatttttgttgtaatatgttatttattttgaagaatatgcatatggtacatttttaaagtataaaatggaatgcagtcaaaagtaggtctccctctctgttgtgttctgctacctaatctttctccctcagacgacaactgatgccaatttcttgtgtaccttttcagaaagagtccatgagtttataaacgtgaacgtatgcacattcttattttctagattacacaaattgtggcaaactatatttattcttttatatggttgttaaattcagtaataaatttcacagatctattcatattaaaaaaattgtagcacattactttgtgggaatataccaaaatgtaagttagttccttattgatagattagtatcactactatcaaatagtgttatcaacaatgttgtaccgactactttgtgcagttgtcactgttgtatgcttatgcaactatatctaaaataactaaataagaatttgccaaagggggaattggctttttaaagtttgaaggttagagacaaatagctatccataaaggcattaatgcttacttttaccaagaatgtatgagggttcccatttcctttatattctctctagtacaccaagttatcaaacatttttatccttgaaatcttatacggtattaatatttgattttggattatatatattatttcatgtgtgaatctgatgacttttcaaatgtttaaaagtaagttatatcttctatctaattcatatcctcactctaaattctttctgagctattgtttttaaatgtaatacagaattacaaatatttttcccaattggaaaatcacaaaaaagtcccccccgtttttttttgttttttttttttttgagacggagtctcgctctgtcgcccaggctggagtgcagtggcgcgatctcggctcattgcaagctccgcctcccgggttcacgccattctcctgcctcagcctcccgagtagctgggactacaggcgcccgccaccgcgctcggctaatatttactatttttagtagagatggggtttcactgtgttagccaggatggtctcaatctcctgacctcgtgatccgcccgcctcggcctcccaaagtaaaagtccccattgttttcatttcatcaatatttaaataaattatttcttacatattctaggtaccaagatatacaaacataaaagatatgaacatgaacaccaaaatttggaggcgaaaaggctcatagtctcttggggggaaaatatacatgtgcaagctgaataaaataaatcctataatagaggaattgcagtgtgctgtgggaactacgaggaagctgtgactgctttgggggaggcggggagataggagggaaagtttaccagagagatcgctgtggcttctatggtaggtctcaagaaatgtgtataatttatagggtcagagacgtgttcaggtgataggagaaaagggtggaaacacccattttgtattgtgcccctcctttggtaatgagttttgactaatgagcaattgctttttttccttgacattcataagtatttattatcctgaactgattgacctcatattttgcaaaataaacagctcatattttactatgatgatttaaaaacattttccttccatttgaattagataactcatctttaaagttttcttatggctaacgagctcgtgtttattcaagacaacttgttacagtgctattagaagagatggaaaacgtccaactgcagccccaaatcctggaggtatctatttgaagataagaaaaaagttctcaaacaaatgacaaaatgttcaaactcaatcataattagagatatgcaaattaaaacattacaatcacactgacataaatgaaaaagtaggacaatacattatgttggtaaggctgtgggcaaataggcaatcatatattgctggcaggaatctaaattcatacaagccttctggagtaaaattcagcaatacttagcataaatatctatacacatacttttcgacccagcatttctttttctaggaggctaccctggaggcacacagagtgtatttctcacaggagtattggttagcagtgttttctacaatatgaaaatgctacacacaaggttacttattgcagcattgtttataatagtacaatactggaaacaatcaaaagaccactacatagaagagtgtgtgtgcatttgtacaaaagaaacacaggcaagataaactaaagaaaccagttacctataggcagtgcatgggaaataagtggaaaaaaagagggaacaggaactggccaggagggataatgagggaataacgattatcaagctatactttttggtaaagctttgactctaagtaccatagtaacgtttcacgcacccaaataaaaaaaataatttaagtaaactaaatctagttaaataattaaaatcaatgtgtatggaatataagtttacaaatgaataaccaaaccacactgaagaggatgggcaagtaaagaagcaacctaagtcactttcaaaagaaaatagtattttgattggatactgtaaagttcaagacaaaaataagtgtacataaatactgtactcttgtaataagtgtttctcacaggagtatcagttagcaattctctaactaccttaagtgtatagtaggatttaataaataagtgaatatattataaataacggaagtcaggcctttcactgtcagaaagaagttacaaataaggaaaaggcaaaaaataaaatgaacctggtggtattgacttaggattgaagtattaacgatatctatctctatctctagctctacatgatatatcagaatctatctaaaaagatataccgatagaaatgtagaaataaatatgatgtacgtgtatgtgtatatagatttcctagctctctctgctgagaggacctgagagcaataacaccccagtaagaatgaggacacttagcgctcagatgttggttgctattgttctccaaagaaagaacccagactcatttggcaatcatttgaatccagggctagggtagaggggacaaaataaacttggaacattatgtgatgccaaacaattaaggaactgctaaaaaacaattggggtatgtcaaaaggacacaatagcaaatcagaaggatctcccaatggctaaagccagaacaattttagccacaaaataaataatgatagtattggattataatccttagaataaatatccttgaggccatactgatataaataaataactgaatacataaataaatgtaggagaaggaacagctcttacagaattcctattactttagacagaataaaggaaatacaaaagtcactgccgggcaaactgcacattaataattgttgcaagcaagatctgtcaatggatgctaaaatcagtggataaaagtttgaggaaaaataggacattagcacagcatcaaagttttttcctcaatatatttatcaattataaatgaaaaaaatgtaactttacaatatggaaatctagtagacataactttaaccaggcaatcaaggttaataccactaactgacatcatgtaccctcccccctgccataatgatatactaagaaggatacaacatcacttctatggcattcttgccaaatgaataaccttagactaatcattagaagacattggacaaatccaaattgaaagacattccgcaaaatatttgaccaatacctattagaaatgccaaggtactgaaagacagggagactgagggaccatcacagattgaaggagattcaagtgacatgacaatcaaatgcaatatgggtcgtagttggatctggtacagaaaaaggacatgagggtggggaagagctggtgagagctgcatagctggtgagagctgaataaagtttgtagtttagttaatcacaaggtactagtgtaaatgctctgggtttgatatttgtacactggtcatgaaagtcattaacattagggaaattgggtaaatggtatgtatgaactctcagtcttattttataacatttgcataagtggaaacttatgataaaaaagtttggaaaataatagaaggagataacgaagatgaagaagatgaagagaaggagaaggaggaagaagaggaacaggagtcagggaggggaaggaaaaagaaataaaaaagaacaaaaggaagaagagaaattttaaaataacatgtttgcttttttaaaaacagtatcaagattgtatttgaaggtattgctaagatgagagctacaggcatggttttgtgccctttcagagtcaatgggctatatgcataacatggaacaaaaatgccatgttagatatcgtactgattttcatcttttagtttatatgttggtttctttgtgaaaataaatttaatatcaattcaacagacattttgccattgatatattcaataaaagttttgcaacctggcatgattctttatatgttattaccaattcaacattctcttccaaacagataaatatactgattaattgcacagctgatgccaagagtgaacagatgcctatgtttagtcttaatagaaaaatatcttagataagtcacaatttaaatatctcaaaactcccttacacaattattaatttctacaaactcttagtaattatttttaaaaagaaaaaatttaggtactaggaattcaaacacattcatccatcattatataccagaattcctaatccttctcaaaaagtgctaacttattttattttgaagccacactggtgagtcacttgctataatttgtccaagatgtctaagtcaattagaaaacagaaagaatggctaactttaaaaaatcccaactacagacagataacataatttaaaatttgggtattaaaacaataatatatctgaatataaaattaaaaatattattgccagtaaaattttgagtttggcttatgggataatacacagaaaggagaaaagatgaatgttcttgttcaaactaaaatacatcactttcttacccttcatgtgctcctggctattttttttgttttgttttgtcttttttgggatgttatgatacatgtaaaaatgaattctgatatattgctcaagatacttcagaaagactgtactctgtgtgcctaattgtggaagtgggtgacaatcacatgaggagttgctttaaaaagcatgaacattgaaatcctgataagtgtaagagccttttttaaaaaataaaaaactgtctaagtaatacaattctactgatcaagtccctttcatacttacttacaaagtagaaacttatgttgatatatacttacaaagtacgagcttactattatcaaatgtccatactatacagtaagaaaatattttgcattaaaatgttacgtgccctctgaactcacctgaaagctcaataccaacaaaacaatctataaatgtaatacttcagtttgtttttataagtactgtgatgatccatttcctctctggtcataagaatcactgtgatagccatttaaacaatacagtacactatttgaatattaattgtactgagttgtctttcctgctttgcatcctaaaagtttacaatcctgttgtggagtaagaagactcacacataaatgcttcctataatcaaataacagagccactgtattagacgtcaatagtctaacacccagaacccagggaagttggtaataacaccttatgttgcaaagataattaaaatcttcaaagcactttcacatgttttacctaattgaactcttgccacaaccttgccaggaggcagagagggttgtgataaatataaaaactgatgctcaggaggtcatatgtgttttaaaatcacacacggacctgttcactctgctcaagtgccgtcgagggaaccacagcattgtcctgttcatttgctatttttccaggagtagcacttccctcaaagtaaggaaatagctctaggtattgggttccagaataggagagccctaccggaaaaccgtgttccgctgcagcacaaaggactatttttagatgttttccttttgctaattgtctctccctctgtggggaatttctatgggtagaatcccagatgagccaattttctcactaattctcaaagagacaggaaagatgaagaccatggctcaggttgccctggggctgcataacttcttcggtgatgtcactgcagtggttttaggaagatcttcaaggaccttggagcttaaagagcttgtgataccactgaacaacaggactaagaggcgactagaaagaaaggcctgggcatatcttcttgaatcttggaatcaccccaaatgacctttcctggagcttcagctttgaaaggagctaagagggtgtgaacccaggtggtggctgtaaactcaagcggccctccagatgttctggtttttcttccatcacctctgagagaaaaaaggaagagacttcttccaggcaacttcaaacatcatttcaagtgttagggagccagtggaaccgcgaatgtttagcctatataagagaaagagaacaggtgtgatgcaaaccatttttactcccttgcagggaagagctaaccagttagtgctaggcagccttgagacaatggatggaacaaaggtgaggtcagttgttggctcaacctcagggaaaacctaacagttttcgtgcaatgaattacctagggagctgctgagttcactgtcacctggattattcaagcagaaattcactggtatgaacactggcattcatcggaaagtgaaaatgattcacaaccctacaggtggggtctaaataataataattgcaaacactattttagcacttactttaaaacaagtgttttcttaactctcagggggtgtgtgagacagatgctatctttaactttcttttaaagatgagaaaattgagggacagagcggttaagtaatttgttcaaggtcacacacctagtaggaatttgaacttaacgctgcttgtctctagtgtctgtgctcttaatcacttgtattgctaagtgtcccctaaagtcccctcttgccctgagattccacatagggttacgtcctgtcacttcgacagcattcttcccatgcttactcattgcacttccaaaagggcattgttggcatcaggaaaagaaaaaaaaaaagagtcaagggggctgctgggaaaaaaaaatcgagatctttaaactcatggagaagctgtttggtcatcggggcgggctggcagaggcaaagcctgccagaatactggcgccaaagcgaagcgctcttttgtcttcagatttctcgcctcacctgcctcctctccctctgtcccttctagctccacttcccactgcacctatgctaagcttttctaggagcctgaaaggcacggggacaaacaagcacgccgctgccaatcctctatctcacaccctcttccccacccagattgacggggagacgcccagggtggtaagtgacttacccaaggacacagagccccgaccagaaaatccaggtgtccagactcccacatcggcactctgtccacgcctacgcacacctgacttctcatagccggcacccaggagctttctttattccacgtccccgcctccctaccccaccccctagttccctagagtcgcttctgacgctctgcagcctccggggtccagccctccctgcgggtgcttcccttccgccggattcccacaccggagtcgcccttggccgcgcgcagcccgcgggaccgctgccttccgggctggaagccgcgcagccctctcagcgcctcaagcccgggacggctgggacaccgaggtagtcgggctcccagggcacagggtccggcaccgagggcaggagcaggggaggtgccaaggaccccggtccagaaggcacctgtaaggaagcaccgacccgcagtgacgtcctccgcgtcgtcctcagaccagccaccgcctccggaaggtctcaaggggccgtgctcgagcccaccgaggggtggcagcgcctcgggctctcggagggctgcccccggcggaccggcacttccgcgtcccggcccgccccctgccggcgcccgggctccctccggctccatgtgcaaactcccctccacctgggcgcgcgcgatggactcgggacccggcttccgaagacaggccgcctgttggttggactactagcgcaggtgggcggggagttgaccaaccccacacacgcgcttctccatgaagattcttgagctttctctgaagaaaggagtgcatatgctgcagtgtctctgtggaaggagcctgaggtccagcgacagcccaagtgaaccccagctcaaagggattgtgacaaggttattcagccagcagggatacttcctgcagatgcacccagatggtaccattgatgggaccaaggacgaaaacagcgactacactctcttcaatctaattcccgtgggcctgcgtgtagtggccatccaaggagtgaaggctagcctctatgtggccatgaatggtgaaggctatctctacagttcagatgttttcactccagaatgcaaattcaaggaatctgtgtttgaaaactactatgtgatctattcttccacactgtaccgccagcaagaatcaggccgagcttggtttctgggactcaataaagaaggtcaaattatgaaggggaacagagtgaagaaaaccaagccctcatcacattttgtaccgaaacctattgaagtgtgtatgtacagagaaccatcgctacatgaaattggagaaaaacaagggcgttcaaggaaaagttctggaacaccaaccatgaatggaggcaaagttgtgaatcaagattcaacatagctgagaactctccccttcttccctctctcatcccttccccttcccttccttcccatttacccatttccttccagtaaatccacccaaggagaggaaaataaaatgacaacgcaagacctagtggctaagattctgcactcaaaatcttcctttgtgtaggacaagaaaattgaaccaaagcttgcttgttgcaatgtggtagaaaattcacgtgcacaaagattagcacacttaaaagcaaaggaaaaaataaatcagaactccataaatattaaattaaactgtattgttattagtagaaggctaattgtaatgaagacattaataaagatgaaataaacttattactttaaaggaaaggatttggagaattgaactcacaaactgatgttatatactcaatagcttaaactcatgataatgctgcgatgtgtggttttgcttgattttgtattttatttgggcatctggaattgacacaccattacattctgtttgcaggattttttttgtaaccatgaaattgaacatttccaaattataaactatgttaatacctataaaatatatagccaggaaccatttatcatcaagaaaagtgtaagaaattatttttgagatgtaatttaagattgttttatgtaaaaggaaaatcttgtatggcatcgaatagccttaatgagtttaattctttcacaaaaatgatttcaaattatcctagagtataacatttttatcaaagatattatttccggagttcttctttctttcttttttttttttttttagtaatttagcaaaaacattactgttctaatgctgaagtgacttttgccagtgccatgtccaggtggtgaggtataagttacttgctcttagcatttggtctgatttttttgctttgtggacacctttgagagtatccacaaagcaatgtctcaggtgtggacacctgagagcatgttttagaaagctttgtaccctgtcttgtggcaggaaagaaagaacaggggttttacataaggaaataagtcctaggaaattagtcaacgcaaattgcatttgcgtttgtaccttaccacagtcttatattgttttttaaactctgccatgaaatttggagacatgactgtgaaattcctaacttactatcttacaaagccagtagctaatttgttgctctatgtatgatcctgttacaagtccagtttgcaattcatttgtttcctagaacacagaagggtaccagtaatacactaaattttcaaggtgtgtagagaaataatatggaattagcagctatgactccaacagacaggattgtgtgagcagctgaaaggagcaaaaaagaactcagtgtaagagaaggcacatacatagttaagaatactaaagtatttttaaaaatcaaggaagaaataaatgttacacaatttgcattggaataaatagatctatttagtcctacaaatcaggagtggtgtagagacatccaaatttaaagaaaaaaaaacacaaaacagaatgttaaaaaatgtatgcagatttatggatattatcaatgagaagacatagcatgtaacttctcctatatctctactgtccagcatgtattgttccaaatatgactccctaaaatatatacactttgcagaagctctaggccctcacctcaaaccttgccattggttgccgtatttcaaggtcaatatagtttccctcactttacacaatcattattcttcaatagtggaccatatccttcaccaggtatcctatttctgttatctagaggttagcagaaaatgaaatgaaggaatttccctaagcagttgggaagaacaaattgtatgcatgtaggcaaagattttgaagatacatttgcaagagatatttgtttaaccaaaatatttggaaagtaacaaataaagacatttaaattttctaaaaatggacttgctcttctaggaaaagaatacccctggggcaaaaatataactctagctgtatttcttcttgtcactcttgattcaacttgattataaatacacctgtcactaccagaaccaaaaaaaaaaagaaaaaaatcccaagcacaaagcttattttatttgaaaaaaataaaaaagaaacttcaacactatgggacactggctcttttagcatgaaatgacttgagcttttgtagtgatgatacacatacacactcatcagtaaaacgatggtttcataaataacacaattgatgcaaatcataaaaatcaattacaattatgatttcatgacaaaatatatttaattaagtttgttatgaaaaaaatagagatatgaatcactaacaaaattcctccattttcagtggctattcatcatttatcatctagactcacatttgtctccttcctgatagcagttaagaaaaaattctaaccacacaatttgtatattgtttttctccgtattatgttaagcaaatgttcactgcagtaaaatgttttggaaattagctttgtcttatttccagtttagttcagagaattaattggaaacctgatttcttttacacataaacctgacaaaaaatgtagcttagagcaaagggtgaatgtttgcttaactcctgcttacttctcaagtacatgaaaactttaatagaatatgccagtattcactgagtttttaaaaatattaccatgtgtaaacatataatatccaacttcatccaaaaatatggttgagtttaagtactttgtttttcaggcttatttcaagtataataattctttgattttcattgttctgatttctgggtcttcaattcattcgtcacttttcctttttaagtaaaataagcttttttttttttttttttttttttttggagttgcattgggatttttcccaggaaaaaatatggcttttagtaatgctttgcaattggctacgcagatataaattaagatatgtttattctgagttcttattggaataagtttcaaaatcaacgagcttaagaatgaaaacaaaacttttgagagtctcacaaaatagctttctggtcaatacaccttacttgatttttaagctcgcagaataaagtatagaaacaaatggagctgaagttccatttgctaattcagagacttttgtgcttccgcaaattggagggcagcaagccatcctattctcatagtaatcgttttggctttgaaatttacatacaatttaatagcacatttttagccattatggattggcgcaataaagagatatcaatgtaatgcaatgtgatgctttatgggcctcattctaattcagaaagcttgtttaaaagaactaagactcttctgtttaataaaatagcaacaatctaatatctagattggtagtcctgcggtgccactagtgggagatgagagtattaagacaagagtaaggacaaggaaagacttaaaggttgcatattgaaaagtttggaattcctaatttgggagcactgatttcttggtgaagaagtaagtatgactacgttgccagtaattttttaaaaacatagacccagaaatagcaaatcgatttcaccctcataccttagtctacaaggccttgctcttgagaaggttttccatgatattgcttaatttcatctgcacaagatgagacacaaacataaaaattccctgctcattttaataccataaaaggctgaggttatttctctgtcataaaattgtaaatagcattttttaagtcaaaattacatttaaaacagtggattgttctacaaatatatatgtgtatatatacatatgcttctgaaataaggatatattatatgagtttttatttgatttgtggtctttagtcataggtaatcaaaaataaagagatttgaatgcaaaactttatacattaatgtacatttctaatgatggtacaaattgccactttataataaaaaagaaacaggtgggaataataatcaaagcacgtgttccttcagtactttggtgatttttaatcccccttgtgatgcacaggaaattattttttagttacaaaaagttatcttagaaatctatacttcccaatacagatttcatgttaagtcatatcaaattgagaatttgtggtgaaagaataggaaaaggatgctagatgctgatctttctttttcaggatttttcctggagcccaagttaaaaattcaatacttaaatctaagttaagtgaaaattaataatgttcagaatgatgtattgagctttagtaacagacggaagcaaaaaaaaataagaatatttaacattatgataatagccttaaaataatgtaataaaaattgcatcattaaatgttctattagttggaaagaatgagctgatgtttctttgtctttgctccaagtacaatttaaagacagtgacattcattttacttaaaattgttcaaaaagtccaaaacatactcccatggctagaattggtattagctccaatacaaggttaaatgttacaatcttaagaaattattgacactgaaatgtttagtaaacatgttgtatgagaaactaaacaaattaatgtttcatttttccattaaagca

SEQ ID NO: 2925 - DNA, 11361 bp, Homo sapiens
aaaaaaaacccaaaatgttaggctcaaatcttttgctaggccttagagtctcctcttagtgatgaagggatgtttaatgttaaggaggcaacagctttattcttttttcacttgggtaggaaactgcctcttcatacagaacaatattcatatgttaattgaaagctagtattatttttgtacattcatcctctttcacttattacggaaattcttgctttctggaagtttagtatcaccttaggtaagtggactacctcaaaatttctgaaacatttggcaccaactagaaacattagtgaagtccatgagatcatttgagtcttctgtagctgcccaggaaaccgcctgattaggttgtgtgtgtgtgtgtgtgtgtgtgtgtgtgtgtgtgtgtatgtatgtatgtagaacttgatgctttgaaatgaaccatctgcaaaatagaggcccataaagggtattagttttgatgtgcacctaattgctacaattttcttgaaaataaatatttgaaagagaaatcctccataatggaccttaattacaagagaagtgatttttcctatcttgggatatttttctttctttttttttttttttttttgagacagagtttcactcttgttgcccaggctggagtgcaatggcgtcatcttggctcaccccaacctccgcctcccaggttcaaaccattctcttgcctcagcctgccgagtagctgggattacaggcatgagccaccacgcccagctaattttgtatttttagtagagacggggtttctccatgttggtcaggcaggtcttgaactcctgacctcaggtgatccgcccgcctcggcctcccaaagtgctgggattacaggcgcaagctaccgtgcccggccggagggggtatttttcaataaagtttttctcagagaattcatgcaagaaaagttgtttattctaacaagtttggtggtaactacacagattggttttggcactgattttttattaacagttgaatgctttataagtagagaaattgggtatctcctttaagtggagattattttatgctgtgacgaaaatgttacacctgcagtgaaagtttttctcatacagaatccaaataattgaattaaagctttgtagcacatgagatgacaacagtctgcaattctaacactgtcaggtacttttatatcttaacaacaccaggccaaatttttcttattgatgatacatatacatagtgaagtagatttttaaaattgtatttgaatatgtcattctgaaccatactatgacaaaataatcacttcccaccccactgaagaaatgagaagcctttttctggcttgtctagatcatttaataagtttgtagatgcactcaaagttcagaaagaaagctaacataaaggggcaatgaaattaaccatgtcaagtttaatatgtgaattaattctttattactagcacttagaaggcatggatacctacaaagaaaaaaaattgttaggtcaaaaataggacatactgtttcttataagaccggaggagtgtagaaagcctctcctgcttatgcaagatctgcaggcttccttcctcttttcctcccaaattccatgatcttgcctaatgaagattaacttaactacctaattaactttcacaggatttttgtggggtagataatagttcttgtttttagtagtccagatgaaaagaataagctgggcctctgacattagctgtgctgatacacgtctcttctaccaccatcaccccagcatcactaatacctaaattgccaaaattcagttaaaatagaaattcatctttttcatagtttctagtatggcacttgtaaactccctatattgcttttaacaaacttggtaaatgtaaatgcagaagtcatccacttttaccaacagaacaaccatcattgttcttgatcttttatattttatatatataaggaagggaatcataactttggggattgctgtaagttggccacatacctgcctatataaactatacatctttaccaagaattgactgtgttcttccagacccgtgccacgtatagtcagacttccagtcacaagcttcgactgaagctcaaagtggatttgggagggactaattattgaagtaggtattataagaatttaaagggatgcaaaatttcatctctgtctcaaagaagcttagagtttaatagaagagggaggctaaactaaattgttcataaatataagtagaataaagcatgtaatcaaaataatacaggaaatatcacaaatgctatgaaaatttaattgagggcaatttattatagggcagtgttttgagtatatcatcttaatctttaaaacactcctgtgatacagtattgtccttatacggataagatttaactctaaaaggttaacatcgtttttattaccaccagctatgaaatagagctgggcttcaaatcaaggttttccttgttcagcactcactctttccactacatcacagctgcttactgatttgagagagaattaggcaagaagtcaatacaaactggtgaccagtagccaaacttggcttgatgtagttttgttgggtcagcaggagtttaactttattttttttgagatggagtctcgctctgtctcccaggctggagtgcagtggcgcgatctcggctcactgcaagctccgcctcccgtgttcgcgccattctcctgcctccgcctcccgagtagctgggactacaggtgcctgccaccacgcccggctaatttttttgtgtgtatttttagtagagatggggtttcaccgtgttagccaggatggtcttgatctcctgacctcgtgatctgcctgcctcggcctccctaagtgctgggattacaggcttgagccaccgtccccggcctttttttttttctaatgtgaatgtgtttgagcagtggccagtattccactctttaagaccttacaccagggccccttgagacaaatgaccgagtacagagctgcaagtcattccttcgcacagtagtcctcaagctttaatgtgcatcacagtctggaaggcttgctaaaacacagattgctgggctccatcttagaatgagtgtgtctgaggtggagcctgagaattacatttctagcaagttctctggttgcagatgctgccagtccttgcgaggatcacactttgagaatcactgcttaccaaacttgtagggcacttttggggaaggcttgttgtgtttctgttgtttataatacaaaaggaattgcttgtcagaatgtgcagaaataggttaaaaagaaaattaaaattatctatcagagattataattgctaacatttttaatggaccattcaagctccttttttctatgtgtgtatagtatgtacttttttaagaaaccaaaattatataataataataatagctattaacacctttttagcatctattgtgcaccagggtctttacatgtagtatttacttaatccttttaatatccttatgaagcaggtaccattactatcattcttatttttcagatgaagaacttgaggcacagaaaggttaagtaacttgttcagtgtctcattgctagtaggtagcataatcaggattaaaaccaaagcaaggccaggctaacacctgtaatctcagctctttgggaggccaggacaggtagatcacttgaggccaggagttcgagaccagcctggccaacatggtgaaaccctgtctctgttaaaaatacaaaaatcagccgggcatggtgcctgcctgtagtcccagctgcttgggaagctgagacagaaaaattgcttgaatgtggtagatggaggttgcagtgagccaagatcacgccactgccctccagtctgggtgacagagtgagactctgcctcaaaacaaaaaacaaaaaggaaaacaaaaaaccaaagcaatctagtgccagaaccactctgctatactgactcttctactgtgcatattgtttttcacctgtattgtataatcacatcatgaacaatcttgatattagacatttcttgtttaacatttaattttttaattttatgtaattttttgtttaagagacaaggtcttgttatgttgcctaggctggagttgaactcttgggctcaagctatcctcctacctcagcctcctgagtagctgggacctccagcacgtaccaccacactcggcctcttgtttaacattttaagtgaaagcctgcttttttctcttaaaatatttgaaacgtttaaagatatacgcaaaaataatgtaaaaaaaaactcatgcacccactactagatttaacaaaagttaatttttctgcatatttgcttcataatccccccctctttaaaaaacacattataggccgtgcgtggtggctcacggctgtaatcccattactttagaaggccgaggcaggtggatcacaaggtcaggagatcgagaccatcctgactaacacagtgaaactccgtctcgactaaaaatacaaaaaatttgccgggtgtggtggcgggcaaaaaaattagccgggcgtggtggcgggcgcctggagtcccagctactcgggaggctgaggcaggagaatatcgtgaacccgggaggcagagcttgcattgagccgagattgtgccactgcactccagcctgggcgacagagcaagactccatctcaaaaaaacacatgttggccaggctggtcttgaactcctgtcctcaggtgatccatcctcctcgggctcccaaagtgctgggattacaggtgtgagccactgcacctggcccagtgaggtggatttttaaaagtaaaagaaaaaaattgagttccagagctagaagttccatcctcagtctgtctgaagcatgcctcctgcaatcctttttcttttttaaggaccaacaaagtcatcactacaacataaaggaccctgtgtaatcaggcacctggcttctctgacattatttccgtggcttgtgtgcttcagccacactggcctccttgtgggtcctcaaacattccaagtacattcctgtctcaggaccttggcacttgctcttctgcctggaaaactcccaggtagaatttatatagttgtcagctcaaatctcagttccagtgagatggcttttctaaccagtgtctctaaaacaacacctctatcctttttctctcttcccctatcccactcattttcttttcttttctttttttttggctctgtcacccaggctggagtgcagtggcatgattttggctcactgcaacctccccctcctgggttcaagcaacttgcctgtctcagcttcccaagtagctaggactacaggcgcctgccaccacacccggctaatttttgtatttttagtaggacgggatttcaccatattggtcaggctggtctcgaacttctgacctcaggtgatccaccctccttggcctcccaaagtgctgggattataggcgtgagccactgcgcctggcccccactcattttctttataccactaatcatcaggaattatatgattacttgtctgttgtcatccttccccactagactctttagtaaggcttttcataagggcaggcagtttgttgattgttggattccctgtgccaggcatatatagcctgaatagatattgttgaatgaattaatggctatcatctatggcagtgtgtttcagcctgatattcaagcataagttcctggagaatccaccatttggttgcagtttaaaaatgtttatgttgtcattttgatgctaatctaaagcaaagtcatattgtgatttttccagatgagtaccttaaaacatgaagttttgagagcctgaattcacaccaagtttaggattttgtttttatcagttgaaagccaatgaacattgtgacaaaacgtgtaaggtttcacgatcattttgagaaaagaggtgggagagttgagtcatcacatgtcacacagtagcccatggcaaactcagtgctgtaactgttggtgccacgttcctactaaaaatagaaattgcacataacacacatgcacttacatatatttgcaacaacttagtcactgtaagtaaagtagtaaatacacaatgaggaatttttttttatttcccaggaaggcttaaattagataccatataattcagatttaaaatagtcgaaaaaatactaaccttatcttaaagtgagtagactctaatcgagtgatattcaaataaaactggctttccagggttttgtagtgccagaatttttgttaaaatttgagatctgattatttcaaactagcaacagaagaccaggaagttaataatgcagtgtatttgtgcaaacagctgtttttgcattgacattattaaatgtacagagggcctgggagcagtgactcatgcctgtaatctcagcactttgggaagcttagactggaggattacctaaggccaggagttcaagaacaacttggtcaaccccatctctacaagtaataaatttaaaatttttaaaagttagccagctgtactggtgtgtgcctgtagtcctagctactcaggaggttgagacaggaggactgatggagcccaggagtttgaggctgcagtgagctatgatagtaccactgcactccagcctgggtgacagggagagatgctgtctctaaaataaaaataaacatacagagacacatttaacgtagaaatagatcagaagttgaatcttaatgctcataaagctaacactttacaattcaagttactattgattttattttatttaatttatttatttatttatttatttgagacagagtctcactctgttgcctaggctggaatggagtggtgcaatcttggctccctgcaatctccgcctcccaggttcaagcgattctcctgcctcagcctcctgagtagctaggattacaggcatgtgccaccatacccagctaattttcgtattttattttattttatttttgtagaaacggggtttcgccatgttggccaggctggtcttgaactcctgacctcaggtgatccgcctgcctcagtctcccaaagtgctgggattacaggtgtgagccaccgcgcccagccgagttactattaattttaaatggcaaaaccaaacaaccaatattgttggagcagaagaatgcttatcactgcaattctattacctttgcctgttacctgtctttattttccctttatttagaacctgaagggtgcttttagggtggaagaatataaagtttaagaatttgcttaagtgaaacacttgttatatcttcattctagtaacattctagtttttgtagaagggcctgatccctctctctgacccatttaactctgtctcctaaacacagtctaattcagttccttttgtatgacataaaaatcagaataagaagtacctgacatactttctacatctgtagttgcggaagacattttaataggtaagagcaaaagcacaagcctgcatacttcttttttaaccctgtggatcatttaaataaatcctttcgtattattccaagatataagtgcattgtgatgatgtataagaatttaaatataaggcagtctgcaagcagggttttttatgtagatgggcagcagtttattgtaggaaattatgtgtatgtacttaaattaaagcatcagcactaggtgtccgcagattacatcaaagagggcctcaaattgagtatcagtaaaatcgcaagaaatggactacatcctttacaaggacacctctggtacaacattttcctgttcaaacattaatttccacatagcctggcatttggcaggttatgtgccatgaattctgtggatattagtaggcatcatgttgaaggaagggttctgtagtcaaatgcggactaaattagttttattctttttccactttaggtcttctcatagcctttctttgctaaggacattgtgactctccagagagcaacagtgatggctctagaatgtctaggaaaaagaagggcttaatgtcaggagtctgcttggggcacacaacactagaagatgtccttctgcacattgtttcatatcgagtgtgtattttgtggtgatctgggatgctgatagaaataattggatgttagtgccctaagccacctctgcactattttttttatttatttattttttgagacagagtctcgctctgtcacccaggctgcattgcagtggtgcaatcttggcccacagcaacctctgcctcccaggttcaagcgattctcctacctcagcctcccaagtagctggaattacaggcacctgctacaacacccggctaatttttgtagtttttgtagagacgagtttcaccatgttgaccaggctggtctcaaactcttgacgtcaaatgatccacctgcctcagcctccctaagtgctgggattacaggcgtgagccaccgcgcttggccctctctgcgcaattattgatatgtagcattttcacacttctatggccatgaaaccattttgaacctgtatcagaggcgcacactttaggaaaaaccaatacagacaatagtgcctcttgttacagtttttgcttttatcagtgtgttggaaaaggtcctctttatccccaagatcagttaatgcttccttatgttgtcatttctgtgggcttttttccatttaatgttttaatccagttgaaatgtatttttgtatatgatgtaaaagacattcaactcattttgtgtatgtatttattgattgaaaaatgccagttatttccaaaccttgcgttaaatgtgtttttgtttttcttttcaggtatggaacccttcagatcaaagcttaccaataaattcagtatgtagaacagattaacgtagttgaaatgaggaagaatgagagttatctcaaccagccagcaccccctatccccattcccacactttccctcatgggaggctgtcgggagcacttcgaaaaccactggaaaggccgggcacggtggctcatgcctgtaatcccagcactttgggaggccaaggcaggcagatcacctgaggtcaggagttcgaaaccagcctggccaacatggcgaaaccccatctttactaaaaatacgaaaattagccaggtcatactttaaggagcccaagagctttataacataacaaaagaaactgaaatgtctaataaatgtgtacataacaatatgagttgtttgtgtttttttggcctataaaattagcatagatctttaaaataatatacagtattggtaagagctgaataaatacctttaatatagagaaggtttaacttagtaaaactatgtttggtagataatgtgtgtcaaaagtttacaatgctcatatcctttgatccagcatctcacttatagggtttcaccctaaagaaataaacagaaatgtgtgaaaaaaatttgctgttgtttatattattgacaaaattgaagatatcaataacagtatgagactgggtaagtgaatcatggcacatccccatgagatgggatactcttcagccatagaagtgatattgtagaaagaaaaatattgagtgcttgtgatgaacctggcaccataccaagcacctcatttatactgtctgaagcctaacaataccccatacgataggtattattattcccatttataggtgagaacaccctcagaattctaagttaggtaaagttcagctagtaaggtagtgttggtagtgtaaggtagtgttgctggaattcaacacatgtctactcttaacccttattcttagccactgtcatgatacaggaaaatactatttactgataagtttctagtaatttaactgacattaaacacatgaaaactatatgcaattccttcctttccaaagttcctaggtttggtaattttttatcctaaaatgaatttatatgttttttattgcttatggaagtattagatgcctactcttaagaattcaaactgtacagaagattataaagtagctgcatctttagtcataaattataccctctgtatatgatacgatagattcataggctctttctgttccctcaattctgttcttgctgtggtatcagcttgtgggccctggttggggatagagatgaactagaaaggcaaactgagtggggtgcaggtgtgagtggttgactttcaccacaggtgattagaaacactgattctggagccaatctggctagatggagtcccagctcttacttaccagctgtttggacttggacaactaataggagtgcttactgtgtgtgatatgcatacatggtttccccatttgtctttatgagttagatgtttttattccctttttatacagatgacaaaactaaaattcagggaggttacgtatggaagtagaatgaatcattagacccatttctaggactacagacaagataaatactgaaagctgcttgtccaggagatagcaaaatgctgacaaatgagaaacagacctgcatagccatcacaccctctagaaccaaggggtagtgttttaagatagaggactgggtgagtatcagaaagctgtgctttgaaaacctgactgcttttaagtatttcctgttttgttctcattttgtaggtattagaattatttctgaattatcagtctctcatttgtgctttggagaagcagaaaaggcaaaaggggtctttggccatcttctgctggagcttccagggaggatgtgtctccaagagaccagatgtaccgagtttgaaatcccagaagcccaagaggaaaagaatcacagggaggaaaagactgtccaaaggcttctggagtcttctgttctctaaccttggaaggttttgaacaatatttctcagaggatagcctttcacttattcatctgtccagcatgactcatccccgggagtgttgatgctttgtttacaacgaatgtcttacaaatgctgactgaacactagcatacctgcatgaacaacagatgtctcctgtcttcctccagcattcacaaaccaggaacggctagctttttgacctgttcaatccagctgtctgcctcctccatggctatatcagggctgcagagctttgccggagaaaaaccacgatggtgaagatgacgccctgtatacaactcacagtctcccacctggactcatccttcagtgtttcttccttccaattatttctgtttctcaaatcagagctttctacttcaaacgtgtataagattttttggggtatatttttgttttttgagacagagtttcgttcttg

SEQ ID NO: 2926 - DNA, 8332 bp, Homo sapiens
tatgtagaactgacagttggcatagatcgtaaactgtcctttcataagaaaagaagtgtgaaattatggatgtataagatggacaagtagaacgcaactcagatcctgactcacttttagaacgatcaccaacaaagagccactcaattagcagactgtaatatgagagataaataaaacttttggaggtaaatccatggatattccaggatttaggtgttgcagaagtggagtcaagtgaagcacttgttcctgaagtgatgtcaaaagagagtgaccagccggataatgtataaagaagatatagtattttataaggccattatggctctagacactgtctttcatttgtgcaggttcaagctcagaggcaccaacaaaacatccatgcacaaacttataatgtaagatattgatttattagcttctaatgaaatatgtttttattaactaagagattgatacataaaacaaatcttgatactttaagcaagaaatttccttgtagtgaatagctttactagaaataaatttattattcaagatagtggtttgtgaacataggattgtaagtgagaagatgtcaattaagttagttgtctctattaattgactgtgctggtgttgcagtagtttttcagaattaacataactaattgaaagcaaaaacatctctccaaacatctctgagaaaatgatacattactgtctaattttccaccttcttttctatgtttcctccagtttatattattatttcagttaggtacaatacaactgattgatgtagaacttcttttgtactgtttataatcttctccttggaacataaactgctattgcttttatcagaagaagccttactcctacaagtaacacacaaaccacacacctaggtaattcttttatgtaaaaagttaatctgatgtattgaatgttctctttaaatttcaattccagacatctattttcctgatatattttaccaattttggggagtgtgctctatactaattgtttttaagtataatgatgatcagcataagagttattattaatatccgctagctgtgagatttgtcttggaaaataatacttctcatttgtagatcagtttttcccagaacacattatgttgcatattagataagaaaacagtgcctctgcagcaaattacaaaagtcagagcaagagagctaggggagttgagaatcagtacctcagaaagaaactttgctagaattgtaccttatttgtttgaagacctatttcttatgttggggatggggatgaggatgggaagcataaatagacaccgcttgacatcagtgtctgtaatctcaaaactgaaaaactaaagtatcagtgaaaaaatttcttcagttattcatggtgttagagtatttgaaaagcaatagaaataaaaatgttaaggtattggttttagatttgttgggaggtgattcttcctgaatagagaggcattgatatcctttgttctgaaccatcttttcgagaatatttgtgtagtacttactatacttttatttaaacattctctccactatgataataaagataatgtctccctcaagagcaaaggttgaaaaccaaaggagaaaaaaagaaatgtttattatgtatccttaaggttctgttttttatttttgtgtttattgttatcaggtttccatgtaacagagtattttcgagtgtgaggcttgacaatggctccatggatttaatgtatgcattctcctctgcctggctatcacacactagagagagggaacacaatgatatgctccctcagttttataagtttctaagcattgccacagcataattataaagtatatgctgatactctttaggggaaccatggtggtgtcatgaccatgtgaactccccatgcaggtattcagttccccttctttcaactcccagctttaacttaccctcctggctttagaaagcagaacttaaaaactgatgagtaggtaatgcaaaattacaatcattacattttagatttgaaagacatcatggagagcttctaatcttatcactccattttataaagagggagtaaattgatcagaattgctaagaagatgctagtcagttgtgaaatctcttctacccagaataggacaggagtctatgatttactctactttcttcctatgtaaaataactttacccagatcatctactttcgtactataatatagactccccaaaggcaataatgacgttttgttcaacatctaccaattccacagctccctggcatgtaactgaattcatagctaatacatttgattttacctacttgagcaaaatctccagggaataatggtgagtacctgagtaatggaggtaaatgtcatgagtaaaagtatagattcactagattcaaatactacattaatgtctactgtgtgacattaagtaaattatttaaattctctaaatcttcagttttattatttttaactttgaaatagtaatagctaaaaagtagatatgaccaacatgaaataattagggtaaaatgctgacttactaccaagtatggagcatagtaaatgctcagtgaattatagttatatttttccataaaaggtacaataacttacgaagttcttaaaaggcattatattttaaatctacttgaacatcttcttcctggattactgagcaaccagacataattcttttttccttttttgagtcagcctcttccgtttagttcttccaaaaacatcttccactcaaggctacctaaaataaacccttctgctggatctactgttaggttactcttcccatctcagttgctgtgttatatttttatacttgagggattatatttcctgcagttgagtctaatttacacccttaggttagatgaatagtttgtaatttgaagtttggaactgataagatggaagcacaactaatatacaatacaaagtaaaaccatttaaatcatcacatgcctcatacaagtatctattgactacttattatacaccaggcatctttctaacagtacagtaattaataagtctccaataatggtttatggtatttaactgcttgaaattattaacatttaaagtaataatcatagctaacatttattagatatttattaggtgccaagctttttccaagtgttttataaactgttaattcatttactccttgcaaaaaacccttgagataaatattattatctcctataaacaaaagtaaaagaagcaaaatgtgtctaagtaatttattgcacgtcaaacagttaggaaatggtaaaactgggccaaaaaactgaaatagtctggctccaaagcccttgctattaatcactatgtagaaagacaatagaggcatacaggcagtaaaatgcaatgaaaaagaaaactcaaagccacaagagatattgtattaaggttaggtttttatttgaagaattttgatctaggttagcttataatatagtactttctcaattatatcagctaattttttatgtgtcaaaatgctctacagagaccccaatggggatggggtgatgttagttttaccatcatcatcacttactattaactttctggctgttaagtttctcagctaaaataaggtgctcacttgtcttgtagataccatgcactatatattttctaagaaattccaaggttttagtaattgtgcttcatgaacatattatgttttatgtgtgtgagtgtgcatgtgtgtgtattcagtgaagttggagactatgttttaatttctgtgttttacatgcttccctaattctttctacctgacagatccataattagtatgtttttaaatgccacctgaataaatctcccaacttgataataatcctgttggttaacagactaaaagaaggaatttaaactcttttagggtgtgacctaagcccattactcataagttgttcgaaatcttttctatttgattctgtgatgctgtgattattcagaatggttaactaatcttggaaattactgaacctgatgataactttaatttcaagactttgaagtactctccttgatgcctcaccgcttttatggttgtcttcaaagttcacactgtctcatttgcagaaatttctatgtagatctattgcaaattgtatataatgtttcttgtgctcatcatatcctcatcaacatattttgaggttattaatagcatgataattttgaagtgttatgtaaaagaagaagccttttatgtaaaggagatcacattaatccaaactgaagtatatgcagtataggcttgagggaaaagaaatttgaatgcaaatcaaattggatttttttctggaaatgttctgtttaagtctgtgaggaagtcactgcagctgtgattaaaacttattttcttatatttgatcagaaataaaagtccctctccttttcaaaaggggtttgttatgaaggaactttacaacacttccaatcccatttagttattcattcaagagccattgcctttcaccagggcaatattagcagaattggaagtgtaacaaatacataaaataatcagtgggtcgaatgagagggagatcacagagacaatgagggaagacagctctttatacaagatttctagtaaagaaaaggaggatccaaatcatgagctgaagaatccctggcagcctcaatgggtgaagagaggttttaatgaagcatcaaagcaagggatggggcatcttttgccttttgaggaaaagggcatttaatattcatgtgtttctcagtgagcaggtctatgcaaacctacctccaaagtcagaggaagctgagaggcctaagaaagaggctgacaaatcccattttttagaatcaaacatttcgcagggatttaggaacagaagccatgtctgtgtctcaagcagtgttgagataagatactggatccccatgccattgtccctcagacctagggcttatataacatagggaagtggtgactcagaaggcatgtgtaggacaactgcagtacaataatatcaaggttaatttgacctaagggcaggatttatggtaagcacctgctcttacataagaaacaatagatgaactgaaaatcgtagcagcttcccagagcaggaattaatcagaagtcaacatgttgaattagcatccacagtggagctgccttggcctgcacatcatctttgcaagagagctattcttgtattgacttcatgatctcttgttttgccttcaagcttccttaaaatccatggtttttgtcatttaaaaaaacaagcagggtaaggagttatggaggaaaggtggagaaatgttattttagatagcagtcagaaaaagcttgtgcgaggggagatacttcagcagtaatcataatgaaatgagggaacaagacatgcagatgactaataagagcactccacctctgggcacagtagctcatgcctgtaataccagcactttgggagggcgaggtgggccaatcacctgaggtcaggagttcgaggccagccctaccaacatgctgaaaccctgtctctactaaaaatacaaaatttagctgagcatggtggcacatgcctgtaatcccaacgtctcgagaggctgaggccagataatctcttgaacctgagagacagaggttgcagtgagacaagatcatggcactgcactccagcctgggcagcacagtgagacttcatctcaaaaaaataataataaagataaataaaaataaaaataaaataagagcactccagattaattccagcaaaggcaatggaattaatgtcagaaagtttatgggaagtttgaaaagcagtaaaaaagttaataaaattcattatggtcaatgaagtagacaatggtaaaatgatgccataaagaacactacggacaagataacagggaaatttaacaccatgttgagaactttggatttcatctgtgtaggatgggatgccatctgagtgcactgaaaggggatgtttcatgataagaaatacattttaaaaggatcattctagccactggacattgaacagatttttagtaggtattgaataattgaggacctgaaagaccctggtaaggagtttgacatttaatataaatgtgactgaaagccatttgagtgatataaataaagtatgaaatgatcaagtgtatgactttcagggatgttttagttgctgtatagataataatttttaggagaaccaggaagataattaggagaccattttagtggtccaagtaaaacaaagtagtgatttggactaaacagttggtaggaaatggtaaaaagtagttggttttggatattgtaaaggttcagataaaggaacttgatgttagattgaatatgtgatttataagaaatgggagatggccgggcacggtggctcatgcctgtaatcccagcactttggaaggccgaggtgggtggatcacctgaggtctggagttcaagaccagcctggccaacatttagaaactctgtctctactaaaaatacaaacattagccaggtgtggtggtgtgtggctgtagtcccagctactcagaaggctgaggcaggagaatcgctttaacctgggagatggtggttgcagtgagccgagatcgcgccactgcactccagcctgggtgacagagagagactccacctcaagaaaaaaataagaaagtggagagtaaaaaacaacttcatgtttggtgcctgagcaaattagaagttacgaattaatttgctgagacagggaagcttggaggagaaatgcttgtacacatggggaatcaagtattctttggacatgctgagtttgagatgcgcttaagctttcaaattggaatgtggatttagaagttggatatatgaatgtggggttcagtagagggtatattctcaggattaaaagtatggagtcatcagaaagaaatagataatgtggtgtgagatttttcagtcctctgcttttcaggtatttgctaagatggcatttcttagctctctgtggttatgtggagccttgaaaatagctatgagaggaagctattttaggctggaccatttaacttcagttcagtatgagaacttcaagatatctttttgttgttgttcctgtggttgtctcctgacagttctccagatggtggctgctccatctgtctgggtcccagattaaggacaacttatagcataactcccagctgactcacaatgatatagcatgagtgagaaatcgaccttgccatcttggtttcctgaaatacgggagttatttgttattgcatcatagcctagcccatcctgaaaaataccagaaataaataacgctgtaggactgagtgagatcacccaaggagtgaatatggaaagaagaaagaagaattccaaggattgagccatggcatactctgacagtcactaatcagaaaatgaagaggatgaagattaggcaaagggacagattatgaatcatttatttattttctaaaacaccattattaccgttattatttattttttgtttcaaaattgataacaatttaataaaagcacttttccccggacagcggaagaaaacacttgtttaaaaaccaagtagaaccaattatagcacgcatttgtctgtataactaaaagagtatttctgtatcaaaataagtcgagtgtaaagcctatttactttcagtttatacagattcctctaaaacaattttgactactgaggctgatgtatccacaagatgaagcctaagtcataaaatctgcttaacttcatcatttcttcaatatatttgaagttgtggtaaaactttatggcaaattttagtatgtagcatagtctagtatatcatagtccagtaacatttaatagcatataccaggtttttgactgaatttcctattttactcattgcagggtcattttgatttccttaatttaattatatatctctgaacttcagttctacataaactgaatcatttggagcaacaggtatttgttgcccaggtgatagcctgaagaaagacaaattggccacacacacacacacacacacacacacacacgccccgtaactatttaaactctataatatacactgagcaatgtgcacacttggttaatataatttcattgtgtgatacatgataggcaaaaatgctggtcccatgtggattcatgacaaaatatagctgcctccgtggccgccttcccttgttaggttctgaaaagctttacaacaaatgtgaaaatgccatatttccatcagtg

SEQ ID NO: 2927 - DNA, 2292 bp, Homo sapiens
cttggagcctgagaaacatctctttgtataccgggcacaggagagaacaactggcttgtgccttcctttgctccagcttcatttcttgaacatctgttttcccagaggtgggctagggtgccaactcctgacaggcagctagagtctgtttcacgttgagctacctgagaggagctgggaacgtgctgtttctcatcattatcacccagcaagagaactggagagagagctacacccaaaccaattatggtcaggccctctgggctgttatataattttccaggagacagtggagtgaagcagacctcagcgtcccagaggtgtgctgccacgacagtgtgctttccttgcttggaagtcttggaagcttcttacctcctctaagaagattttccaggcaaaacccagatctgctttagtgacttcagaagaaaaagatctgagggaggatgagaagccgatagccaatggtatgtgtgtgaaaacacgtggcagacacacatgctctccagcattctatctcagctgatggtcagcaagccttggggcgtcttcatctccttctccttcatctcactgtctttctaccatgccatctctatcagttcagttcccagtggaagacaggtggtttagccaaagaaaatctaatgaggggtctatttatctgtggtcagggtttgggatgcccatgtgcagtagtgatgccccagggatgagcaagagtgggaagctgtggccaccttgagacctcagggccaacagaagggactatgcttctggagccctggggagcgggagcttggaagagggcaagaggggtcacctcagaagctatagtcacagggagatgcaaccactgcccagactgtggcaaggcatggcgggagcagggggaatcaacacccagcacctgtccctttgaccctttgacttgctggtggcttgcattggctaaaccagaaactggagggcaagagcccctcagtgtagcagcctatgggggccaaccttctgaggtcaaagcaggacagaaggtggagaagggacttggggggacacatggagaacaatcaacaaagtttaccccctttgtcacttggcactggaaaatctgagaagcaccagatgttgtgagttacctaagaggggtttgttgcttcaatgtctttccaatttgggggatttttgaagaaagtgtttatgagcagggcagcttgcccctttacctagtcttccaagaataaaagacaaggcctcagtttttagtcagttgtaaacacttatattctttatttttaggttatgaggatgagggtcgctatccaaaggattgagagagtaggcttttgcactatgtagccatggattcaaatcccagcattaccattgattagcttggggcttttataaagttagttacctctcttagtctcgagttgccaaaatgtaatgtgttagaaatatcaaaacatagttgaaaggatggaatggggtaagatgtataaattatttaataatgttagctgcatgtttttattttgcaaacacatggagtggagtcattgggcaagaagcaagactctctctcaagggaaagtcttggccatttaaccagttatggggcgcggggaggactttggtgacatggtaggtgcccaaggtcctcagagtggcaaatcagtgcatttaagagcagttttgtctgcctggctgaacagatgctcccccaggagaactatatccacaggtactatctggaagttagaaggtatcctggtgggctgcctgcaggcagggggttggtgaccctttgtcttggggtgtgaggtcagatgtgtctgattagacaggactaagaaggagacaggctgctgtcctcttggatggctcatctcaaataacggccaccatctaacatctgactagtgctctgccacctataaaacactctcatttcctttgtctcctaatttgacatggatagggctcagcttgcttgttcaaatctcccatgactgaccacttctgctgattcacacaggaaaaatcatctagtcaaggtgaaaaaaccaaaccttgaatgtgtctctacagactttgagattttgagtaggaaatagaaggacttgaggactcatgagttttcatctctccttcctgttaaaggttgagactttgcaagagagagggggccgtgagctatgagcagctggctctggggagggttttagaagtataagattggtggaggtgacacaccagggtgacgggttgcttgcaggaatggag

SEQ ID NO: 2928 - DNA, 2222 bp, Homo sapiens
taatgatccagcccaagtgtcactggtgctgacgttgagtaaccctatcttaagctgaactcatcatctctccattccagccttggtggattctgtctcctctgaaccattcccatctcactttagcctacctagatcacaaagcttggcactcattatagactcccctatttattactccttcaagatgtgcaagaatcttttctctgcacttttaagttctgtaagaagagtctgtgtcgttcctataataaccagcataggacgttgcacgtgttgtgtgctcagtgaacctggatttgttgattgttgactgactcactctagagttggaaatcttatgcttggggaaacttaatatctctttctttctctgtgtgtgtgcatttgtgcacgtgtctgtgcatagctgtgagaccaaagacctggttgtgcaacaggcaggcacaaacaagactgatgttgtctgtggtgagtcctggacaatgggccctggagaaagcctaggaaggtgggaactgaagggggagatgaggcacacaggaacactggatgggaaaaaggggaggggaggcagtttgggggtgtggtatcacagctctgccacttatcttgggagtctgggcaaatcacttcccctctcttagcctcagtttcttcatctgtaaaatgggatgataacagcacttccttagtaggttttgattttagagtgagaaggttggcctacagtaaagatcagataatgtaaatcagtgaaaaaggtcaggggtaagaaaattacattctctttacctaacgctaaatgaccagttaatgggtgcagcacaccaacatggtacatgtatacatatgtaacaaacctgcacattatgcacatgtaccctaaagcttaaagtataataataataaaatttaaaaaaacgaaaaatacattctctttgctttttctcaaaatgtactttcctctttgtagggctgggactagaatgaggtgagcaaggcacttgccctcgggcgcaatatttaagaaggtgccataaaagtgtagtaatcaaggtccccaggatcggctgagagccctggtggtgatccccatcatcttcgggatcctgtttgccatcctcttggtgctggtctttatcaaaaaggtggccaagaagccaaccaataaggccccccaccccaagcaggaaccccaggagatcaattttcccgacgatcttcctggctccaacactgctgctccagtgcaggagactttacatggatgccaaccggtcacccaggaggatggcaaagagagtcgcatctcagtgcaggagagacagtgaggctgcacccacccaggagtgtggccacgtgggcaaacaggcagttggccagagagcctggtgctgctgctgctgtggcgtgagggtgaggggctggcactgactgggcatagctccccgcttctgcctgcacccctgcagtttgagacaggagacctggcactggatgcagaaacagttcaccttgaagaacctctcacttcaccctggagcccatccagtctcccaacttgtattaaagacagaggcagaagtttggtggtggtggtgttggggtatggtttagtaatatccaccagaccttccgatccagcagtttggtgcccagagaggcatcatggtggcttccctgcgcccaggaagccatatacacagatgcccattgcagcattgtttgtgatagtgaacaactggaagctgcttaactgtccatcagcaggagactggctaaataaaattagaatatatttatacaacagaatctcaaaaacactgttgagtaaggaaaaaaaggcatgctgctgaatgatgggtatggaactttttaaaaaagtacatgcttttatgtatgtatattgcctatggatatatgtataaatacaatatgcatcatatattgatataacaagggttctggaagggtacacagaaaacccacagctcgaagagtggtgacgtctggggtggggaagaagggtctgggggagggttggttaaagggagatttggctttcccataatgcttcatcatttttcccaaaaggagagtgaattcacataatgcttatgtaattaaaaaatcatcaaacatgtaaaaagaaaaacgggggtgaacatgctgggtgacatgagctatttaacctgctgtcaggctcacggaatgagggc

SEQ ID NO: 2929 - DNA, 5989 bp, Homo sapiens
agtatacatgaatttgcttctgcctttgccacccctgagacagcaagaccaacaaccccttctcttcctcttcagcctactcagtgtgaagatgattgctgccctcagctgtgcctggagcacagggcacctccagttcggcctctccagaagtaaacttgtcttctgcctatcttgtgtttgttgggaggaggtgacctgggactctactactattgatgaagaatccgaaaaagtcttctattagccctgtgccacaccctacctatgaggcttttgggaagaagcagagaaatcagtgtttactgcagagaacacagaagccagcaagcagcagggaagggaggcgaaccaatgcagcagcccaccgggaccgaggaggacacacgcagagcaagtcacaggaagcgcagctgaaaacaaatggacgcttatcccaaatgcacaggacacttaccaagaactgatggtccgtcaaagtaaagctcaacagctttggctggcaggacagtcaaacttttggacgacagaaagtaacagtgggaaatgggacaacatctgccagcaacgcgagaggccaagaccatggctgctacaggaggggtcagcgtcacagtacacgcatggcggcggttgcacatgcatgcctggggaatgtgagtgttcagacatgccaggagtccagcctcaccaggaaacaggcacacggggacagaggcgcaaacactgaaaactctcgctgaatccactcggctgagcggtggtcacgagagcacggccctgcgctccccacaaaactgcacctgggccccagggcgagacaggcgtggaaggtgcaggggtgtgtgtgggggcaggggctcctggctcagagccgtatccaggaaccccccttcaggctggagccctgccctgagccccctgtggagagactgtggagagccccctgtggagagggtgactgtgggagagcagcatcaggcctagtctcggctgtgaagtaccccccacctccacgcaggatcccggggattctgtcaaggtgggggccgcctgctcagcccaggctccctgaacgtgtggctagctgagtttgcggaagaaaccaggagagtgccaacaccaggcttgcaagcaagaggctccctgactgcctgatcctggagcgcaccccatcctccctgtgttccctgggcctcagctgttccccagtgaccttggagacaccctgccccaccctggctccacaggagccctgcccatcaccgcctcagctctgagtctcccctggggacacaaccttcctcctggtgcagaggcgcaggatgctgcccctaaggcccatcttcctctgcagcatgttttgatgtcagctcattcacaggaaagaaacaatcacatctcagtgcccagaatggggaccaataggagaggtcactgggaataaagcccacacgcaccccagggtccatgggctccccagaaatgcaggtggcctccgccagagccaacaagcctaagttgctgatcagcccctccctgcttccctgtgtggaagaggaaacagaggcccagactagtagggctctgccgtggtggccggctgcgtccccagacctctggtcccagggctggctgggagtgcccctccctgtgctcacttcctgctctcctgggaaatggctcagggatggggcgtgtggggacagatgctggcatagctcacaaaatgcttgcacaagggacactccatggcaggtccctgcaggagagcaaagtcacaacattcagagattccctgcactctgaggcccgcagagcctggccgaccaagcgaggctgggaggatgttgcctgctggtcagggcagccctctgatcagggcggccgagtgaggctgggaggatggtgcccgctggtcagggcagctgagcgtggctgggaggatggtgcctgctggtcagggcagccctctggtcagggtggccaagcgaggcagggagggaggtacccaccggtcagggcagccgaacaaagctggaaagatggtgcctgctggtcagggcggctgaatgaggctgggaggatggtgtctgctggtcagggcagctcaggaggtgctgcccaggaggtgctgtccaggcagagcctagggctggtgtgggtgtgccatgctcctgagaagtttctgggttgtggctttaatgttctcctgcagtgagaacgctgacacttggccaaagggtcctcacctctcccctagtacacttctgagatgccaggaaggttctgaacatcagattgattcctgggactcccctccagggtggccttactggagtcaggagcccctgccccactaggatggctctgcagtggcctgaggacagtgagcactgactggtcactggtgcaaagttgcccactgtgatggttttgaccgttgatgggaaccaagtgaaagccctgcagctatttctaggcatttcagagggtgcttccctgcatgtactctgctgcagaccatcctccctgggccaggagcccgctacacagtaggagattctttttcttctcttttgagcacttttattctctttttcttaatctctgctcctcctttgaactgagaaatgtgcaaatcttttttgttagttttgaggttgcttcttatgcatatttcatctggaactttcccctttgggggtgatctgttctatcagcctgcccgctgctagagaggccgaggtggtccggccagccgtgcgctgctgctggtgtctctgtgggcatgacctggtgagatatcattctgcatctgggggtccatcctatcagccctgtgttctagattccccagtgactgacatttagccagtctcctctgtcactctccagtgacatgtacacactgttggcacgaactgcagatgtcacgttctgtggctgagagcctcagtgtgcatctgtagtaggaggatgtcagtgaggactgtcctgtcgctgctgagctggcaccgactgtgcctggtctacactccaggtctgccaaacgacccagcaaggtccttcacaactcttctgatccaggatcacacatcacttgtgctttgatgcctgcttctgaacaattttacctcctgagatgtccatttttgggagtgtgagccctcctctcctggtgacagctggctgaggccgtccagcctcaggacacacagggaacggctgcataaggagatctggggcagggggcccaccaggatgttctgccctgtggggggcaacaccggctgtggtctgccggcggcatccagggacagtctgtctaggtgaggctgaggccgcccccactcgctccctcacccccatgctgacagcagtgagctgaccacagactgggggagccccacagggagactggcctccccagcacatgccccgcagtgccagacgcggtcatcacagaggcaggtacacgacaccacggacgtgccacgtacccgccatcgggaccaaggaccactgagaaaccatgaaggccatgcagcgactgtggtggcaggaccgtcaggaggccataggtgccacggctcccctctggtggttcacctgcccacctgtagctggggtggcccctccagtgcgctccccagagcagaacaccccccaggcaacacgtctgatgaaggccaacagcgtcagtcctctggtgtttggtgacatcaaagctgtgccgaaaggccttccctcactgctaacacttgaagggcttctgtccggtgtggaccctctgatggcgaatgtggtctgtcttatgcttaaagatccacctccattaactgcactcttagggtttcttcctctgaaaaggaatgaacacgggaaccccctcaaaggcatttttaaatgaagcgtggaaggcatcaaagatgtgctcttcttcaggactcaggcttctccatcattctctgttccttggaagcgtgagggctaaggagctgctgacttctctctcttggccccacttcaagaaaggcttgcttcccacacacctctccacgctcccagtgcgggactgacactctgcaccgggaggccaagggccaccatcgtcttgctgggagaaggtgtgacgtttcttggtcataggagggagtgtgatctgacaccagaggacttaatataacattgcagtgttaacatcttcactggcagattcatggactttccccctcctgaatgcatttcaacaccttgaaatgaacgatgcctcatgtctctgcagggtggacatagctctaactctctgaagctggctgaaggaagcaggtggacacaaaagtccattctttggtgcaattttatagttgggaaagtcaacactgtgtggccaaatgaacacaactgcatttgatcaaagagatagttggctaacagaaaaaaatttcttcatacaaagagttggacaggtgaaacatccacagtctttcttgacctgaatcaagctcagagtgacagtgtttaagattatatgtcaagttctgtgtgaaatgagagaccatggggattcattattgctggagttgacggtattgcagttttataaccatctaataaattagcatttaatactgagagatttcatcttaaactcagaggattgctttgttttaaagaagatttttgcaaggagaagcaatggaaaccattcagaaaatgtgggagataaaaatcctattcaagaaaacggatcttggatctttgcattcacttgatttgtcagaatattattctgtgctaaaaaatagaagggattaaatgttaaaaatcactgaggcacaattctcttgagttcaccaattttgtactcctatttccagtttcttttcacatacgtcattctccatcctgattaagcttgttctttctgagctcatttctgataccaaaagaagtcataaagttctataagattaagaattctcttagaagtacagatttgcatgaacgtcaaagaaaaaaatatcacattttactcccatatgctttaatgattattttattaggtcaggcatggcttaggttagaacctttgtggttttttttttttttaaattccatttagttaaatgttgacacaatatttttggaattctatattttgacttttccgttaacctaggtctgttttggagtggggaagagggtaggtcatcatttctatttaaaatgggaattggctaggcgtggtggctcacgcctgtaatcccagcactttgggaggctgaagcgggtggatcacgaggtcaggagatcgagaccatcgtggctaacacggtgaaaacccgtctctactaaaaatacgaaaaaaattagccgggcatggtggtgggcgcctgtagtcccagctactcgggaggctgaggcgggagaatggcgtcaacccgggaagcagagcttgcagtgagccaagattgtgccactgcactccagcctgggcgacagagcgagactccatcttaaaaataaaataaaataaaaaataaaagtggcgataattaaaaagtcaggaaacaacaggtgctggagaggatgtggagaaataggaacacttttacactgttggtgggactgtaaactagttcaaccattgtggaagacactgtggtgattcctcaagggtctagaactagaaataccatttgatccagccatcccattactgggtatatacccaaaggattataaatcatgctgctatacagacacatgcacacgtatgtttattgcggcactattcacaatagcaaagacctgaaaccaacccaaatgtccatcaatgatagactggattaggaaaatgtggtgcatatacaccatggaatactatgcagccataaaaaaggatgagttcgtgtcctttgtagggacatggatgaagctggaaaccatcattctcagcaaactatcgcaaggacaaaaaacc

SEQ ID NO: 2930 - DNA, 13380 bp, Homo sapiens
aaaggattcattaactgagtgtcctgtgttttatgtgacaattctgtttgatagattgaaaaatggccagaatccttccgctgcctctggatccactccttttgcaatgtgactttgctgtccccccattaagaagtggatttcatttctctacccctttaatctaggctggttttgtgacttactttggctaatagaatgtgtagacataatgatgtgtgaattctgagcctatgcctcaagagcctggctcacttctgctttgtctcctctcagaaccttgtgcagtctccacacccagtgtacccattttcaggatgacagaccatgtggttagaaaaaagctgtcccatctgagactgtcctgagactgttctacaccagccagcccccagtcaatccggcagctgactatagagcatgaattagcccagctaagaccagaagaacgagctcaaattggcaatctatagaaaccaataaatgattcaggagctaataaatgattattttaacttactacattttagttagcaaaagcaaattaatgtagtttgacaatgcaaaatagagctgggcatttttaagaccagaggacagcttataggttgtgctgagttttggaggccacagataaaagtgaaatagaaggtgatattataatcaattttgagcaaataacacttggaatggcttcagtgaatcagaggaaattgcttgttgaaataaacacttgtgcccacagggtgaaaaaattacttcttatagagatattgttttccttctttaactatttaagatttaaaatatagaacctctgctgagtggcttcttccttctttctctgcagatcttatcatgatacatctcttttaaccagcccatgctgcactgtatttctggtgattaattgtcgaggtcagacctgggcagtgaggaaagacctggtctgggaagaactttcatatataataagtcttcacttgacattaaccaattttaccataggctgattagtataaacaagagttaagttcccatggcatatttctggtcataaaaacatcaccaaacttcaaaataatgaccaagacacctataatattaaacattgaaataagtgtgagctgtacgcacatttaggaaagattaattaaaacaagataattacttactcaattattccagttcagagtctcaggtgacctaagaatatcccagcagtgaaggacacaggtaagaactgaccctggaaaggatgccatccatcacagggtgcattcacacacacccacacactcacacacatgcacactcacacacacccacacaatcacacatgcccacacacacacacatacccacacacacccacattcacaaacacacacacccacacacacacacaaacacactcccacactcactccgactgggaccatttagacacagcagcccacctaacaggcacttctttgggacataggagaaaactggagaaacccacacagtcatgaaaagaacgtgcaaaatccatgcagacagtggctgtagagaggaatctatttttttctcactcatgttataacaaaacgacattgtatgtaactacattacttgaggacctgctgtatctataaatcatcaattaattagtcaaatgattaatgaacatggactatagggagtccagagaagagatatatgtggattagcagtagtagggaaagaaagaagtagggaaaagctcacctattatctctggggacccctggatgtctggattttaactcttggccaagataagggcagtgagaataatgcggtgtttaaagtgctaaactctggcgactccgagtcagtttcttcactaaaggttttctagtgatctaattggttaggcagcatgcctttgatatgtggagagaggggtatatgaagcccactgttgattttatagctttgagctctcccaaagcctagattccttgcacagatcttggtggttcaatccctgagacagagtctggtcagatccttgtgtaaccaccttggggagcttgctcatgggatgattgtcaggctcccactgcttgcctgtgctctttttctcttgctgcatcttttccatggcctttacgtaaaagccccacatgtgtatgagtatgctctgtggaatgtggtgagctctttccaatatctggacatgggaaatctttgcattcacagtgcctagggaaagagatgtctcattttcctcatctgagaaatggtgaggatgataaaaacaataattacatcatggggctattacgaagattaaatgagctaacagaggtacaacacttagagcagtatctggtagacagtaaatgctgtgtaagtgctagctattattattttcagcctgtctaaaccttagtgatatggtttggctgtgtccccacccatatctcatcttgaattgtaactcccacaattcccacatatcgtgagaagaacctggttggaggtgattgaatcatgggggtgggtttttttgtttgtttgttttgagatggagtcttgctctgtcgcccaggctggagtgcagtggcgcgatctccgctcactgcaagctccgcctcctgggttcacaccattctcctgcctcagcctcctgagtagctgggactacaggcacccgccaccaagcccgggtaattttttttgtatttttagtagagacggagtttcaccatggtctctatctcctgacctcgtgatctgcccacctcggcctcccaaagtgctgggattacaggtgtgagccaccgcgcctggccaggggtgggtttttcatgctgttctcatgatagtgaataagtctcaggagatctgatggtttaaaaaatgggagtttctctgcacaagctctctctttgcctgctgccatccatgtaagatgtgacttgctcctccttgctttcttccatgattgtgaggcctccccagccatgtggaattgtaagtcaatgaaacctctttttctttctagtttcgggtatgtctttgtcattagcatgaaaacagactaatacacttagcatgggggacttcttttgcctcaactttgtgtgtgtgcatgtgtgtatgtttgataattgcttcctgtctactcacatattattaagaaaaaaatcttgttttaaaatagctggggttttttttgttgtttgttttttgttttttgtttttgacggagtctcgctgtatcgtccaggctggagtgcagtggcatgatgttggatcactgcaacctccacctcctgggttcaggcaattctcctgcctcagcctcccaagtagctggtactacaggcgcccaccaccacacccaactaatttttgtattttcagtagagacagggttttatcatattagcaaggctagtctcaaactcctgaccttaggtgacccacccgcctcagcctcccaaggtgctgggattacaggcatgagccacctcacccagtgctgtttgaaattttatcagtaagactgaaacattccatttttgcctggagggtctgagttattttgacacagaaaagcatccaggtgcacaacttcaaataagagagttttggacacaacactctgtttatcttaatgtaatagttttcaaggaaacagggccccacatttgcttcttagctgaagcctgatgttaaacactgtcttgctttaatttgagcccatcaaaatatcacttcatttaaactccacttaacctctccccatcccgaatatcctatagtaaccttgtcttttcctgtgtttggtgggacactcagattttctctggtgaataatttgttgcatcatgttaataaacttggctttattgtattatactatagtttgttcctggtggtctttatcagacaagctttatagaaatatacatgcatggtattactgaagatttcattcttttttcttttaaacaaactatactagtattttaaaaatatctatcctttttgctttatgtaaatctaattcattacttctaactgctggatagaacttcatcttacaaacacaactatactcccacacaccatattttttttcccattctcctagaggtagatattagagttgcctccaattcctttgtactataaacaatgctatatatcctcatggatttcctcttatggacctgcttaagaattttctggcatatatactctgaaatggtactgctgagttctaaggtgtgctgccaaaattttgctaagattgctaaaatagtagagccagtgtacacacttgccagcacttggcactattatctgctttcaagtatttttccagttagatgggtataaggtggtattccattttgttctgatttgtatttctttgagcacaagtgaagtcaagcaccttttctctgtcaattgcttatttgtttttcttccatgaattacttactcatattctctctccctttaaaaaactgggctttttgtcattatgcaaagaaagcacaagagctagttgccttcttataatttataattaagcagaaataatttacaattaagaggaaattagaggacatgctgtactatgtggcacttcctgaaagtacaaaagataatcccgtgagatagaaccatcataggttgatgtttttagaggcagttgggagacagaaaatgtgagcagagttggaagtataggacagaggtaagtgacggaggagagacaacaaccttccagagtaaggcaggcagcagcgacaaaggccagaggaagaagggcaggtatttgttccagagaaaaagcaaggagacccacttaagtggaggatatggttagggtagtggaaattaaatttgtataaataggatttaactggtaggaggactagtaggttcctgtgatgattggttttttgtgtcaacttgatggggccacaggatgcccagatagctggtaaaacattatttctgggtatgtttgtggatgagatcagcatttgaattggtggacagagtaaagcaggttgccctccccaatgtaggtgggcataatacagtttgttgagggcctgaatagaacaaaaatatggaggaagggagaatttgctctcttggcctggttgctcatcctgggacattaatcttctcctgtctcaggctgcaacctttaccattagctctcctaattctcagtcctttggattcagactagagctacaccaccagctctcttgggtctccagcttaaagactgcagatcatggaacatctcagctttcacaattgtgtgagccaattcctaataataaatcatgtatatataaaatatataaataaaaaacatgataaatatctctatatgatatatattaaaatatataataaatctctacacatatttgtaatatataatatatatttaaatatatttattataaggaattggctcatgaaattatgaaggaaaagaagtctcatgatctaccatctacaaactggagtccctggaaagcccgttgtataattttagtctgagtctgaaggcatcagaaccagaagaaccagtggtctaagttccagtctgaatccaatggcctgagatagatatatatcccctattttttttttctccctctggaaaactctaatacagccactgagcagggaagtaacatggtcaaaagtagggttttagaaagattttattttccaatagcaaagggactaagagggcagaccagtgacaagagcagactataggtaaaaagtgaatgtttatttgcattgaacagaaaatatgttctgggtgttagcaatgggattgaaaaagaaaggataattagaaagatttaaaaagaaaaagaatttggtggcaccaaatcaacaataaaagagttcttgaattttcttagattttagtctgatggattggaaataaattgatattatctgaaacaggatagcttgggggggaaaataactgccaggcgaaaagcataaattgcaatggtcttgtattttaatatcatttgaataaattacagggtgtaaagggaaagcatattgctcacaagttgaggacttttgtccttttcttttcctattatcagatgcttcagccctattctaccttttgtttctgggtttttaaatcaccctttttatacgcaattcactctttctgcatacaaactcccatttatcaaataaatactatttaacaatttgtccatattcccttaaatcctgaaaaaaccaaccatcctttagtaaaacttgttatattttgtgatactctaacactacatgcaaaaacggtgactctatcaaatgatgcagtttattatagtgattgatttgtacatggtttgctaaatgcatctatgttgtaggctttttggctaatatgatttgttaaaaccctctcagcaaagtgctgttacagtgaccatctttggagacttggaaatagcctcattacacagaacttgatgttatacactaatggcatttattagaatggaattctatatgtattattacttccgacaccagcctggcctttgtagcctcctcacagcatgcaacgtcggtaattatgctaatgctagctaattcatgaggacaacttcctaaagtgcccttaattaacttggagattttgtaaacagctatacatgtaggttccggaaattgtggggatatgtcaatctgacatgtgtagagtctgccttcctaacctcatcactttgttttactaaagcttaattttaaacaagaagttccaatctgatatcttttccagcaagtgcttgaggaagattctgataagtgtcactttagcctgtatcctccagtccaagtcccttgagccagatgagttaggtagattggtgtcttttaagttggttagaagagaaaatattgaagtttatttctttagtaaagggtacaatttttccaatatgttcctgcaatgtgattttgccagtttgctaattctgccgaccaacattggtcttcaggggactgttccaaaaatcagacttctcattcagaaagcttcatgatctctgcttcccttcagtcccagctgctggggattttttgatattacagtgactcatcatcctcatttgaatgaaaataatctgatttttgacctattacattaaaatcttataccctttacatgtaagaggtgaaattcataaacctagaacaattagccaggctttagagtgccaaagaagaaattaaacacaataaaaattaagagaaaaggttagtgaatcacatcacagccaagagcaagctaataaaactggaaggaagagacatcatcaggaaagaaccaaaggaaaaggaaacttactacatacaattagaagatatagcaattgcataaagttaatgaaaacggagaatagggatggcttttaataatcttcttattaccactgcatgaaatcacactctcagataagtcctagaaactaagctagggatttgcctttcgtttctcaagggtcccagcatgtcgtttcccctcgttaatttaagttacaatcctaggtacaatcactttgggaactagctatatcacatctaaagataatcaaacatttattgcttagccttttctttgacttcaatagtaagaacctcttctccgccctcagcagaaggagccatgctgataatgagtgattgacgagaagtccctctgggtaaaactgtccttctaactgagtggggttcttcctccactgcaataggacttgctgtacattcaggtctgtccagtggcttctcttctggctctcttcctttatctttatcttcattttcttttcctttatcttcattttctttttgtttatcttcattttctttttgtttatcttcattttcttttccttcttcctctcctccttcagaattttctttcttctggaaggagcaattacaaagaactggtgttgaaatcgtaattaaaaacattggattagattttgattagcatgcaatggctaagatcaccaccaagacagactgtctgaattaagtgaatccaggaatcatgtctgctttgcttctgactatcatttgatgaagtttctggtgtgctagagaatggacttgttgcctttgactcatgatgttagtctgaattgcatttttttgtctctgccaaggaattctcttcctattggtccttatactctctgaattattagactcagtgctcaggactctgtttttgctttttaaatatttacttattctgtagagataaaattttaaatatttatttttaataaaaacatattaaccaatactatataaaaatactgtaaaaagtagggttttcctcttgcctaagcttgtgggagaacctcagggagaaacttatccctttcctagtatgatcttttccatttgtcccacaggtgcttgacctgtcatgtttgtacctatcgtgtttagcactagctatagaaatttcatagcaaaaggtacactatgctctttactggtaatgcttgggatcaatttgagaaaggcttgcctgacatatgaatgtgcacagataaagttgagattcttaacacatttacttatatatttctttactcccatacattttttatgcaaattattatttctatgctgatgcaaatgaagcatttggtttatactggatccctaactttcaccacagtgttgtatgtgtggaaaaggaaaatgcaagttttcatcttttgtatgtgactgactttataatatgtgctttacttattttctgaaaggtccacagctacccatttctacagttttagagataacataatgactaggttcagaaaacctgaatccctgctctgtctgtttctcaatatctgccctcataggctaattatgagaatcaaagaaatatgaaaccaaaaaaaaagagagagagagagagaaacaataacatttgagtttctttacatttttaggaattgaaaggcagcttagtgtaggcctgtaagtctgaacacctgagtaatagctttctgctctgtaactaattatgatcttatccaaatcccttgatctggttttcagtttcttcatctataacatgaaaagcttggatgaaatttacaaagttattttgggctttaaacatttgtgatctatagtaattgaatatttgtgaaaatgttgataaaatgggttatttatttatatatccatatgtatgtctgtatatatacagttgatttttattcatgtagttttgttctataaattttccacaaacagcaagttagcaagtactgaaccattgttcttggaggaaatacagcattaggttcctatgagatattatggttcaagccataatatttttgtcaattggtcaatgtataactttgtttcatgtgtgtttttgtttagagatacactatttaatttgatcaattgattaatttgaggtattattgattcattatattgaactcatgcaaacagcactgtaatgcctgaatgaagtttacctaacacacatattttctctggaaggcacatcacagcattttggcacttaggagcactagacagtatttcaggactatgcttgggggctattttaagcagcaaaatcacacacatgcaaaaagcacaaaaatgtggaaagcatggcactaaaagtgtcactcttttttgttgttgtttttgtttgtttgtttgttttttgagacagagtattgctctgtcgcccaggctggagtgcagtgttgtgatctcggctcactacaacctttgcctcccggattcaagcaattctcttgcctcagcctcccaagtagctgggactacaggtgtgtgccaccatgcccggctaattttttgtgttttcagtagagacagggtttcaccgtgttagtcagaatggtctcgatctcctgccctcgtgatccgcccgccttggtctcccaaagtgctgggattacaggtgtgagccaccgcacccggccaagggtcattcgtttatagtatcagagctgaaacaagaaaggagagtgcctcttttttcaaactcagctgaaaatgtatgcatcaagcaacttaaattttttgccaccctgcacgtgctgttgtccacaaatgaccacaaaagcaccatgagtattgattttaagttactaataaattatagtaagtagattcaccaatatagaatctgcaaataatctatgaataatgagggtatactctgtttataaatacatgcatattaaagccatctataaacatcctgtgagggttaaatgtgatgatatgtgggaattcagcagtttaaataataatgtgctatatataaagcaggaagtattagtattagattagtccaaatcatcccagtgtctgaaatggaattagagtgggcgtttgtgtgtatatacttagtctggggccttctccatgacagccgtccattcactccaccttattacctgagctgcttgctctcgcttcaatttgagtagtcttgcaagacttgcttttcctgtgcctcctaggagagttttaaacagtttgggtgtctcttctttcggtgggaagaggagggcaagatcttttcttggaggggttgcttctgcggtcttagccttctgctttaaaagcactctgtgggtaagagagaaaagctgttttaggtaactctgtgagagttctggcaaaatctactaaaaaaactgcaatttatcctaacctgtgtagtttcaatgggtacctacattaatagttgttcattaagcatatctcactgtgatcaagtttatcacaatcataatacggttctccctatctcagagtttacaaagtaaaaccaactccatccatctctaatggtgttttaaaggttgtacctggctttcttcatgaggatcctttcagaatctggataatgcactagaatttcttggagggtctttttgtctagagttaaaagattggcaaacccgtgggccaccacattggcagttcgacggtttcctcctcctgctgctagaaggctgtaagagagaaaaatgagtctttgccaccagtttcagttttcctccactgaaatctctttaaaaaaatagcaactattataagtatttatactgcttcagaaatcattccctagaggtgagggtccaggtgattgtgcagagagtgtcaagatgtgggaatagaaatggctcagttttcaatatattttttctctaactctcacctctaagtcccacaaatcaaggacttgtggctgtcagtatcctgtcagatccttcatcccagattccagaaatgcagaatccttttggactgggtatccctcatttgctccttcagatccacttttcacctctccccatgctcctttgtttcccaggaagctgacctctgtaggcttgccctctgacttcacttgggctcagccattggaaaagactaataggaaatcagaaagcaggaagagagtgggatcagagcatttatctcccctgttattttcctgccaagccttaggttagcagtggctgcagttctctaccaaaatctacagctcctgacacatggatgtcttctagaagtgcaattcccatcactcttgatgagttctggtaaacataccctcttcttttcccattcaggcctcactgtagtaacagttcctttgctgttgctaaatttgagatgcattgccaccttttgttggtgtagtagtccattttcaccttgctataaagatactacctgagactgggtaatttctaaacaaaggatgcttaattaactcaattctgcatcactggcgagggctcaggaaacatacggtcatggtggaaggcaattgggaagcaaggcacatcttatatggcagcaggaaagacagagagcaaggaagtgccacactttaaaaccatcagctctcctgggaactcactcattatcacgagaatagcacggggggggtggcggggggaactgccctcatgatccagtcacctcccatcaggtccttccctcaaaacatggggattacaatttgagaaaagatttgggtggggacacaaagccaaaccatgtcagttgggtactcttagacttttcctcacttctgtcagtaatctctttattaaagtttactcaattgcctcacttgagtgtgtctgtttcccacctgggctctggctgatacaactctcaacatcaaatgtgaaagccagcacttcatgatgccctggtcacctcaggtgaatccaatctcatctcctactatactccaaaatcaacttgttcctcagtgtcataagctgctctataatatagtcattcacatacatctccccacctggaatgccagggaattgtgggctttatgtcttggagggatataaaagagcattttgcatttgagaaataagcaaaaaagagtgggggaataaacacagaaaggaataagataaatgaataaaaagtctgtcgttaccggtgatctgagaaggaaggattggtttgtaaaaacagaacaagaaaaaccacatttcaaatgtttaaaaaagacaccataggatctgcattgagaggataacacaacagattgaaccccttggagttaatctgttagaaactgagaaagaaggatcacattaacaaaagcagtttctacaggtggagaagacagagaaaacactctgacctttggaagcaatgagatataagaagctgcatgggccctgtgcctgaagatttatgttatacagtatgaacaacttctgttgttgcagaaaagggaggattccagttggctgttaattgttaaaaaacttatatagggttttagctctgacaggttaagagcctggaaatcattactcctgtccttacaacaagaaaaagctgcacaattgaaaaattaacgacttttcttagatccttcagagaactgaagtcacagggcaaactaccgcccccaaatctggagagagaggtgaatccataaaactacagccatatctgcttactgcagcagaagcccctggagtcataactgcctcccactgatgcctggcattaatgaatatatggtcatcactcctggcttttagataagaactggagtcccaggaagcctgtcgactttctctaaggtcacacatgcggccctgtggagtaaatatgtgatgacatatcagataagtaggatgtcactgctggggatctgcataaagaagaaaaacaaaaaggactgaagccctgagaagctcctactcgacagtgaagatgaggagg

SEQ ID NO: 2931 - DNA, 12492 bp, Homo sapiens
agtgcctgtccaggggcacaagggttcactgaagactcaggagaggggtttagagcacagcctccctctccagggtcaggttcacgggagctgttgggggctccttccctcgcagcagtgaccactccaaggaccacggcctggacatgagcggcagcggtgagctgggagctgctggcctggagtctagatgaatataggcagcagccaaaggccacagtcacgacaaacctacacactctcaccactgtcatctcatattgtcctaaaatttccagccagtgcaaaaaaacatgaaaaagaaaaaatacagccattggaaaagaggaaaagtaattgttattagctgatgatgtgaatgtcttcctgaaaaccttaagagaaccaactggaaaacaaccagaaatgagagcatggagttaggcaaccgccgatctgctttctgtcacttgggcgagtttttcccgtcctgggatttcatatctctggaatcctgcagtacgtagccctctgtctggcttcctcgctccgtgtaatgttcttgagattcatccatgcagctgtgtatacctgcagtgattgtttctcttgttgaattgctgagaagggttccatcgtatgccttttccagtttatttgttcatctgttgttagacatttgagttatttccagcttgggactcttatgaacaaaactgctataaacatgcatattcaagtctttgtggatatgtgctttcttttgtcctggataaatgtctccacgtgggcttcctgggtctcacggacctcaccagctgacgtggccggccctggacttgccatggagaaggcagagcctgcctcccagtgggtccctgtgaggaacagcagtaccggcttgtcgtctttctgggaaatgcatttcgcctcctctaggaacctcccggatgacccagagtgttctccacccacttttcctgccctgtgcggtcacctcatttctacaggcttggggaaacaaatgcaaagtgctttccagaacgtttttgtcttacacatgacacttctatggaaaaaatgactttttttccattgttccttccagaacctgagcacatccctctgctgggaggacgctgtctgtccaaatgtcactgtcccccatttaggagcagcagcagggccttgcttcatgttcatatgggtgttgattgggatatgatggattcttctgtgtactttggaggattttctccttagtttgaatagtaaactgtaaactcagactcaggacctggctggtggagagctgggtccctggttggggctgaccacagaggcccagggtctgtctctccttggaaaatgcccaggctgggcaggcaaggagctgggctgacctctgccagtgacaattcctggcaggtacacctggctggtccccagtgccctgggccagtaaccctgcagcagagaatctaacgctagccaggcctgagccgtgggtcatctgtgaagtggcctgcccactgtcataagaggtgcacccgtctgcctgaagccaggctcagctagccgactggtgagctgcctcctgcttcagagctcaggccccggagttctgctgtggccgcaggcatgcaccctcgtattggcctgcacagcaggccttgggctgctccatgcatcacatgtgctccaaaggatcgtggatgcctgagttccaccctggagggaccgggcatggcctggacatcaggacgttcacatctcctcaaggattcgtcctccgtgaccctgctgtggctccagacggtttacaaagggcactcacctgtgcctgctcattgacacttcactgtgttcccattcgataaggaaaccacggctccaaagaccagctgaagtcacgggtggtaagaggccaagctgaggccccttgccccatccctggctccaggcagcctttgcccccacctctccctcaccgtggcctccagggtctcccaaagcttccttccctccttcaaatctcagtttggtccgtggtgagtcaggtgtgctgagtggactaaagttcatagctccagccaggtacagcccgggcagcaccagcaccttcagtttcaaggggtcctgggaaggctggcttgggaagagttccgagcctgaagggtacaggtgggtcagcaggtgggaggagctgccatcatccatgatgtgtggaccatgagtttcttctgagagtgaacatttccccaggcaggtgttttgggggaagggaatgtgccctgcaggcaggtgtggccctgggtagctgcatggtcgggtgcatgtggccccaggcagatgcatggtgggtggtgtggccccaggcaggttcatggtgggggagatgtgcatggtggtggggtatgaccccaggcaggtgcatgaccaggtggtgtgactagaaggcttcctccatccttgctggacggggggtcccacactgcctgggccctctctttgggtcacaggcttgctgccccttttgttgccatttctgggcctgtgttagccaaggtgaccttcagcagccaccatcatgcacagagaaggacctctgcgcctctcagagtccctggcctgacaagaagaaactgaagccaaaggcagcccaaacctcggggcaccatgggccccttggcggccgcggctcattaaatgccctctttctaagggtttcctcagagccttcattccctgctcagcattccaatggcctcctccgggatgccttttaatatccctgccaaattgaaatgtgagccacctaattacaaccagaacatcctgcccttggacgcgctcacttgatccatggagggactgttccctctgttgttcacgtcctgactggacttggagatgagagacttgaaacctgcatctgtgtctggtcaggaaggaccagcagctctagtgaccacagagagcagagcccaaagcactgactcaagcccctgccaggtgcagagcctggaggtcccagagtgaccactcctatcactggagccaatcccagagtgaccgtccctatcactggagccgatcccagagtgaccgtccctatcactggcgccgatcccagagtgaccgtccctatcactggagccgatcccagagtgaccgtccctatcactggcgccgatcccagagtgaccgtccctatcactggcgccgatcccagagtgaccgtccctatcactggcgccgatcccagagtgaccgtccctatcactggcgccgatcccagagtgaccgtccctatcactggcgccgatcccagagtgaccgtccctatcactggcgccgatcccagagtgaccgtccctatcactggcgccgatcccagagtgaccgtccctatcactggcgccgatcccagagtgaccgtccctatcactggcgccgatcccagagtgaccgtccctatcactggcgccgatcccagagtgaccgtccctatcactggagccgatcccagagtgaccgtccctatcactggagccgatcccagagtgaccgtccctatcactggcgccgatcccagagtgaccgtccctatcactggagccgatcccagagtgaccgtccctatcactggagccgatcccagagtgaccgtccctatcactggcgccgatcccagagtgaccgtccctatcactggagccgatcccagagtgaccgtccctatcactggagccgatcccagagtgaccgtccctatcactggagccgatcccagagtgaccgtccctatcactggcgccgatcccagagtgaccgtccctatcactggagccgatcccagagtgaccgtccctatcactggagccgatcccagagtgaccgtccctatcactggcgccgatcccagagtgaccgtccctatcactggagctgatcccagagtgaccgtccctatcactggcgctgatcccagagtgaccactcctatcactggcgctgatcccagagtgaccgtccctatcactggcgctgatcccagagtgaccgtccctatcactggcgctgatcccagagtgaccgtccctatcactggcgctgatcccagagtgaccgtccctatcactggagctgatcccagagtgaccgtccctatcactggcgctgatcccagagtgaccgtccctatcactggcgctgatcccagagtgaccactcctatcactggagccgatcccagagtgaccgtccctatcactggagccgatcccagagtgaccgtccctatcactggagccgatcccagagtgaccgtccctatcactggcgctgatcccagagtgaccgtccctatcactggcgctgatcccagagtgaccgtccctatcactggcgctgatcccagagtgaccgtccctatcactggagctgatcccagagtgaccgtccctatcactggagctgagctctgtacaggaatggaggaaacaaaggcgcccgctgccttggaggcccagcaccttcgcaccttcttcaggacttgctgttttccagggctgtggtcggcactggggacctctgaatgcagcccctccctgcaccagcagcctgggccttccgcccttcttgggacattggggtgatcagaaaaccacaggccaggcctccttcagatagtgcttgaaaagatcccagaattcagccctaggaggggctccttctcccactgcacccctgtcccagacagccctccttggtctgtgggggcaccaggccttgggtcttccaaggggcccagctccccaggtgtgagctcacagctgagaattgccctccacctggcccggggtctggccattccagcggctgtgcacatctggggctcctgttcactgcagcccctcctctgtcctgtcctcggttctccctcccagcctagaatccctaccccaaagcatacacttcccagggagctgaaaggacctcagggtggggcccaccctgctgggtagaaggaaacagcagggtgtgtagggcaggaacgtccctggagggctctcggggtgcgcctgccatccctctacacccctctgttccacccccacgcccgtcagcctgagtgcagtggttaaccgtggcatttgggaggccaagtcttggaaaaatcaggccattttttggtctgtttgtttgatattctgagaatttctatgaagcatgagttcctgcagtccgaaggctgagaggttctgcagaagggcacagaccctgcgctccctctgccatcatcagcaggagtgggatgaccctgtctgggaggccgtgggaggcaggactcggtctggtgcctgacatctggtgccagcaggactattcctggggaggcctcagcatgccaccctgagagaagggagggtctaggcagggggctgtgtgggtccagagacctcagctgaccccagaaggagctggctgctttggcaatcagggtagcctaagtctcggccagactcaagcctctgtgtcctgcactgactggacacgggatacaggccagccccagggtcctgggcagcacgtctccccagatatgtccattggtgggagcagctgtcctccaggccttgtgccgctcttactgaatggggccaacagtcagggccgccacctgagacccacacgtttcctgctggcacctgggcggtggtgccctttggcctaagcagctccctgtgcttggctcagcctggcctgggggtgtggtggacaggtggtgcattctgctcctgatacccctgcctgggcagagcccttccaagtggtggtctgggctcgtcatggaggctgagggctggcagggctggttccctcagccatagaaaggatcctcttgggggttggcggggaattctgcaggagcctttgagacaggagtcccaggccttggtaccctggcaggggaggctctctgtgcccaccccttcctccacctgggagtcctgccagggggcctgcggacaagcagccctgggtatcccatgcgctgctgctggagaggccgcccttggaagctgctcccgagatggaggagaatggggcaagcaaccttgcaggcaaagaaactggaagcctcaggatccttatggatgctgctactttctctttaacaattgaggattaactcgccgattccaggctcatttgaggtgaccccgaacgataagctcgctccgattgagagactcagaaaaacagtctctgagcaggtccttaataatcgacctgcccgaggcatcattacaatagataaatctaaataaagatttcctttgccattgacttgtcttggcctaaatatcgtggaaaatttccaagactgcttatgcccgacacacgacgtgcagcccaactgcacgtcgaaatgaaaactggggtgtggcgagcctggcggggcacgcagaggagatcagggtacatgagagcgctcctaagggtgcggcgcagtggagccaggaaggctggcgaggaccctgcaggtcagcggctccccggacgccctcgtgcacagtgaccctttggggtggaatccagttcctggcctgggttggcctagaaacatcctctgaggaaactctcgttgagttgttaccttttctcttgacacagctttactgaggtagagttcacacgccagccccacatccctctgaagtgtgcagttcagcggtcgttggtgcattcacggaatccctctgaggtgggcagttcagtggttgttggtgcattcacggacacgctcagttcagtggtcggtgcattcacggacacgctcagttcagcggtcgtttgtgcattcacggacatgctcagttcagctgtcgttggtgcattcacggacatgctcaattcagcggtcattggtgcattcacggaatccctctgaggtgggcagttcagccgttgttggtgcatgcatggacatgctcaattccggacattttcatcttcctccaaagaaaccccggggctgggcagagcagctcgtgtctgtaatctcagaggagggagagcaaggctggaggatcccttgagcacaggagttagaccagcctggacaacataatgagaccccacctctataaaaaatataaatatcagctggtggtgatatgtgcctgtggaggctaaggtgggaggatcatgtgagcccaggaggtcaaaactggagtgagctgtgatggtgccactgccctccagcctaggtaacagagcaagactccatctcaaagaaaaagacaactctgtgccctttggctctcgtgcttgcccccaacctcccagatgggaacctcagcgtcccagcagcgtccgggaagctttgggaagcccactgccttcccagtgggcagggtcaatacactcaccttgagaagatgtgttactaagtatgaaaatgtgtgcagagaaccaaacccaaagtatgaatattttgtgacagatttatgcatgtttggtattttaacactatgcaatgcttctgagatttttgctaaaaaacaggtcacctggtgggaggccgaggccagcagatcacgaggtcaggagatcgagaccatcctggctaacacggtgaaaccctgtctccactaaatataaaaaaaaatagccgggagtgatggcaggtgcctgtagtcccagcaactcgggaggctgaggcaggagaatggcgtgaacccgggaggcggagcttgcagtgagccgagatcacgccactgcactccagcctgggcggcagagcgagactccatctcaaaaaacaaacaaacaataaaacaaaacaaaaaagaaacaagtcacctgggattccaacttaaacagggtaattgggtaattgattttgactttatcagtagatacctttccaaattgatatatagctttggacacttacactttgaacatgtaaagatcagcacatgtgtaaggttaactagcattgcaagtatttgggaaagtctgtttttaggcaaatagagtcctttaaaaagaagtgaagttttacagtttcacaatttcagcttaaaaggtttaaagaagcttagataagtttacaaatgggaccaaatactaatcaaaagtgttgaaattagttaggtttaaaaatagaatatcatgaaaaaagatagaatatgtggtgtataagctaagattaacccttaagaaagaaatggtttgcagtcaaatgctctatccctgaactatatccccaagaaacaggatttgcagttcttgttttgataaactgtacttttgtgggtttttttcaaagcttttattgtggtaagacacatacagcaagcaattcagcatcttacccatgttcgcatgtacagttccatggtgttagcgtgttcaggatgttgtgacgccgtcatcaccacccgtctccagatccgttttcattgtgggaaacggaaactcggtccccatgaaacacccactccccattcccatctccccagcctcagggagcctccgttctgctttctgtctcagtgagtttggctcctctgggagcctcaggtacacagagtcaggcagtacttgcccttctgtatctggcttctctcctttcccacagtgtcttaaagacccatccgtgttgtagcacatgccaggttttccttcctttttaagactgagttaaaatccattctgtgggtattccacattctgttttccattcatctgtgacagacgcccgtgttgctgctgccccttggccatcgtgactaatactgctgtgaacatagtgagcaaatattgcttgagaccctgcttctgattcttctgtgcatatacccagacgcagacttgctgggtcctagggtgattctatttctaattttttgaggaatcatcatactgttttccacagtggctgccccatttcacattcttaccaatagtgcatgagggatccaatgtaaccataacctcaccaacaattgttattttctgttttttaaaaatagtaaccatcctcatggttgtaacgtggtatctccttggagttttgattcacatttttctacagatttgttattgtgttagcccgttctcacactgttagtaaagacatatgcaagactgggtaatttataaaggaaagaggtttaattggctggggaggcctcaggaaacttacaatcatggcggaaggggaagcaaacacctccttctcacggcagcagcaaggagaagtgccaagcagaagggggaaaagccccttataaaaccatcagatcttgtgagatctcactcactatcatgagaacagcagcatgagggtaaccacacccatgattctattacctcccactgggtccttcccatgacatgtggggattatggaaactccaattcaagatgagatttgagtggggatgcagccgaaccatataagtaatccaggaggatccaggcccaaattacaatggacacaggaccaacccatgatggaaccaggttcagcccatgataaacccaagctcagctcaggtaggatccaggctcagctaaggttggaaccaggctcagcccatgatggatccagggccagcttaggttggatccaggctcagcccatgatagacccaatcacaggccacagtaaacccaagatcagccctcaatggacccaggctcaggccacagtggacctagtatcaatccaggagggacctaggatcagcccaggatggatccaggatcaaccctggcagctttgaaggaggaaactgggtcacagtagatgcatctcattctggactcctggcgtctgggagctgtttgatgatagaatgataggctttaacactgaatagaattacatcctgcctgtcttcaagttgcttaaaagaagcattctctcacctttcctgagatcagtgggaacgtccccaggagtcagtaggtctgtgttggagatcaatgcgctggaagctgaatgaactctgccatgccagaagccccaagcacacagcaaagctacccggagggagcgtaaacacacaggatgaagctgggctaacgtccctcagcccagcaccttccactgtgccacccacaaggaaggtgctgtgagggacacggcctctgccctcaagaggctatcgcctcctgtggtcccgcggagccccaccctcgcctgctcacaccacctgctgagggtgggccacctgcttcctgccaggacagtgaccccctctagacttggattagaccatctgagcaattgcagagaattcgggggcaagtaaggcctctgagggagcggacatcccacctgggcccctgtgtccaggtggaagatgctggtcttgtcccaccacactgagagctctacccccgccagcctcctgtcgctcaggcagagatgccaaggaaatgtcctggaacgcagctgtcagtgcctggcactttccaagctaaagctacattgccaagggactgaagacaccatacagtttgcaggcctttttttaagaagacattggggctgggtgcagaggcttacacctggaatttcagcactttggcaggctgagatgggaggatcgcttgagcaggagagttggaggctgcagtgagcggtgattgcaccattgcactccagcctgggagacagagcaaggcagtgtctcttaaaaaaacaaataaaactttggggaacactgcgatggagcaagaccatgaggagcacaggagaagacgctcagcccgacgcagccgtccgtgtggcaggaagaatgctgtacatcacagctggcatggccgcccgtaccctcttcttcacgctctcatgcctcctagagcttaggctccaggacctctgtcctgacctggccctggtgtgtgtgtgcatgtgcacatgtgtgtgcatgtatacatgtgtttgtgtgtgtgcatgtgtgtttgtgtgtgtgcatgtgtgtttgtgtgtgtgcatgtgtgtgcatgtatacaagtgtttgtgtgtgtgcatgtgtgtttgtgtgtgtgtgtgcatgtgtgtggtgtatgtgtggtgtgagtagaggggctggtcggttgggtcaggggaggagtttatgttcccattgaggcataagggggggtcttctggggacttcagggaaggttttttctgctctggcagaggggcaagctagaggtttctctcttgcatgaaccacactgtctggctgttccagctgtctggtgaccagggtggcctgcccggggcactgaggatgatcgtgtggaaaacggcactaactcaggtcctggacctgctccaccgctcagaaaccactgccagggctgccccactctcacactggatgggggaggcaatgcagtgtccttacctctgcctgcaggtcctctgacccacagatggtcacagatggtatatggcctctggctaggactgcatgacctataggccacatctgggggctctgtcgtggacacacccagcgtcccagggctgtggtttttaaatccctcctagggcccttgggaaccaaaccagcctgacggacctctgctgcagggtgtgtcccccaagacagggcgtgctgtgggtgcccgcctacagagcctctccagaggacaagggtttgggccacagtggccctgccagcctgcaccatctggtccccatcaccgcctggctgatggccttaagctcaccccacacgtgggtcctgctagggccctgcagcgtctcatgcttggggcttcggcacggcttctcctgggagcgtgtggtgctctcgggaggctgtggctgaatttaggcttagccgcatcccccgccattatttggttgaaagtaggaaaggtcatttggatgatacatagccttgggctccagctggaggtgttcatttcatgtctaaaactcctctcaatgccctggttcttttctgtgaaatatttttcaaaatttctatagagaagggtttaaaataggctgcccaagagccacagggagcaatgacccaattgttggtcacaagagggaagcgggggcccatttggccgtacccgcccctgtccgggcctccccgtcgcaatgtcgaggagtctgtgccacccctggggccccttggggctggtgttggcttcttggcaagtttcaacagaaacgtgcttctgacttccccaatcgtgtctgcacctcgttcagggagcttctccctgtgggtctgccacttggccctcgggggcttagaacgccgctggtcctgagatagtgccttgtgcccgccggcacccttgctgctctcacttgggggcttagaacgccgctggtcctgcgacagtgccttgtgcccgccggcacccttgctgctctcacttgggggcttagaacgccgctggtcctgcgacagtgccttgtgctgccagcacccttgctgctctcactcgggggattagaacgcc

SEQ ID NO: 2932 - DNA, 848 bp, Homo sapiens
ccaccacacctggccccatcatgtttctttcctgagccccacactgttcgtttgaggttgtctgggtagaggtggtgccatctgaagggatttcagggacacaggcattggtaaccagatcctctgtccccaggattcagggagcttccagcatgatgtggctgcaaagcccgaggaaggcttcagaacagcacagaacctagaggcagaggcgtcccctgaggaagaactcccagaagcagatgacctggatggactcctgagtgagcttcctgaagacttcttctgtgggaccagtagttgagactgccccaacgcaggacaacccaccatgagcaggcagctctgggcatgtgtctggtcacatccaagggggagaagaaggccagcatgattggagagtggacacagccggggggcttctgtggttgctcccaccctgggtgttttccctgagagccccctcatctctgcgctgccctcactttgggccttcctttgccgttggcaccagaatccggccggagactggctctccagccaacaagaaaggcctgtcaccctcgccttgggtgtccctctcctgcctcagcttaattttagaggatattgggcctggttttcttgtcccttcataccctagtccctggacagctgaggagatgaaaggagccacaccacaacaatggcggcctgcccctccacacaggggagaagcacgctcaggcttcctctgctttgtctcttcagacctgtggttgctctgctcatccatgcccaaggttcccaggtgcaggacagaggtgtggcctattgtaccttgttctgaaataaagcatctcctgctt

SEQ ID NO: 2933 - DNA, 27507 bp, Homo sapiens
gttggacaatgctgcagtcatccagggtgggaggatccacttccaaaacgtctcactcacatgactattggcagaaagcctcagttccttgaaaatgtggacttctctgcaggccttctggagtgtcctcctgacagcaactggcctttcccagagagagtgatccaacagagagagcaagtaggatatagctgcgcctttcatgacagcctcagaagccacaaatcaccgtgtctgctatgttttattcatcagaagtgagtcgctgagtccaaccatattcacagggaggcaaagtaagctctacctcttaaaggaaaggagtatccaagaatttgtggatatattttaaaacggccacagtgagttatcaaacttgtttttatctttgccaatatgataggtggaaatggtatctattgtgattttaatgtgcaatttccttattgtgagtttttttacagctttactgaggtataattggtatacaaaaactgcatatatttaatgtgtacaatttgatgagttagaacatatgcaaacatccatgatctcatcaccacaatcaaggtaatagacatccaacaccttacaagataaacaaaattgactaatctttagctagattaagaaaaagagggagacaactcaagttaatgaaatcagaaacaaaagaggagaccttgcgctgtcacagaaattaaaaggagagagtagtatggaaaatgatatcacaacaaattggataacctggaagaagcagataaatttctagatacatacaacctaccaagactgaatcatgaataaatagaaaatctgaacagatcaataatgagtaaggagattgaatcattaatttaaaatttcccaagaaagaaaagctcaggaccagatggcttcattcatgaattctaatttttttttttttagaaaaagaaaaccattcatatttcctttctgtaaactgtctgtccattacctttgttgatttttctgttggggttttgatgtttgtctgaggatatgaattgcaaatattttccctgtttgcctgttaacttcctctgtggtgggattttttttttcatgccaactttctaatgaaattaaattttcaaatgtttctactatttggagcatcttagaaagaactttagggccaggtgcggtggctcacacctgtaatcccagcattttgggaggccgaggtgggcagatcacctgaggtcaggagttcaagcccagcctgaccaacatggcgaaaccccatctctactgaaaatacaatattagccagatgtgatggtgcatgcctgtaatcccagctactggggagacagaggcaggagaatcgcttgatcctgggacgcagaggttgcagtgagccaagattgtgtcattgcactccagcctgggcaacaagagcaaaactccatctcaaaaaaaaaaagaaagaaagaccttcagctctctgagcatatggttaacaatctgctatgtgttcatatatatacacatacgtgtgtgtgtgtgtgtgtgtgtgtgtgtgtgttttggtgggggaacaaggtttgctttgtcacccagactgcagtgcagtggcatgatcatggctcactgcaatcctcccacttcagcctcctgagtagctgagactgaagcaatcctcccacatcagcctcctgagaagctaggactacagttgcataccaccacgctcagctaattttttaatttttgtggagacaggtctcactgtgttgcccagagtggcttcaaactctcgggctcaagtgatcctccttcttggcctcccaaagtcctgggattacaggcatgaactgctgtgcctggtctgttttcttctatatttttgtggtgtatttttttctatattcaaatatttgattcacctaaaatatattttggtataagctgtgaggtaaggaatcaaatcttttttttagttccagaagttgactgcagatccttgaataacattgtttagttaaccatttcttcacaacattgatgagaaaaataaattgctttccagccagagccactctctatgtggagtttgcactttctccccacatctgcatgggctttctccaggtactttagtttctacccacatcccaaagatatgcaccttaggtttattggcgtgtctaaattgtcccagtgtgagcaagagtgagtgcgtgggagtgtgccctgtgatgggatgacatcctacccaaagttggttcacctcttatgccctgagatgccaagatagactctggccaccatgaccctgaactgaaataagccggctggaaaaggaatgaatgaatacaaataattgtaaagtaaaaattcataaagtattcaataatcatgcaaatgcacaacaataaacgatgaggtacaaaagcactcagcaaacctaccacatttatgactgttttggaactgcataggggcaagagaggctcctcacaattatcactttgcaaacatttattccttcatttaacccaccaccactacacctgccattactcactgactcaccacaaattgactagtcatttactgatttttattaatctttctcaaatgtttgtatagctcatacttatttcaatgtttaagattagaactgttggggatatttatttagaagtttggcgatttttttttgtgccagaaatatgccataggaacttagttcttgtttctcctaattagcctatggtaaaattagtttcattatgtgtccagtttccagttacctatagacaagcagtccccaaattttcttggcaccagggaccagtttcatgaaagacaatttttccatgggccagggtggcaggggatggtttaaagatgaaactgttccacctcagattatcaggcattagattctcataaggagtgtgcaacctagatccctcacatgtgcagttcacaatagggttcatgctcctgtgagaatctaatgctgcagctgatctgacaggaggtggagcttaggccataatgctcacctgccactcatctcgggctgtgcggcctggttcctaacaggccacaaactgatagcaggggttggggacccctgctatagacaatgttaagtgaggagttactgtacctagtttcaccaatatcatttgttgaataattgctatgttctcctttgatcagctagtgtcctgttaggaaatgtggaagtactctagatatttccagcagagaataaattaatgcaaacaatttgtgacaaggaattggaagggctaaagaagcaacaggggaaagagatattagtctgtgatcatgacgctgctagtgctcctgggctggaaaccaacagtttattttcactgctgagctgctggctgcagggccattgcttttttggaacatttctgtagacattgagcaggaaccccagaacttacattctaaggatgctgctcaaactaccaccattcttactaatgctggtggagcccaagttacctgctgctgatgttcctcctgcggccagaagaggcaccagaagcagaaaaatggctccttctcacctcttgttcctcaatcccaaccagtgagtggccctcagttgcagaaccttaccataggcagctgacaagaaaatccagaaatgtggcgctctggcttccagccagcatatttgtggcagaggggagcatggaaggttgggaatgggggtaaatgccaacatataatcggctcaccctctgctttgaaaaatcacaaaataaattcctcaatgcttgaggatctattcctaatttttttccactagtttatttatctacttaacattcagtgtcacgttgttttgaatattatgtttttatatctagtagaaacagttccctcattttttttcataacttacctagctttcctggattgtttattttttccatataaattttaggaggccaaagccttatctgttaagaaatcagggccatataagttttagaattagcttgtctagttctaaaagaactgcagttgcattttattggcagtatgttatacatttagtttaccttaaggagaattaatatctttataatgatataattttctatcagtttagtatattatttgttcaagtgtccttttgtgaccctcattaatatttaaagttttcatcctataaatcttgtacatttcttaagtttatccttaagtatttcacgtattttgtatttgcccttgggggcctcttgttcttattgattataatttgcatatatgaaggctattgatttccatatactacctttatttagttaccttgccacattccctgattataacaacatttcaatttattgtctcttggattttttgaggcaaataaatctgctaataattataactttatgtgctatatcccaacttttgaaccatccatttctttctcttctctaattgtgctgaaaaactccactaggccatgataaattacactagtgacgctgtgttctttccttgttcctgattttaataggaatgcttctactcttttcctgataggcatgatactgggttttgcataacacagtaatatctgttaaattctattctattaaaactttttttaaaaatcaagaacagatgttgaattttctcaaaaaattgatggaaatctttctataatatttgaatccattaatgtgaaatatattaataaacatacaaatattgaaacacccttacattcatggaataaattcctttggtcgtgtaatattaatcttttaatatgctatctgtttgcacacattttattgagggttgtggcaatgatcgtcatgactgagaatagtccgtaggtttatgtgtgtgctctttgtcctcatccatttaaagttgatttttgctagcttcactcttagtgaccttgctaccaattttctcagggcttcttacagtggcctcctatatgctgattttaatgaaattgatcttctaaacataaacctgcaatatctttggggtggaagaaaaaaagatacgaaaagaataaacataaacctggacttgatgtttatttcttataattccctcatggttttatttaattgcagcaatccaccaacatctttttgattcctgacttccctttgtagattctatactgtgacttgaagaacagttggcaaatgggtcaaaagccagtagataggctggcccataatttctcccttaccttgtgagaaaatataaaaagaatgagaatcaggtcatgactctccaccccaggaaagaagaacaatcaagaaacacctgctagtggcatgccaggccagacacacccatcggggtctcctgcagtcaagaaggagggggccgtgcaagctgggaggacctcagatggacagaattcaactcatcacatttcttggttcttgacacgctctcctcgttagtccatcacatattgcacggattcattcatatcgctgcatgtaggctgctttgacctgctgtagaatatctcattgtgtggatgcacatgtggatcactgagtatgtcagagctggcaagatacgtcagaagagaaaggagaaactcttaactaaatagagttggaaataaaataattgtctgtatggaataagatcaaaggtcccacatgttaaagtcaaccccagatgaattaaagtcttacatgtcaaaaaaaattgaaacttttagaagaaaattaaggtggatatattttagaccttaaggtagagaaagatttcttaaagaagacacttacaggattgattacaaacaaaaagactggtacatttgaatgtattatgttaagaacttttccaccaaaagaaagcctcgatttcctcatttttaagatgaggataataatccctaccttatagaattctaataagatgaaatgaagcaacatatacaaaatacttagcacagatcctaacacctacaaaataataaatggtaacgattattattcttctcaaacaacaatcctattatttatcaaataatactgagtaatatgacaagacatatttaaaccacacaagccatatgcagacaagtgtttaatatcatagtgatagtttcaagagagagataataatttattctacatttatcagaggtctatagcccagtagtcaataaatacttatctatagtcaataagtactatcaagcatccatgccaggaaccatgctaggggctgattaatttacatcaatcaccatgacttttttcccacaaactaacacacacacaatcttcatagatttttctgtgatcacagcaaggaaaagacctacgcatgtttggatcatctgtgtacagtcctacagaagaactttgacactatcagagacagaaatctcagaatagtccaactctcacttatttgtgctaatgaaagagtaaagtaaaagagacaattaaaatgggaaatgtgttttgttttgttttggtgttttgttttacaagtatgcaaaaacctcaaatcaacctgacccaacaataaggaagcaagtcagaaaaaggcagtcttccagagctgtttgttcagcagctcagtaatgccatgaaggtttgcttcctttctctgctttgtgtttctggagagagtccgcatacatttcaatatggctgacagcagttctggaatgtataaagccttgcataaagaaaatgacagttcactatgaaaatctgattcggatgatgttgaaaatagatttagtgtctgctctgcctctctgttttctaggacttcaccacctcacagactttgtacactcatggttcacaacttcctcactgtgttttctttaacgagtagaagataaataagctttaagaaatagtaaattatatcaaaatagactttatcatataatttgcctaattatgtaccttcagtaagtgtttattgaactctggggtgtcaacaattttttattcagctctcataagtaatatttgcttagaaatctacccataaataggataacaactttcataaaacaagaatttatacctagctaacatgaaaaagctaaacatcccttgaagtacaattctcctgaaaatcatcccaatatggtttattgaggctgatggatttggacaccagctcttaagaaaaaagataaagaggaaagctactgcctgccacaacatattctttttcccaagagctggtaagtttcttccatatgtggaatccaataacgttcggaacattcttttctctttctggtaatgtgatatacccaacgtgggcctatgatacaaggaaggagagtagatcaggagtcaaaaaccacaggtcctagttctggttctatcatttctttgctgtgaaagtctggaccagtgacttcatagctctgagtttctgttgtgtcattcttcaagtcaggtcatcatttgccttccctacttcacaggtagtatacagtaatcttttcaaaagccctttagaggacataacacaaccttatgtttattttctgctagagcatgactcccttgagggcttggagcatgtcttaatcaaatttgtatattccaccattcctaccccagacctattattaggtgctcaataaatgttgattttaaatgacagctgtcatgaaataaatgaaaacagaagccaacagtgacggtttgagctgcctgctggctggcatgtgacacttaacatctaaagagtgatagtggcagctaaagtgcggaaggaatccactttatgaaactatctgagcagtgaagcactggaaatcacagagtctccttttggctattttacatttagatatgaaagcttgtcaggctgggctgagaatagacaatgagaaactaacacatttcaacaggttttgaatagtttcccagtgaagaattttcctggcctctctccaccctggtttttatccctcttcttgggagttatttttcgcaaatgtaccccatgattggcaaatttcagaagaataactggggttggctcagttcagctcctccccgtccttctcctgagtctgcttccaaaggcaatctgcaagggaggaataaagcaactcagggaagggaaaaagagatgtgaagaaggaaagaaattggaagacccaaaacaacatgatggttagtagagctaatgaaaatgaggaagctccaataatatctggttttttttctctgactttgtgaaaaccatttgttattatgatacgacaatgtaatcaatggtactcagtaaagtcagtaccccaaaattcggccaggtgtcatggctttttgtgtatggttgtcctgggaattaaaggagaaggaaggggctgtgcccctgtaggggagatgatgtgcagaaacggacggtatacacaggaggaaagacaatgagaaaagataaagaaagaattcactaaaagcagggacttggagctagagaagcaacaaaagacatccataattcttggagatattaggggaatactaggcttcccaagaaaaagattcaagccattctattgcactgtcagctggaaggtggtcccaaaaggctggggaaattggaggcactcaggaagctgctgtcttggttacaggcattcatgtatggatgaggctggagaaggtaaaagacagaggaagagagtagggaggcaggtacagaaaagagactcattattacctttctctattgcaggcttcagaaggtgaacccagagagcaggctgtttctgtccatgggaaagcaggatggtacagcccatatctgattcagaaaccaacagtcaaaccattctcccctgagactaaagcagagaatgaagccatttcccagaaatttgggtatttaaaaaatcaccctggcctgggttacagggtaattgtcccatatctatgtttcacctgcagattcatgggacagaattatttcccaaatctagctccatgctcctgccctgacttaagtcagggaatacttggtatgtagtagcatttattatttcacgttcaaaatatctcaaagccttgaaaactgtaacgtattaaacggaaatttggtaggcattgcttcgcacaatcccatgatgccagcttgctagcatggatatgcccagggcaccctaccagatgctggacacaaaagctcaacatggtagttcttccctgcaagggttcacagcccagtggaggagatcgtcaggtgagtaaatcatcctactgtacagccacgatgtgcagaggactcagaggagggagtgaaactgccactcccaggcccatgtctcagaccaacccttcccctccagccagttgtgtagactgcacctcttctctccctcctcagtgaatacaggctaaggaacgcaggcttctcttacccaggttccctgaactgctttttttagcccatctcatcttcttctggttttgttcaattttctgccagcttttttatccggctcacttatctccctttatccctcagaaccatctccagtaattccattgactggcaggacatttttccatcagagagtagagctgagctgctgcagtgccacggccacctcccagcaacaacccctccgaccccagcagacccactacctggctctttcggtcagtggggacttttcagatggtatctcttttattttagctttttaatttctggctgccaggctttcttttcttaactacgtttggagcagcattttgcacatcacagaagccatgccagttttaaggtgagttaggattctgcaggggaatcccattattttgattccctcatcaaagcagggctaagtttaaccccttgcaaatatgaaaatgaaaaggacagaggagtgtattgtcatggaaaaggcaccaaattagtcaccagggaactggacacaggtcccggccccacaactgactctgccatgggattttaggcaagacacctcacctttctgactccaaaatagtatgcctgttagtcttcctcatgatgaagttggaagaatcaaatatattgactgctataaacatacctcataaactgtaaagcactgttcagtcaacttaaagacccatgccaaacctagggacactgggcagcatgtccttctgaataagcacataagctccatgagagcaaggattgggtcacctcttgctcgctatttactcccagtgcttagcacctggaaggaaggaagggagggagggacagggggagaaaattatgcacccaaggggtctgaaatgttaggtccttccacatgtttgtgaagcccatcacctgctggtaggagtaaaaatatctcaaacacaataaatatctttcccgaattagcatctatgaattgaatcccatttgtgtgagaagtgaaaaggctgaagtttccacttttcaatcaacggtaaaagtcctgacctaatgcaatgtcgcagagactgttcgtttgcacaagccaatataataatagcaatagcttacatttttatagttctttacagtttatcaagcattttcaagtatctgacctcattctgatcttcaaaatctcatataagtaggtagggtaaattaaccctgttttacagatgacgaaactagggctcggaggagcgcagaaacgtacaccaaatcacgaggcctgtaagtggcagagctgggatttgggcaggttctcttggcaccttggcttcttcagctgctaatgaagacagtaatgatgatgctcccattgttaagctgacagctctggagccacccaaaccaatatgatttcctctttattttgctagaattatggttattctgaatccctggagagtagagtaggtcctctcctcataaaataaggacaaaaaattcttttcaggaaaggaaggctacacagttggtcaataatcacatttttaatgacttcattagtcatcaatcaattgaaacagcaacaatgatgcatcatttcctcctatcaaattagaaacaataaaattaatgttgataaggatgtagtaaaaccagtgtatatgttcaatgctggtggccttgtatactgctacaaacttttagaagctacttggccacatgcctcaagagccatgaaattgttcacactctctgaagcagtaatcttacatctgggaatctatcctaaggaaataatgaactagagaaagaaaaaaaaataccttcctagggcctggttgttgatttctcccttggatagcaatgagatatcatggtatctttttcataaatttcctatttgtttaagctcattccagctggttcctgttacctggcaccagaaccatcattacaaaagcccacatacagagagctaatataaatattaatatcttcccttcccttgcttcaaacttgacctcaattgacatttccagcttcacagcctggtatcccatccctccatacccccatcaatctcaaagctccggtcaagtcaaatgtctcacagttgaccagacgggccatgaatcagcatgttctgagctttagttaggatcagaatcacctggaaggctggttaaaacacacacccttgtgcacacacacacacacacacaaaacacacacacacacatacacacacaccacacctttcactggctttgagaaccactggtttaagcaacagtctacctctggcaaaatcatctagtccttcaagtcccagctcctccctgctttttgcagccatctccaatcacaccagactgaactaattacttgtcccctgtgtttctttggggcaagaaaagcacctattacactgtataatgagggttaattgtataatggatgccagctccctgcttatcaggagtatctggagggcaggcccctggcttcattgcctctgtgcccccagagctagcacaatgcttggcacagagtagccatatgtgcatgtacgactgaattattccttgctccctccctctataggaagttatggtttattcctgtttccacaggatccattagcatattgaatagctatttttaaaaaacaatgattagccatgatagcaaaagaagaaacatgaacagagcttattcgtttgccaggctagtaaatatcatcttgctttgctttctaaactccttaatgaaaacagtggctctcaggcaaataaataaaacattaggtagacaacacacagcacatcacaagcacagtccactaatttgcctattgctgaaggacattagccacctttgagataatctccataaacatactgccccatctccctctctcaaacatgaattgtatcaagctaaatttttaatgtttttcaatgtcttatatatatttcatttcaacaacattttttaatagtaagatatccatcttaatcaaatgaaagctgtttttctgtaattgtcctaaaagccaattcattttctggaaaaacatcttcttgaatcacaagtggccgggctaaacagtgttctcagaatattaatgtgaaacttaagctattaacatgtcatggttaacctttctaaaagctaattaaattaaaataataatatgtggaatgcttttacagaaaggtaaggctcttttacaaagcacctgttccaagtctcagagctaacaccttatgaagccatggtgggaaaaaggttttgcaggcagacaaagaaagcctggctttgcacctgctgtgattaacttttagttgttggtattagagttaattattgcagcatgctggagggcagtgacaatttacttgcctgatcatacctaataagatgtatttgcggatgccagcatctcctggacttaatcaacaaactatcaagacaatcaatgctgttaggccccatgtccttgtgatagttttttccaaataaaaaagataaaaatccaaggatgcagtgctaaggatataggcaggctgcttagaaagcctccgttagctagcgtcaggcttatctccctccctgagtggctagatctattatgcaggagggttagtgcaccctaaggcccgattcaattgggagcaaagttcaaggcaaccacaccaggtacaaggaaattaagctctgagaactccagcacttcttggtaactgagctctggaaggcttcaaatgggccctttctactttatcttctatgggaaaaggttgttatacccaaggcgctataccctcttcctgctacacaaggagggagtttctgttcctttatttgataatctatgcttgaatccatggaatacatttttaaaggaaagaaactagctatgacataagacaggttggcaaattccataaaacaacatgctttagtttcaactctgttcctttttaggccccaacaaattagcaaaactcctatgagaggactggggtcatgtgtgggcacacaaaataaggagggtgctaccacctagagggatctcatacaggtaatggagaggtgcaggtgacagcaatcagcagcctgggggcactgaaaatagaactaagactgtctttgactcataagtcatccatcctgaataatgaaagaagaccaacattcagcatgatcacctagatctctaacgtcttttattcatccattcattcactcaacacatgtatttgttgaattcctccttcatgccagggactgtgctgaacatgttcctgatttcactaaatgtgagctgtgcaatcttgagctctagcagtttgcacaaggtctagctggaaaaaactgctttatgacaatgttggggatctttgttgactcccagccttccaaaaatatcaataccccagatatgacaagtatcatttccattcacattccattggtgagaaccagtcatgtggtcacaccaactgccagggagactggaaaatgtagtcttcattctatgttcagctaaaattcaggggttctgttaccatgtgaaagaagggaaaaaccaatattaaatgtctctgcttttgtaatatattttgtaatataagacactacaaaagatgtagtgtcttaatcacactgatgagtcaagaattctgggcatctccatagaccagagagatggaggaatggccaggagccaagagccatgtaggtagatttctcaaatgggatccaagcccacttcagggccagggcttcagagttagagacaggtctctggcccttaaagaactgacaggtgatccatgttggcatcaccattcataaaaacttcacaaaagacagttctctgtcctgttttgaaataagtggaccttttaaagtatcagggaagaaaaacttttcttctatcctcttaggttcagtgatttgggggtctatgaataaaaccaacaaaagacagactggcaaaagaaaagacaatgtttattcatgtatgtacttgggagctcacaaagaaagtggctcaaagaagctgttagaacttggagcttatataccattttaacaaggagaaggggttagggtttcaagggacaacaaatggtgggaaatgactgagaaatatataaagaaaccaacggaaggcaagtgaagtggtaaattttatgcgtcaacttgactgggtcaaacggtacccagataattggttgcatgttatttctgggtgtgtctgtgagggtgtttccagatgagattagcatttgaatcagtggactcagtaaagcagactgcccttcccaacaggagtgggcaccatgcaatccggtgaaggtctggatcaaacaaaaaggcagaggaaaggagaatttactctctctacctggctacttgaactgaatattcatctcctgcccgcagactaggacttacaccatcagctcctctagttctcaggccttcaaatttaggctagagccatcagttctcctggtgttcaggcctttgggctgtatggcagagggacctgacagccacaattgaagcatggcctaagagtgaccctatggtctaagaagaatatgtgttcagagtctcaagctaaggaattcaggagtggccaatgtaaagactcactccttatgtataaaggacatctgaacccctggcctatcccttggaatacaagctgtataaggaattgaggccctttgttttgggttaaatggaggttgctaggtgaaggttgctggttggagggtgctaagtgaaaatgctatataaactgcatgctttttacaaatggtagtggttctcctgtcccgcctaccaccactggaccatccctgtatgtaaatcatgccaataaaccctatgtcttgttctctgtctctaggtctcttccttggcctctcagacatgttgccatttctatcagagccaataagagtctggcatgccgtggcctctgactagaactatactaccagctatcccaggctgtagcttgcagacagcagatcatgggacttctcagcctccacaatcacatcaatcaattccttatagtacaataaggcttattttaataaggtgtgtttatgcatccagtgtcaacttctcatctctggtgacaggagtcaccccttctgcctggtacttccttaaagcaggattcatgatagcagaattcttttggaaggttctgcttttaggcagatgagggagtgcagagaaaggctcttcctgaatctgttgattctcaaatgcctttcactcaaaataatatttatgtcatgtggcatattctgatcccttccttggtcacacccaaattttatggactcaaatactttgaaagaaaaaagaaaggacggaaaaaaggaaagaagaaaggaaaaacagaaggaagaaaggaaggcactggctatgataaaacatttttcaggtgatgtatgaattttagaaaaaaatacatttacatacccaaaactagggcattatttttaaccaaacaatgtaatgtatggaaaagacaagttaaattccacattcaattggtaggatttcatattcagtgtgagccattctctccctgtgctgtgcttgctccaaacatatttccacagacttggataatttaccttgatttttgcttagtattgtaaaacgtccccaaaatttgagaaagcataggaaaaaaacttgtagaagcaagtaaaaccagagaggaaagccatgacacaggaagagaagatattactgcccacaaagcagctgtttgtcaacaatcacattagtggtctgggatcatgaaggaatgttttaagcattttacaccctaatataagttttttagttacatataggcatttttctatgttttcagaaattggctaaggatttggggttgatgcataccattttgtaatttttcccatttcaaataataggaaacagctctggttagcatttttgtgcacaacatctgattttaggaggggatgactaatattaagtgggaggtgtctgtattttaggaactggataggaaattgtattctctttacttgctcaacatccatttaacaagcatttaccgagtactacagtgagccaggcattgtgctgagtgctgagcagacagcagtggaaagtcttcatccttggctaaaaggatctagtctagtaaatgagacagagtgagagttgtgaaagggggcatggcaggcactaatccagctacaggagcccaggagagactgaaactaactttgcaaaatcatggcagtaagagaaatctaacatagttgactccatcctgcttctaacctccaagctctccttggtcattcctgagcatagaccaaccaacttcaggagcaatttagtttatagtttaatcttaaagcaagaatgataatagcccttcccaaaactaaactgcctttgcaaaactaatgaaagtccttcattctgctaagatgtaagcatagttaaatgacaactagctattgttctggaggttacaacatttgtaacgtttcccattactcctgtagataacataactattgtagaacctacgattggctttttgagatgtctttttagagttctgcatttctgactactggctgactccacctggaccagcaacttgtgattcaaccggtcctgtgaccccctccacccagagggggctcagtgcataaggaccattttccacactcctatgatttcatccccaaccaatcaacattccccattccctagccccttgcccaccaaactatccttgaaaactatccttgaaaacctctagcctcagagccttcagggagactgatttaagtaataactctatctcccacctggttggcctcacgtcaattaaactctttctttactgctataccattgtttcgaggaactggttttgtctgtcagcaagccagaagaactcacagggcaattacaagatgaataagagttaccggggtgaaagtaggggaccaagtacactaggcagagggagcagcctgtgcaaaagcccagagacagagagcaaggcagctgaatctggcatcaccaagccccagtggatgagcagtgcagatcctcccacttacaacatccccactgggccccaagaaagaggctgaaatttccagttcctctccatatcctctacccacacactcctgacactcatcgtcttcataggctacttcaggcacaaaactgtgaatgagctctaaaatgtggtttcctcatctataaaatgggataataaagttttatcttatagagttattgtaggtattgaataggttgatatacataaagcgcttttcaccaatgtctagcacattttcagtgttatatattagctattcattgttagctagaggccctgaaaatgtgtcgcagtgaagccagaggtccctgaggtcaggctggggatatcaagtcccaggttttctgcccacccacctcctcttccaaataaggcaaatgcacttttttttttttttttggcccaccattgtgcagtaaaactgcatcctacatagatttaacttaagcaaattcaagaatgcccagctggctggatgagactgggagaaaaataacttcaatactgccagtcctactccattctctgagagcaaatgccccaggtgaacctggaggagagggagaacaggcactcccctccagccacagttttccccacctttccccggtctaagcagcttgacgtatactttgttaaaggattttcaagcctaattgtgactacctgcaattttcaccccacaagccgactttaaaacctaactcttgctaaaaagaagacactccagcacctctgtccgcttagcatcaagtaaattccaatcaaattagaaatcttgaaggctttctgagagctggtctttactttaaacagtttaaatcacccctaagcttagcctgaggagtaggattaaagcctccctgatgtggaaaaaaacaaaagaaggaactgtgatttactgcctaagccaccacccttagcttcccccaccacactctccaggtaaaatctgcttccgttctgcctactaccgtaggctaaaaagagatcaccggtcctgagactctagtcacatggatgcgcagcaggacaggcacagagctccgcagcttgaaacatagatgcttgtagctcacaagcccacaagtccaccagcccgccacatctcttgaagctcaggcaggtacgttcgccccgctggctttaatttcaaaatccagcacaatcactgaaaaactagagcgatttgctctttcagctatgcacaattttcatcagcagtctccagtggctacaatctcaggcaggcttttaccaccttttctcgtcctctctataccaacacatattctggagaaatggtttttctaatggcctgtggaggtctgcctgtgttttgaggctttgtctgggcaccaagtccagcagatacaattctctttcctgagtcaagcatttataaagagctgtgatctcagatttcagcttgcttctgtcttccttcttactcctgaaatctgatcatcccttttgtctttctaccacaattatatattgaaagaaaaacatgaagatgcaagagtatgcagggacatgtgtaagtgattctctgcaagtgttaaacacagggtgtaattacagctggaaggcagtgccttgtgggagaaaagacaaaaaaagaggtggggggggatattctttataaaatgttcttgtctttatttttaagcttgatgctcacatctcactttctaacacacacggacaaagaatatactcatgtacaagcaaaaatactcatatatgcacatgtgcacaaacacacacagacaatgtagtattttagagacccttggtcttttattcttttcagcaaatgaacaattagcctcaatagtcaaataaacatcagaagatgagggtttttcccccttcctctgctgttacaaaatatagcaacaaagtggggcaaagtagcatgaaacctgaagcagctcacacagaaggactcaagagaataggatcttccaaatggaagtttcagttagcttcagtgttctcagaattgcatctcctaaattttgattccaaaagggaaattccctatggcccagcaggcccatacaatcaattttccacattatttgtgtaaatatctgtcctgttgcatattctggaagaagtgacagtttcaaaatgagacttgccaacacacccccttgtcccaaacaataagaatcagcagaacatccctatcagccctctcaatttattcttcatcagaagccagtggaaaaggaattcagcaaagtgagatccccaactgcacaaagcactaacctaatcacacccaaaggaaaatgagagaagagtttgacctagagagtcttaaattagtgggcacactcagagactcaggggaattttagctaggcaagccaccaataatttagagagaggtggctctaatgaagggtccaggctgcagggcatggtagacaatctttcaaggcaaaggctctgggccacgtgacctgtccatggcacagtgggtgtgtcaagcacagtgaagtgtacagaaggtgtctgacttatgctgctttgatgtacaatttttcagctttacaatggtggaaaagcagtatgtgttcagtagaaactgtactttgagtacctataaaaccattctgcttttcactttcaggagatattcaataaactacatgagatattcaacactttattataaaattagctttgtgttagatgattttgcccaactgtaggctaatgtaagtgttcccagcatgtataaagtaggcaaggctaagttatgatatttggtaggttaggtgtattgattgcacttcgacttacaatattttcaactcatgatgggtttatcagatgtaaccccttcataagctgatatggtttggctgtgtacacccaaatctcatcttgaattcccacgtgttgtgggagggacccagtgggagatggttgaatcatgggagcagtttcccccatactgttctcatggtagtgaatgagtctcacgagagctgatggtttgataaggggaaatctgttttgtttggctctcattctctctctttgcctgctgccatccatgtaagatgtgacttgttcctccttgccttctgccatgattgtgaggcttcctcagccatatggaactgtaagtccaattaaatgtctttcttttgtaaattgcccagttttgggtatgtctttatcagcagcgtgaaaaaggactaacacatataagccaagaaacacctgtacatgtgtttcttgctttagaaagcaggaaggcaattaggctttattttacatgaatctacaatgttggtgaaacctgctcttccaacatcctgcgggctcctggaatggactctgattaggcataaaatgaggcatagccacacacaatgactttatctggaatactgctcacctccatgtccctcctaccctgcaagaatgggaagtagactcattagcatcatttaaaaatggtctcctggctgggtgcagtgtctcatgcctgtaaccccagcactttgggaggccgaggcaggtggatcacgagatcaggagatcgagaccatcctggctaacacagtgaaaccctgtctctactaaaaatacaagaaattagccaggcatggtggcgggcacctgtggtcccagctactcaggaggctgaggcaggagaatggcgtgaacccgggaggcggagattgcagtgagccgagattgcgccactgcattccagcctgggcgacagaacgagactccgtctcaaaagtaaaaataaaaataaaaatggtctccttgcttatgtgttcacttgctctttcctctctttcctggagagatgatagcaattgcacttaccttctgtttgggaggggcttttggaaagctgagggggtcagggtgaagcctgggggaaagggagcaaagaactagctgatggggacctgctgtggctgagtctttgggaaaagagggtagagcaaattgcttaagtttctgcatgatcagcccagctccccagggcaggagaggagataggtttagtcagagaacccacccaggacaatgcggttggctggaattaggtcagtgcctatgagaggcaggaagatgtgcaaatcgagcccaagcaagggaaccctcaacatcaatggaggtccataatccaggaaacccctaatatgcagcagttatctttattttaggatgctcagaaatagacaggatggtaccacagccaggtgaacagagtgctacctgggagtcaagatccctaaatctctctttcaagtttcacgtctgactggttctcttatcataagaaaaagtattgagagcctgctacatgtgaggccctgcagatgacacagaaattaacaagacacaattgcatcctcaaagaaaaggtacggaatagaaagagtatgggtttttgaagccatcctgatcatggttctgtcatttacaaattatgtggccttagccaaattactttgtgtctctgaccatatgttttcttatttgtaaaatgggggtaaaaataccactaagcatttctgaaaggattagagataatattattcaccatggagaacctcagacttactagctgctaatagcagagcaaggaggtaatgccgaacaaacagtgagtttgcaaccagagcaaagcaggcttaatgctaataggtcaaggaaagagtaaaaagggaatgcatcagagaggagctgactgaaaatactttcccaaaacgttacaactggtctacctttaaagtggaaatatgcacaggcaatgactcctacccagggccatgtaacccgacttgttgcactaagccttgcacttagaagagtttgtgattagtttaatgatctgccatcaccatcttgaaagtctgtaatttttccacaagggattcagcatttgcattttaactgggccctgaaaattatggagccagccctgctcccacttattgagactgatggggctttgttggtgagctacctcccctgaggcagcccacctccttctccgaggttcctgagctggtcagacccagatgccttgctaatatctctgtttgtggacacactcagcatgctaggctctccttctcaacctccagactttctaatgcacatgatctgcccagcttctctgcagggaactgagtagtaaaactacaccagctcatcactctcaatacacacaggaatgtttccctccatgaaaatcatttccagcattcaagaagtctacctggcaaaaaccattcctgccatcagcccaatacacctttcctttaacagcccaatatacctttcattcaacgaacatttattgagcacctactatatacacaggaaaaccccacctggaactgacaggtgcttgactaaagcaaacaaagctaaaggaacaaagtcccccaggacctagaggagataaatctttgggcgatttgacctgggaaacttttgcctggaagatagagcaaattctgggagcagggatgggagtgtggaggtagggctatgttacctctggctccagcagctggtgcgaggcagctgaatgagatgctgcaaaccctggcatatttccctgcctgctattaataagttcctagctgactgtgagtttcattactactgactgttctgcatccatgggcaccatcctcagggatgtcagcaccatcccagtggtatgcagtgggggtagactatctgccgcctttggcctggactcagtttcactaaaggaaagagtttgaggtggtccaagaaccctaggtgtttgcaggcacaaaagcagcaaggcctgcagagaagccagacagtgggtagaggacacagcaacaaaatatcaattcctgctgactaacctctcttctattcctcagcttccctgctccatgagaagctagacctgaagtagaaaacgtcccagaagttgatctatagggtgtgccaagaaaagattccccattcttcagaatcagtgaactgtaagccataagctgtgagattaaaaatagctacatccatctcaggagaaagggagaacagaagcagtgagggaagggcccaacccttcccaataagcttcaagccagggattctcggcgtttttaaaaatccatgcccctttgtcataaatatgaacacattctactctcttttagagttgtatacattttcaggaaattaagtatatcaacttcaattaaacaaaaggcataatggtgatccaagtatacactttttgaactaagcttgctatttcttcctacctccccagttttcctatcctactgcctgagattcttacatctcctttaataaatcctgtaatgaggatattcccttttgcccccttgtatcagttgattctcactctgctataaagaagtacctgagactgggtaatttataaagaaaacaggtttaattgactcagagttctgcatgacaggagaggcctcaggaaacttataatcatagtggaaggcgtctcttcacaagaagacaggagagagaataagtgcccagtgaagagcgaagccccttataaaaccatcagatctcatgagaactaactcactatgataagaacagcagcacaggggtaactgaccccatgattcaatcacctcccactgggtccctcccatgacacatggggattataggaactacaattcaacatgacatttgggtggggacacagccaaaccataccattccaccccaagcccctcccaaatctcatgtcctcacatttcaaaacataattatgcccttccagcattcccccaaaatcttcactcattctaacattaaactgaaagtccaagtccaaagtctcatctgaaacaaggcaagtcccttccacctaagagcctgtaaaatcaaaagcaagttagttacttcctagatacaatggaggtacaggcattggataaatacacccattccaaatgggagtaattagccaaaatgaaggggctacagtccccatgcaagtccaaaatccaaagaggcagtaattaaagctctgaaataatctcctttgactccatctctcacatccagatcatgtggatgctctcatatggtgggctcccacgtggtgggctcccatggccttgagcagctccatccccctggctttgcagggtacatgcccctcctggctgctttcacaggctggcattgagtgtctgcagcttttccaggagcatggtgctagtagttggtggatctaccatactggggtctggaggacggtggccctcttctcacagctccactagccagtggcccagtggtgactctgtgtggggactcgaccccacatttcccttccacactgccatagccgaggttctccacgagggctcttcccctccagcaaactgctgcctggatatccaagaatttccatacatcctctgaaatctaggtggaggttcccaaaactcagttgttgacttctgtgtacccacaggctcaacaccatgtggaagctgccacggcttggggcttgaaccatctgaagccatggcccaagctgtaccttggcctgttttagccatagctgaagcagctgggacacagagcaccaagtccctaggctgcacacagcagtgggtgcctgggcctggaaaccatttttagctcctaggcctctgggcctgtgatgggaggggctgcagtgaaggtctctgacatttcttggagatattttccacattgtcttgatgattaatattcacctccttgttacttatgcaaatttctgcagcaggcttgaatttctccccagaaaatgggtttttcttttctattgcatcattaggcagcaaattttcccaaatctcatgctctgtcacctcttgaatgctttgctgcttagaaatgtcttccaacagctaccctatgtcatctctctcaagttcaaagtttcacaaatctctagggcaggggccaaatgctaccaggcttgttgctaaggcatagcaagagtcgcctttgctctagttcccaacaagttcctcatctccatctgagaccacctcagcctggacttcattgtctatcactatcagcattttagtcaaagccattcaacaagtctctaggcagttccaaagtttcccacatcttcctgtcttcttctgagccctccaagctggtccaacctctgcctgttacccagttccaaagtcatttccacattttcgggtgtccttatagcaacacattacttcctcggtacaaatttactgtattagtccattctcacgctgctataaagaaatacctgagactgggtaatttataaagaaaacaggtttaattgactcacagttccacatggctggagaggcctcaggaaacttataatcatggtggaaggcacttcttcacaggagagcaggagagagaatgagtgcccagtgaagggggcagccccttataaaaccatcgatcttgtgagaacccactcactatcacaagaacagcagcatgggggcaactgcccccatgattcaattacctcccactgggtccctcccatgacatgtggggattatgggaactacaattcaggatgagatttcagtgaggacacagccaaaccatatcacccttcattgaaatgtttcactataaactactttagattgtgaccttcttgaggctctgccttaatcttcctggatcttcttaagtcttctttgagtctctgactacttacagaggggtggggctcaggaagagaagagagattcctcagcaggaaactgcaactcacaggtcctatttccctgcctagttcattgcctacgaaaaagtcattgctcagtgcatgctgataaatgattgatgtgaggatggatggatggatggatggatggatggatggatggatggagatcaggaatgccagatcattatctactcttctttaggaccaaaattaattctatgctgtggccttgggccttagcggggccatgatctttgagaaaatgagaggtgcagactattctaaggagtagacagatccctgaagaggacaggcaagtcttttccaacctagttcccctatacttcttggggaaagaagctttccaggtcagactgttcccacctgggcaaagttccccaacctttgggcagccacaaatggtcactaggcacagagcaggccagactgtgccaaaaaaatcattcaagaaggctcagaaaactcctaactgccacatgcaggaaagcccagtgctatgttcctcttggcttacagagagaagaaagaggccaggccatagcacatgttgacaaatcagaagacatccaaaggagctcagagaaatctagaagtatgttctatgatcaacaaggggatgaactgaagagatttagcctgaaaaagaaaacaatgggggaagagtaaggtgggggctgaatagctctctttggaatgacagtatgttgaaagtcaatataattgtttagctctagagaggagaactatggccaagaggaggcatatttaatttcatgcaaggaagcagcctctaacaattaacgtcagcccacagtgggttgttgaagcctatcactgttaagagattcgttagtttcctgtcaatgcacgaactgaaacagaagctacaggattatctgtttgagctgttgtgtgagggattcctgcagtgggaggaaggtggggctaggtgattcaaggtattttccatgattcatttgtttagatgaggcacccatgccatcctcacctcacctcacccacacctactgagactctgaaatcaagctttaattcaagggtttgactaccaactcaattcccc

SEQ ID NO: 2934 - DNA, 24046 bp, Homo sapiens
aaggtgtcataacaaactttttatcttactggatattagttaagattattttcccttaatatatcttttatccttggacaagtaaagaaagaatctatttgtttaaaagtaaatatttatatgaattccattgaatttaatatttttacatgtacttaaattaagtttgtagggttttttctgtttttgtttgagtcatgcaaataaaattgtggcatgggacattcgtattttaatcaatatgcaacagtgtacagtacaaattggagctgtgctaataataacaaaagctaacaattttttcataatttatgagtaccaggcaccattcaatgtggtttacacatatttcccatctcatataatgttcatagaaactctatccctatttcaattttagaataagaaattttgaggcagagaatgtaattaattgccccaagatcacttagattggaagcacttaaaccaaggctaggagcaagttaatctgactctagattttatacttaaaaacacgaagttaaataaatgctcacatattgctcctattattttccctgcccagcatttctctgtagtcttagaaacagaatatttggcccaggatcctgcccatatgttaaacatatggttctagagggtactgtcaacccgtcatctttctggaagccacacttaactagttgtgatgagcaactgtgactcacacggggccattgtagtggtaatctttgttaagtaccaagggaagggataatttctctggtgttgaaattgtgaacagtgccactacaaagatatcagtagtcatgctgcccattatgtggaagaaaacgagcctaagaccgtgaagccaacacagggaggtagaacccagggccccattttgtaaaccctggcagctgttaatctgttctccagaaatataatcttgtcatttcagaaatggtacataaattaaatcataagaatatccttatgaaattggcttttttcattcagcataattcctttgaaatacactgtccctgcagtgctgggtgacatgccattctgaatgttttaatgttcagaatgctcctgtggttgcctcttgtgtgagttcaaaagcaagcgatgtaaaaaagttaacacagatatttctaaaatctcagaggagttaaactctaattcttactgttaataatgaaaaattacacaaaaattcatcatgaatattctattatagcattttttcaatattgagagtatgtcagggctaagactcacagaaaattattagttttgttttatcaattttatatgcaatctactcaattttacagataacttatggctactctatatgcttgcaccttttttaaaaatgggagaagtcatcatcagagtacagatgtcacctcttctattactaatcaacatatttcatgtgtatttttccttatgtttcagcaattgactattcagacaggaatgtgatacatagaatctcttcttgaatgtaatagagtcatttccaacatactatgtcttatagttagctcaaaatttcgtacccaaacctagtttttataatttcacccactccaactgcttgaaattggatgcctccatgttctcagacaaaaaattttggtgtcctcactgactgcatttttttcacactccttatctctacgatttttttaaaccctgttgcagccctctcaaataaatacccagaatctgacaatatctcatgacctccacagttatgctaagtgactccagcttcccaactaacgtagttgaacctttgatccttcaatccactcccccatctattctcagcccaacagtagaagaagcgtttatatgtcagattaagtcacgcctctgatggaaagactctgatggctccctgcatccttgagcatcctggaaggaaacaggtggcatcctcagcttaggtcatttgaagagtgactgataaagggacttcttccaatgttgcaggcagggtgcagtccgggcaaaccacagtgcaggacctggtggctagtaactgtaggtctgttaccccctctaaactaacagtacaaggggagcaggtagaaggttcaaatcaaacaataaacatgaaactataaagaggccatgatcaataaaacgcaaactatggaacaatgacattgttagcttataaataagtaccctttcaaaataaaggtaatcccaagtaacaaagcatatgttccttttttctctaaatataaagatagataaacagagagatgtgtggataaatagataatatgtgaatctgttggtatcttctctagtcccatgcttcgagttttattgtttacaagatgtaaccaatcttatttcaccaacctcaacctttttatctacctctacactaaggacccatttatattctctttggaagagacaataacacacttataaaataggtgactagcatatctccattgagcaaatgtacgaaattacatagatatttctttttgattatggtgacatttttattaactcaatatttatatcatgtaaaacatttacttaatacttattaaatttttaataaagtaaatcaaaatttagagagtgcagaaaaaaaaagatacacgttttccagattttcctcccagtgttccactggcattattttataaatgaatgacagctgtaatattcaatgcttcatgcttcagttaaaacatctggtgaacagagaagatacgcatttctacttgccagataacctaatatatcatgaaacatgcctaatacacaactgaaaaatatcagcatactagtaataaatagattttgggaagcttgagcaattagcagaaactgtaataattttatatatttatgtagctttttaaggaggaaggcacacagagcacttgtgagagttgtcgtcataacacagcgtgatactgctcgagttgaactggtgctatcacctacttaaggaattggcctagaaacaatctgttactttcatgaaagtaggttaatattcaagctgatatattttgatatatttttccttcattcctcaggcttcaattctagccctgtaaattttaaaaataattggcatacataactcattgacataattacatagaaatatcaagctggctcttcactgtgcccatagtgtgctggtgttgactatgggtttgcaaatccataacactgtctgtcctactaaaatgtgcaaactattttgaaatataattaaatgtaatttaattttttacctcttatgaagtcccaggctctgatttgtgttgtgactatttaatatatggtaccatgcatggataaaatgactattacatttgccaactgaaacaacattaatcttgcctcttttttcatttaaatgatataactttttgttctaaaacaaaatattataaaatttctggttgtttttgtgtaaatgaaaacccagtttctacttttgttgtttttttgttttttgcaacggagtctctgtctcccaggctggagtgcagtgacaggatctcagctcactgcaacctccgtctcccagattcaagcaattctcctacctcagcctcctgagtagctgggattacaggcatgtgcaaccacactcagccaatttttatatttttagtagagatggggtttcaccatgttggccaagctggtcttgaactcctgacttcaaatgatctacccgcctcggccttccaaagtgctgggattacaggcatgagccaccttgcccagccatctttttttgtcctatctataataattccctcaatgctggagtgccctatttgagttatctgatttagtatttgtctgaaactctgctgcccagaatctcacaaggaaaaatttacataccagaattgtttttggcgtctcgacttctattcttcttcctctttgtcactaggtcttcatcaaatatacagtttaattttaaaaacaacttaatttttcattatgttaaatctgtataattttcccaggaatttctggcttgacttatagtctataaattttaggctataggttctagactgaaaatgttgatatggtatcactttatctgtcctcagatttctaagccatatgtcagtttatttggaatattctacatagcaaataagatatgggatattttctctttaaaattatctaaatctgataataaacacatatttttttcttaacttttatgtttgagggtgcatgttcaggtttgttacataggtaaacttgtgtcatgggggtttgttgtacagattatttcatcacccaggtattaagcctagcatccattagttatttttcctttccctccttctacctcctctcttacccctcagcctcctaaaggccccagtgtgtggtgttcccctccctgtgtccatgtgttctcatcatttagctccaatttataagtgagaacatgtggtatttggttttctgctcctgcattagtttgctgaggatgatgacctctggctccatccctatccctgcaaagatgcgatcttgtttctttctatggccacatagtgtcccatgatgtatatgtaccacattttctttatccagtctatcattgatgggcatttaggttgattccatgtctttgctgttgtgaatagcactgcatgtgtctttataatagaatgatttacagtcttttgggtatcttcccagaaatgggatactgggtcaaatcatattgcttcttttaggtctttgaggaattgccacactgtcttccacaatggctgaactaatttacactccaaccacagtgtgtaagtgttccttgctctccacaaccttgctagcatctgttattttttgacttattaagagtcttatgttcatctcatagtttatctgctattaaatgattccgcatattaagtaaagatatttgatgtacacttgtgtgtactgatgtagaaaatgattaataaatatttatcaaaaagttttcaaaatgccttaaaaactgtaagtgttttaatcctattttgatttattacaaccaacagttcttgacaacatatgaagctgaagcactgggttagaaatgtgttaaataagaaatcacccattaagggctgaaggacagttagaaaatattctaaacatgataaatatcattaagggaaacacccaatacaatggtatgactttaaaagatggagaaatcacttctggatgtggctgtaatttcagtggatcgggaaagaattccccatagagatggattttgatctgttgcttaacatgttggtgagcttttgaaaagaaagttgcaggactaagagggattgtctgtctcctggaggaaaaacagaggggtgcatgagttgcaaaacactgagaagagcaagcaaccttaaaagcaactaattcatgcagggcgaatttaaagtaactctaagaatgcacggtaaagaatgcactcatatttgattccaatgcatagtaaagaatgcacccatatatggttccaaaatactaatatcaagggaaaaatcaaaactccttgtggattatcaaaatttcccacataaaattaaatgcttttttttttttttttttttttgagacagagtcttgctgtctcctagactggagttcagtgacgcaatctcggctcactgcaagctccgcctcctgggttcatgccattctcttgcctcagcctcctgagtagctgggactacagacgtgagccaccatgcccagccaattaaatgcatttttaagcactatcagagattgtttgatatttcttggcattaaactcaaccagtgctcaatcattaattttaaattacagttttaaataaatgacagtgaatgtataaaaaagcctgcattataaaatatcactttggttttatacaaagaaagtgttttcactttgggaggctgaggcgggcggatcacgaggtcaggaaatcgagtccatcctggctaacatggtgaaaccccgtctctactaaaaatacaaaaaattagccgggcgtgctggtgggcgtctgtagtcccagctactcaggaggctgaggcaggagaatggcgtgaacccgggaggcggaggttgcagtgagctgagatcgcgccacagcaactccagcctgggcgacagagcgagactctgtctcaaaaaaaaaaaaaaaaaagaaaatgttctgtatgactttagagcactttacttattttctttcaccaaaataggaatattttgcaataattttaatatttctcctaaaatataagtttatttggaacttataactactgaaaaaattaaatatgtattttaaataatatgagctagttagacatattattaaggataggtacagaattctgaaggtagagctatgctcatcatatttttttgttgttgttagcagaaggaaaagattaaaagtaggaactatactgaaatgcaatatagagactgaatttgggtaggcaaagaaatagtgtacccttaaaacacaaaatgttaagtagccaactatattattttaaattgggtaggaaattttaagaggaaataattttttaaaggcaaaagcaagttgtcctgtatcaaaaacacaaactcttaaacaaatatatattcaattaaaaagtatacaaataggcacataaatgcctacaatacactattagaaatgatgagtttgattatttagaggtggcaattgtagaggcatagaagtcagaaggatggaaaagaaggaaagcaatgtattattctgtaggcactcccacattgcaaggagagcagtgagatttccccaatccaacacctccttgctcccgagcaagctctcaaaaaggaagctcctgccctctattgcccacaaaccacttcaaatgcaagaaaaacaagcagtctcttttatcagatgattgtatattgaatcaaaataaagcaaagaaaaaaggaccacaacttcagctcccagtgatcagaagcacagtacccagaaggccgggataaattgtcagctatttgggtatctggtagtcaaatttacataatcccatgtaattctaagattaatactcttaagtaggcaatgtgagacatatttctaaatatagaaaagccaaaaatcaaacccagatctgtttgattaaaaaattgattatgtccgtctctttatgttacatttctgttcagcaaacaaaaaaaatgtcaaagtgatttttttcttactttttatttagatatgttgatattgggaagccatcaccaccaataacttttaagtgtctgtgtgtgtgtgtgtgtgtgtgtgtgtgtgtgtgtatacacctcattttccttctctagacttgggctctggtataaaatatcacaaatatttagaaactttgaaatcaggacagatgccaagttttgtttttgtttttgtttcagttgttcctgaaactgttattctctgatttttaaaaatattgttgagcttgaattgtagacagcttagaagtatttgaataatattttttaagtgtgccaagtgcttttgagcagaaaatgatggcatcttttctctaaatcaattgtggagagactagagaaatttagccaaagatgattcagttgtgtagaaggagactcacaaaggctgttaggcactgaagtgggagaaatccttgactggagaaatttaaaagtaaaagatactatttggccttttatgaacgatttttaaggtatggtcttaagaaaaacggcttacaaaaatgaacttcttaaatatcctcttgtgtctgaagttatttctttttttacacaatatctactatattatctagaagaggaaaaggcactcacatatgtggagtgggtacttttagacagaagctttacattatcacctcattagaatgttcaagtccacatgatgtttgtttaaacatatttttttttcagataaagaagtgaaaaagtaataactaaaccatttttcaaacacatgagatggtatttgatcactggtatatcttttttttctgaaataattttctttccataaatccatttttgttgtggctaatttgcttgtattaatttaatggctaagatgattagaaaaggatgaacattaaattcgattgagcccataatggaattttcaggtgcttttaaaaacaattagagcttactctttctcaataacctattctgcttatacttaactgttataagatcacgatttcgttctgctattttaaaacatcgctaaaatataatgtctaatatgattaaaaacagaagaagataagatagcctcataaggtaagaattggtgtgtttataggccttaatttcatgtattacccctttcttgtcactctttggaagtgaagaaagagaattagggggcttagaaaaagtaatggctaccatgtcagatcctcaggacttatggcttctgaaagcaaagtcattgcttgcctacctccaagcatggtgacacaaagaacaaagcaaaaaaggaagggcacagttttaagttccttgcctttgtgataatgccaatgaaatgtcacaattctacactagttaactgtaccaagaatgatgacctcattcagttcaacaattatcttactcaaattcaaagctaaaacatcttacttttacaatacatgcgaagtattataagtgaaaaacacttatgaattaaaaatgttgaacatttttacacaaaatcagtctaaaatattcttctatcctaaaatataaattaatcttataattagagtttttacccaagaaaatctgttgcttttgttttacatgcatcaaactcatgaagtttagtgttctgctttgcaaaatattttacaaaatgcctcaggaatttcagttgtggcaaatgaaacttacacaatttcttcattgaaactctattttatagataaacatgccgtcctcccgagagttaaactgcttttttttttagctttcttatttatttctttatttcttatctcgattacttaaaaattttgtacagtctttctggagtatgtgtttataagctgaatttattgtaccatggcttagaatcaactgaatattgaaacctgaacaaacacaaatataatcttctaagtaacttgtgagttttaattcatagattttaaaatcgtgtcaatattctgtaattttgaaccaagtgcatacttaaatagtattttactgcttttaaaatattttgaatttacaacctattttaaaatgttgaattacagtctgatgctcacagagtgaaaacaaatgccaacaatgtttgcctggttataatcatagaacatgtctccaaagtaaatctatattaacacaattcaatgtggtaattaagatagaaaaaagcagcactaagctgtgtgtcctatcagtttccttggggagaaaaaaaaaaccactgacgtgacttgaaatgtgtccaaggggtttagttagcctccaattagctgcaaagtcctgcaattaaaatgcacaacaaataccagcctccatgtccctgaaccctttattatttaagtcctaatttcagatggttccttcattagagcatatatcccaaaagctacctttgacttacaattacactgtacaatcagtgctgtcaggtgataagttggaaggacaacagactccagggcatatcttggtgaacctcaaaggcccaggtcttaaccagaggcaaacaacagaacaaaggcaaacattctaggaacaatctaccatgaaaataggccaaattgttgcccctgtttaaccttgcagtttatacctgtcatgaaatccatatagtaaattcaagaggccatgcagaaatatgaacacagcggatgtgtaaagagcgggaaattggaatctgtcttttctcaggttcagaaagcatatgccatgttttcatatcattttcaccttctgcatcattacttcctttcataatcatttggactcataagaaatgcttttttgcaatttaaatactaccttgacacttaatatccaggttggatgacaaaaaagtcggcttactaactgtttaatgaatacttctgagaccatagttagtttatttttggacagatatatttctattataaatagtctacttttaatttacttttttggaaattatggcccatttttctttataaaacatgtctcaaaatgttattcaattcccagacaggacaggtcagaaagtagtctaacccataatataactttaatggccttcagaattaaattttacccatttgtaacacactgaatatgtaagagttgtctcaacttccagttaacgtccaaataatattctgtgcctctgagcaaggatatttttaaaaagagccaattatttggtcataattacttccctgacaatatcagcacataaaagagagtgggcgaagggaaaactttttatatgaaaacaactttcaaaattaatatgattttataaataaagggatctttcaaaattttgttaagggaaaaatattaccaagagtcaatcatccctcagttgatctaaatgagagaaaaattgtatgtgaatgcatttttgaaagtgtgagttgacgtgtgtgagcatgtgtgcataatctatgagcatgtgtatcagcatgcgtgtgtgcttgaatttgtgtggatgtgagcatgtgtttgagtgtacaaacatgcataaatcaatatgtgtgtgtgatgtgtggaagagaaatgtggtattcataggctgagactggcaagcaatgcacgtggatacaagtggaatagttatcacctaagagaaactcacagcaattcaacaccatatggaggaattgctggaaaaagctggtggaggaatatgttaaacttgattgttgaaataatattcatctaaggcatgtaatttccatatgatctttttgcattgaaggtaaatcaaaagcaagctctcaataaccatatgaaaagaaatacaatttcataagtaaaaggatctttcaaaattttgttgagaaaaacactagtgagagctgataatccctcagttgctccaaattgcgttaaattggattgccttaaaatggcaccattaagaggataaaaagaagtcacagagtggaaaaaggtatttttaataaccaacaaagggcttatatccagaatatattaaaaacttgcataatttcattaaaaatcaggccttcccttaggaaaaaaagtgcaaaaacttgaatagctgcttctcaaaggagaatatcaaaaagaccaatgaatctggaaaaggtctcaacctcttctgtggaatgtcatacaaacccatggtgtggtatcactttcctctcaaagaatggctaaaatagcccagatgaaagtagaaccccacttgcaccatgttttaatggacgtcatattggggtgctttgtgtggctctgcacctgtcacagggcaaagcatccgtaggctaaaggcaaatgccccctaaggatctgccataaacccactaccagaccatgcttgagctaccagcaccccacattccctgtccagacagcctagaacctgttcccacaaagtgctctgggctttctcctgggtttttcatctgaagggagatgataccacctatgtgtgtagctctacatccaaggaatggttcacacccaggaagtagtagacagagccttagtgtatagatcggcttttctcaagtgtgtttctctttgtaagttcaccatttttttcactcatttaaacctatcaactttatttttaaatatttctggtatctttcaacttctgactctatctgaaatatcctttcagttatcattgattcctcattttcctgcctaaaataatccaatgctcagcactgctatggagataaagaaaaaagaaatctgtaacattacaagagcctacatttcctctgcctgaaaagtcaacaatcccttcttgtaaactctagacttcactctgattctcaactacaataccttgaaactcttcaatcttttcatttttctacctcaagtccatcttttccctctgcctagaacttcccctttcaagacactcacatttcacctcgtcgattcctatgaattattcatagctcaattcataaacattgttctcaaaaagcctatctatactccccaaattgtcagatcttctattataaaattctaatagcattctgcattactttcttagcatttacctagctctaataaaataattttattggctgttcaatatctgcctcccaatttatataaaaatttttagaacgaaactcttcatgtatgaatgctctatatgtagttgtttaataacaaaatataaacatttagctatgtaaattgggaaaatctgccatatttagattatacgaatgaaggttgaataatgtttaaagaatactttaaaatctcaatgatctgtccaagaattatttttaaaatggtgatattctacataatacattattttaaataaccctaagattatgcttctaggaaggataacagaataagcaaaataaataaagatacaaatctataaacttaattataataaggattattagttaaacaaaatatacatagatataaattcacaaaccataagttttcatattcaaacaattttagaacttatgtgtacattctcatataacatattatttatgatgcatattaacagctattaatgctgcatattaacatcatattaatagctatcacttttgagaattgagcaagtataagataattcaattatccctaatctcacaaaaagtccacaaagcagacattattcctgattcactggtgaggaaatgaggaataagtagctataaaacttgccaagattcctgagccagagcttgagtgtgtctgtctgacctcaaggcctggcccttcccctttcccctcaacaacaaaaaaatcatttttcttttgacagaattaagtttttcaatctctaagttcagtttttggatcagagcttaacttttccaaagaaaaattgcttaatcaaatctcttaaataggttagcatttagcatacatcgtgaatagtgcactaagcagaagaaaaataaggcaacagcaaactaagcaacctatcgaccaacccccagattagtttgttaagccatttgagggcaatttcaaacaaatcttttctttgtaaagtgggaacttctaataggctactttgcatttactaaaggagagtacaaacaaaatcaaaatataaaccaggaaggtactcatgatgcaatactaatgtacaagaaaataagcaaataatgctatgaaatgactgtaatctgctaagtatagaagtatattattttaatttgaatacacatattttctttccctgataagctaattgtcaatgattgaggctcaaatccaaagtaaaaatcaattattgaacactatggctcattttaagctagaatctcagtgtgcaatttattttaatccttgtcctttatctatggagaaaggatacacatgtgcatcataaaatgccagattgtttcttacattttcttaggaacatagccatattgaagacacaattaaccacatgatgttaattactgaagaaattatcattgctaaaataaagtgagaattgtcatatatatatatatctacagaattttgaaatggcatgtaatgtgttcatatatattcttacagtgtatgtatatattttagctatatataaattaactaaatatatgtataatatatacatacataccacgtgcacatgtacacacacatacatataaagtatgtcagtgatctaacttggatatatctaaactgtaaatttgaaaatcaaagaaactaccatattgcaatctatatgcaactgtatattttacatgaatttgtggttatcatatagcttaaattggaaagtgagtccctaaaagcatcattaattcagacaaagtaaatgccagaaaataaattaggtgcatataaaatgaggaactgcaaatatattacttacttttatattagtggaggcaagaagacaaaatgtaactgaagaaatgtttttcacagataacttacttcctgaaaaaaaagtattttccgttaacgctatagattttctttataattctcaacaacactacctaagcagtgttttgcaaaggtgtggaggcatctctgcttttctccataattggagatatagtcatggaaaacagaaatgctggacatgttggaaaatgtgtcctctgccattttctcatattcttgccagcattatgttgacatatctgtgtataatcacatgataataaaacatatttttacagcttgagccaccgcgcccggccctgagtcgacttttaagcataatatttcatcctgtgtgaaggtgaagtatttaactttgctgagtagatgacaatacttcaagggaacatgtgtttactaacctgtttggaggagagttaaataatatctagaatggtgtaaactgtgatactcactgtggaaaaatatgtaaaaaaattttcttaaaaatttccgttttatttacaccatcactataatgcatctcttttataaagaaatgatttacacagacttgcaatatttctacataatttaaagcaaatacttttacagcagtcctttgaaaactttaataggcctaaaattctgctgaatgtggacacatgtttcaaatgcttttggccatctgggaatgtggcgttcttcataggagctctactcccgaaactgccagtgcctttgctgcaccaggctccaaaaacctattgataactatatcatgttgtgcaggtggaaattgaccttgatcatattagacaaatacataaaaggaagactgaagaatacaggctacttaagacaaaaatatccattcctgaagatgggtgggaaaagtagatattttaatagaatgctctagatattttcttccgctttctggcaccaaagtaaaacttaggtgccaaagtggcacttatcttcaaagaaccacctttttttctcttattaccattgtatgagagaaagtcattggcattttcatcatgtctcaagatttgtaacatctacctagaggtatgaatttgcttttcatgcatttaaatgactataaacagcattcttttgaaatcacctaatgagttctatgatatgaaaacagatatgtatccccagaaataatatatataattctgattctataagagaactattggggcttttttgtgaacattattatagctcaatattatctttttgtttttcatggtattccaaagatcatttaaaggatgaggatatgtaaggttttcttcagtgcacttgtctttggtgataatgccctagttcactagttcagttgcctattatgcgacatccttttagggattattctgatgtacataaacatacccttgctaagtacatacacatatataccatatgcacacatgcacacccacctgcatacaaacacacacagacacacacacacacagacacacacacacacatacatttcttatcctggattggagttacatggtactggagggggggttatgtttctaaaaatccaatagtaattaatggaataaaaagtattcctttctttatattgtttggctattttaaaatgaattttaatactttggattatagtttaataaagatgatatggaaaagaaattatttacttaaaaaaatcaaaataatgcagaaaaaagttatttgtgagtatttatgtgaatgtgtgctgcactaaataatgaagggttttctatgtcctttcttccacctatcttgaaaatccacactcaaaacttcctttcttattaaaatgcccttggtaaaaatccatataactccactcacttattattttctatatatgtaaagaaatttttacatggtatatagatagcaaatacatattaatgttttatgtttttaatctcttacaatggactttgtgcaatgtccataatgatgaccacttttggtatgcaacaggatgataaaatgtttaactgatgcaccaaaatataaaaaaaaggtagatactaaagtaaattctgagaagaactatctagaacttgaaaattatcatagtgtgatcataaacaagtcagttaagactacaagagataataatgctgtacaaaagccaggagaaattattttcaaggacaatttattttagaggatctactagtgttttcagagttacatatcttcttcctgacccatttcttttaagttttagatctggaagaattttgttgttgtttgggtgtgcttttttggagatggggtaaaagtgcagactttaaaaatagaacttattaaatcctttaaattttaaaatttatctttaattgacacattgtaattgtgcctgtttgtggaatacatcgtgatgtttctaattttcattcaggaataatgaaaaaaaccttgagactgacttataattttattctatttgctacttgatcagaataaattatatgtgcatataggtaaagttacaagggttaaagaataggtacaaaacatcacgaaaccagcatgcctcgtttgatgcaaaattcctataatgactacaatagtaatgatagtgactatcatttaaaaatctctatgcccccaagaagtattcatatttcatgtcagtcttaatagtagacatttataaataataatattcatcatgaaatgaagaatagattgaaagaaagtaaggataaacataaaagcttcaaatcattgtattcttattcctctagattttcaacttatgtcagttatgttcacagaatatgaaaattctatgaccacacatgttcggtcagccctgccctttgacaggtaactgataatttctcctctgtgagaacactttcaggaattatttattcacagatttatttgtgtcagattcaaatgaatgttttttctatggtatattattttagcttctaaatttgtttttagaagtgatgacataatcttgacatacttttgttcatttataattatagaattcagtttttctttctttagcgtagctctggtttatgaattaagagaaaaaattagcaaaaatgatattcatgacttctcagagttaaaagaaataacttataatctaaaatatttaatatttgcaatatttcacttacaaaacaatcacactgctaataaaataagctacaatgccacttaccatgtattggtataaatttaatggctgtcacaataaagattgaagcctcctggtaggatatggaaagcagagtctattcatagagaaattagaaaatgtcagctgtgtggtttccatggaataacttggctttaattaaacatctattcattagtaacaaatgccaaataacattaagctgttagtagaatattaattacatgcttaaggactaatggtagcatattaacaattaatggtactttaagaaactagatatactatagtacataatttgtttaaattgaaagctattctacgagtgtgattttttatttcctaattgaaaaactccataattatatgcacaatatacatataattctatgtacaatatacatataattttgaagtttttttcccctgaatatcatggtatatatttgggtactatgtatatgtccaaatatacctctcttaactttaaaaagcattcattacaaattgttctctttctattcttgcctccctctggaaaaaggaaacctcactttatgcataaaatttctatttaagatgacatgatggttgagttaatatgaaaccttaaaaaagtaaagtcgaactatgaaaacacccattttaaagaactgtttctccgtcccagggtctctccttctgtctcaattttctcttctaacagaataggtatatttggtaaaaaatatagcaggacaggacccagattcaacgaaaagccagagacatcccactctggaatctgacacaaagactttctcattcaacacagacaggcactgaaatgcctgctagatctgctgccttgatactgtgaaaggacattttgaatattctttaatgtgaaggcagaggaaaagaaagtaattatattttaggattgggagctcttttatcgaaaactctgtggacctgtttgaactttgccaaaacatttctcttcaaatcaagtagaaccttgtccatatacttggaaacaaattaactctcaaatacagccagatgatgatagacagtgttgttgaccacacatatgaatccgtcttgatctttaccttataacatttcagttattcctacagatggaagggtgcactttcctgccccttgactttggaatcagcgaaagagatattagcaaaagtggtatgatgaaactgacactccatatgtgctttatggtaaggctttctctcttgtgcttgtatcattgtcatgtactgcagaataaacatggccacaagtgctctgacattccttatatagagtgggatatttatttccttcctcctggtgggtaagggagaagcttaaaagggccctgggagactgtcactgaatggtggaagagcttcaaggggattattaacaagaaatgtaaaagcagtgaggaaaatgttattacaagcaagaaggaagcaacgtgtaatcaggaacatagaaagagtaactaatgatctctgaggattggccaaggatatttgcaggcataatgttgcaagttccatactctttcttgacatctatgatgaattacaaaaaaataatgagataaagaaaaaactgttctgtttttggcagaatttagagtcattataaaggccccaagacatgctgggtttgaaaataaaattgttgcatattcctagtttctaccagaaaaagactctcaaagttataaatgaatacatgccagaaatcaaatcaaaggctcaactagttatccatagcctgagaatacagatatcaaggatgtggctgtaagatcctttcatcagatcacaaaaaagatacatgaatttgcttagtaaggcttctaaaaatataaactgaatgtctcctagactctgctgcacaagtgggtcattaacccatttatgccagaggttgcaaatttttttggtgaaaaatgagaccttggaaattaccttgagcagcaggatataaataactcccacaagcttagtgttccaataatggaaaactgggcataaatgcgttaagatttgtcaaatcatgcttccatgtcaatatgaaatgcttttacaaagaaagattttatggccccaagatatcatatcttataagtaaagctagagaagttactctatcaaaacaagtggtttggtttcggctaattgaattaatttgatacacaggaaaccaatcaacattttaaagccattgtatcagattagatgcaaaatgcagagatagtttaaaatgaaaagaggcctttgtaaccttggtattatttctacaggaagtaaacaggctgagaataatactcagctgctgtaaacatagaccacttattagtaaaattaaaaataactcataaggccgtggggagtagtactgtgtcctaatcaagaaactacaatatcaaatgaagtagatttctgaattaccacgaatccatgactgctatgtaccttcatatcactcctttcagaattagaatacctgttgtaattttcatgtctctctcttgtcattattatgttgattttatgaagggaaaaaattcacctaatttgtttcacataacaggaatcataaacagggatcaattcacctaatttctccttacataaacaggaatcatatgtgaggaagcacccctggatagtctaaatccacttgatttaaataataaaatcctgtatttgagttaattatgtaagagagtgaggctttgggggcctttggagaagaaagtacattttgtataagggaggaattttaaatacatggccacagtttgagcttctgtggattaaaagtggttaagtattcttatgcacttctcttagcaagatctgcacactatttcatcttgccattgattgtgtgagggcttggggttacttttgaccctgtcacaatagaatcaaacagtcatgtcctattggaagtccttacaatcaaaaccatgacatatagaacatcagccttgtggtagtttgttacacagtatttacattattaaataactagaaaattatagaaaggcattaagatagtttgtgtacgcacacactcaaaaacacctcatagatattgattttggattgttttaaatctataaatctgtggtgggagaatagacattttcattattgagtcttataaagtatgaatacaggccttctttatttctttcaaaaatactttatagtttcctttagacctcttgcgtctctgatttttgtgttgttgatattataatttttccttatttcttatttgtagaaatagatttttaataagtattggccttgtagtcaacagttttatttaattcacttagtaattctaaaagttattctgtagctactattgagtattctctatatgtaatcatgtaagttgtaaataattactttatttctttaggcacaattccttacatatttaattgtatttgctttctctgggactggttaggattttcagcaccctggcaaatataagcaataatgcagaaatcattgtcttattcaaagtcttagaaggaagcttttaatattttaatattaaatattatgtatgcctttttatctcattaaggactgtccctcttaatgttagttttataatttttttttaaaaagagaattggtgaattttaacatttttaaacttttttttctatgtctgtgatgatgagcatttagcatttttctgatttttggaacttaaaccaaccttgcattcctggaataatcaccgctcagtcttgctatattcttctttttatatttattgttggatttgatttgctttttcaaaaaactgtttctttgcttcattctaaatgaaagaattgggctttgatttttaatgttaacatcttcattaggattattttcaatatttgtgatcctcataaaacaagttagaaaaactgcattttccttaaaattttgtttttttttaaagtgttacttctttactatttggaaaactttgattatgggaaggttttcacttaaagatttgatttatttaatagatatgtaaagtaaaatgttctattttttgtgttgttcttgctaagtaacgtttttcagtgaatttgttcaagtgtaatagcaaagtgtaatatccatgtattatctttttaatacttgttggtctataggatctatacaaatgttattttttaaggttttttaattatgaattttcttaaaatttggaagccagaagagggaggattggtaaagaaatgtttatttctgggatgcatttgaactgacctggtagactttcaatgtgtcaggtttgtggcagctttctgtgggtgacagaaaaactttgtaatggcaagtctaagaagctaactatttcatcctccatagagcacaaaattatgacaataagggaagggaaacacattaaggaaacacaataaggaaagagccacatggcttcttcacagagtgtccccagatggagtggacacatttaaaccataattggaaacacatctcactgaatgttacacttgtgaagtgaaggtgttaagaggtggggcctttaacaggtaattaggccattcatccattcctcgtgaatcgagttaggtctttataaaaggggcttcacacagagttgagctcacttgactgtttgtcattgaccatgcaaatacacagccttcctcttctctggaagattcagccctcaccagacaactgaacctgctggcaccttgatctgggacttcgcagtctccagatctgtgagaaaataaatttctgttctttacccagcttcaggcattttgttgtagccgcacaatggactaaagcaggtcctaaatattttagtaaaatttctgtttaatatttaatatttaaattaatattttacttaaatttcaggctatttttaaatgaacataagcaactcaaattcccttaagtagcatatatagtttaacttatttatgcctaggaaaatactataatgagaagttagaaattttgattatatagatataaacactctcacgtagattgtttaaggcagtgaaaaaactgaatggatggaaccgggtggttgtcattcagaactattgaatccaaaactcaacagagacttatctgtccctacaacaggtgctaaataataattgacattcccaaatatgattctgttataagacaaggaaggaatatacagctgatacttgggggaaaataaatatgtatcaaaagagttttgaagcaggaatagtaaaattgagtaatatgttcaaatttaaaaatttgtatatgttccaaacaaagtcatgtgtcatcttcaacttaaacttttcctcacataaaagattaaacaattgctcctaatagtctttaatgtactttctgtatcttgagttctcagttattcccatcattaactttgataacatcagtactgtgtccaagatagtatttttgactctttaactgaccatgataaatataaggagaatgagacttaagtgcactgactatatctccattcctttgattaaaattttttttaaaaattgaattgtaatggaacaatgcaaacctgcagaaaactttttgcatgctatttttcatctgaaagtaaaataatacctgaatactctttgtctcaccagctttttacagaatgaatggcacttacagggctattttttctctgtaattattgagaaagattttaaggcaaagcatttaggagctaaagcctgcatgattttgcttctgtgtggggagaaaagaaacccacatccttacttggtaaagaacttaagggacaaaataataataatagattctaggaaaatatttaaaaaaccctcaaaactaaaatgtattaacattattcaaaatttatgaattgttggtccttttacaaaatgaagcaaaaattaaaacaatccaagaaagaaatacaatctagttcaacaacttatacacatgccagtgggttcaatgaagcaccatgaggaacaagggaacaagcactgagttcatctaattcagggatagcattccctagagatttggacgagatacttactgcattataacttttggtaaagaaataaaataaaatacattattattaatattatcactcaaatatcaggctttttgatatcttcatagtttgtatgactatagtttatacacagcattgattaataagaaataattttctcaacaaccacataagtgaaatgcataattgagattttgcaatcagagataggaaaaaggttgtctgaggaagggtactccaatatgtgaaaatcaatctgtatttattaaatctacatgctgctactttggaatgtttacaaaatgttgttaaaaatggtctccgtttaaatatgtttattgtttctctaatttttaactagtcagcttaactgatactcaaaactctctacaaattttattcaacattatatttttatctttacaagtttttcttgtaaattaattgtggggtattttactacatcattaaaatcaaagtagacttttttagtttttatctatgtttcaacaatcttagatcctatcgataaaaatcaactaacttctaatactacattatttgtgtgtatgtgtgtgtgcatgtatactaat

SEQ ID NO: 2935 - DNA, 799 bp, Homo sapiens
tgcaggacttgagtgtttgtagattttggtatacgcttggcttcgggaaccagtccccctgtgatatggttaggctttgtgtccccacccaaatctcatcttgaattgtaatccccaggtgctgagggagggtcctggttggaggtgattggtcatggggtggtttcccccatattgttcttgtgatactgagggagttctcacgagatctgatggttttataagttacagtttcccctggacttctttctctctcctgccgccttgtgaagaaggtgcctgcctccccttccaccacgattctaagtttcctgaagtctccccagccatgctgaactaatgttatcttatctggaagaagaggaataggaaagaaaaggagtcaggaatggatcttactcagaaggctgactagacacagccaggtggaagagctcccactgcgggaccaagatgactggaatgcccctaacagatcttcagagggaagaaaccaggagtggacagagagaagacacagaagctgggctgaaggtagtgaaagctgggaatgtggcacaggactactgcacaccaggttttgttcctggcccacaatggctctgggggatcaggttgaaggaaaattaccctggatggaagatcagaggtatagaaagaaatggagagcaaagaaagaggactgtgctgaatgagaacttgtggtaattatatgtatttattgtgagaagaatttttgcctgagacaccatcatcagtcagaccatgaatgtgaaaaactggaaatccaaaagtctcc

SEQ ID NO: 2936 - DNA, 18845 bp, Homo sapiens
ggcaggcacctgtaatcacagctactcgggaggctgaggcaggaaaattgcttgaatctgggaggcggaggttgcagtgagctgagattgtgccactgcactccagcctgggtaacaagagtggaactctgtctcaaaagaaaaggaaaagaaaaagaaaaaaagaaaaagaaagattacattttactgttgtatttacttatccttctttcttgtattccatgccttcctcttccttgacttcttcctcttccttttctatcccctcctccttgtccccccaatctttttcttcctttgtagttcttacttgaattttcttccagagggtgatattaatatatgagtgataatatttaaagtcttgcatgctccaaaaattttatatttaaatgctttattggctgagcataatagcattctattttgaaaattgtttctttcttctaacttttagtcattcaacaaatcctaaatgagcatttaataaatcaagatctgttttaggtgctggaattacagcagtgaacaaatcggacaacaatccctgtctatcttgggctgatcaccaagcctaaaatcttacattctagtaggctgtccattagatacttggtattcagtatagtactctttctatacatactctctatgtattactctggtattcaatagagaatagatactagaaatttgctgtcagtctaattttcagcttatgagacaagtatttaaaatttgcatttacattgaagtctccaattttttctaggatgtgttgacatgagtcttgttaatgtgtgtgtgtgtgtgtgtgtgcatgcttttaaaaaattaattttcttggttttcacattgcaaaaatgaacttttaattttcccttccattccctctcccatccccttcggatgtacttaatgccacatacattggtcctcatgctttttgactctcctctcatttaaaaatgtctctgcctactcattctatattttaggagattcactttaccacttatttgatcttcagccatgttcattctattattcaacatgtccactgacattttaattttgatggttatttttgaaggattaagagcacttttctgctcctgggatagctagctctttttcacagaacaatatttttgtgatataatattctcttgactcactcacagtatactaattagaagatgtttaattatttttttctaaattctgggttatttctcttcttccaaggttgtgtttttcacttgttaatttgggctgctccttgatgcttttgattttcccccaatgtcagttgtgcttggttgatcctatcttcatattagtttttgttgtaaacaaaaacactggtaatctgacttctatatttagccacattttagtggttttactttttactatgaaaaacctgtttctgaaccaggaaaatgtctgattgttgatatgtttgtagtaattttaacaatttgaaaaatatgtttctgcatctttctagacaacattcggcatcaaaatattgaagttttggattgtttttgatgtatactcttcaaggatgatgcaaataaacatctttaccatgaaggctgagcatggtggctcatgcctgtattcccagcactttgggaggccaaggcgggtggatcacctgaggtcaagagtttgagaccagcctggccaacaaggtgaaactttatctctcctaaaaatacaaaaattagctggatgcagtggcaggtgcctgtaatcccagctactcaggaggctgaggcaggagaatctcttgaccccaggagacagaggttgctatgagccaagatcacaccactgcactccagcctgggcaacagagcaagactctgtctcaaaaaaaaaaaaaaaaaaccccaaaaaacaaaaacaaaaacttcaccatgaaatactgagaacagggcagaatttgtcagcttggtctttttttactcttacatctaattccttgaaagacatattcacagaaaaaatactttggtttcaaaaaatatttcaacattgattttcaacaccttcacctacagtcttatttatatttcaacatttataatgtggaacagtgcatatcatgtaggtttcaacaattaaagtgaacatatagttcagatagcaagagctcgagttagctatcttttaagttatgggtgttttttacttacatcaaatgaaactagaggttctggtaatcagaacacaataaacttctagggtttgttttgttttgttttgtttttgagatggagccccactctgtcacccaggctggagtacagtggcatgatctcacaacctttgcctcccaggttcaagaaattctcctgcttcagcctcccaagtagctgggattacaggcatgcaccatcatgcccagctaatttttgtatttttagtagggatggggttttgtcatgttggccaggatggtcttgaactcctggcctcaagcaatcctccttcatttgaggatggcctaagcaatcctaagccttctaaagtgctgggattataggtgtgagccaccacatccggtctaaacttctgtttctgaatgcggcttttctggaccacaggccagtcagtatacactacttattcatagtcatgactgtttgtttaagtactgggcagataataatgaatcttgtttggtaattctatcacgaaatgttgtttaattgagtttatgtctttgagataaaaatttgtgcattacagaagggaaaataaactatatataagacatgaattttttcctagagaccatactggaatatgtcagaggtacataaaaaagtaatacattcagaataatctagcagcagagtagtgagtgcctgtaccagaaatacatcatacctcctcttaatggattaaaaattgctattcaatctatcatctgagcaagaagtcaactatattatagcaaagcttgaggggtattgacgttttaatgaccttccacttccaattggtttaaaaatgtttatactagaattctaattaaggtccaaacagtcacaatcaaattagatagttgtctcctggaaagggcaggacactcttggctggggagaagaacgctgaacaaggtccttgcccgctcactcttagccttcagcactgattagtttggtaatattgttacctcctttgcaactttgttagacactgaagtgtcaaatacatttcactggtcacccaacaggagtattcacttagaataatctccgatagcagcagggagccaaggaaatgccatgttggaaacactcaccacttacactcagtgctactcatgccatcgtgcgaaggccaccaccatatatagccttgcatggttttgcattttctcttatttttcctgttttctagtccatgcataatacttcctatcgaaatctcaaggcactttgcaaattgctgctgtgttttgatcttaattgctatgtgatgatagttaaataaaggcctgggaagaaagaggatgtttacctttctttgaaaagaaaattgataaaatgaggtttttactaggagtgatggaagaaccaggaagctgaactaatttctcaaaaatgctgtgattattttatggaagtgggcggtttggttactttctcaactaagaaggtgataagaattgtccactccatctccttcttttcctcaattttctccttatcattgcaaaaattgttttttgtgtacaaaggtctattttagacaaaggaataatcctaggcatgtgtctgtgcatgagaaatttgccatctaagaatgtataaagcaagcaacaatcagaaaatagtttctgaccaaataacaagaaaacagacctcttggcaatgttctagttttgtccaatggccctagaggcactgatgtggcctcgtgatgttgggaaggacagaaatggttccaccactccttagaaagcctcagtggtgggaatcctataccccaacatgccatgcactgagtcccttactagatgctttgcttacaagctcttattttcattctcacacctgtatgaattacatattatttgaagtcctattatttttactatacagatgagaaaactgtattcaggagtgtaagtaatgttccaaaaaccacatagctaataagtagtgcagtttagaggcaatctcagacctgtctgcctccaaagacctctcaagtgaatgtggttgttttccagagtttttgacgtttggtttatttttagctatttcgatgtggacccacaatcactcaatcttcaagcatccagggacttttaactgagctggagtgcttgggaaaatgtggtaaaaagtatcttcctgcctcaatcagttggaaaactagagtagccaatgccattaactctgctctcactcctgtctttcttctgacttcagcgccctttctgttttttgaaatttgagatttccttgtttgttgttatagtagacaatttgtttgttgtctctctagtatcaactcctgttttattttctcccaaaagccatgatgtcttagtctaattaattccaaggctggtctgagattgccttaagcctactagatatccagtctctctggtcacagggattggctcagagatgggcacatgatccagtcagaatcatagagatatgatgagatattggcttcagggaaagaacaattttcttatcttctggggcagccatcagaagaaactcacttgttttggaaggtgaggggtgaggtgtgaggggccaagcctctgcagccattcccagccagtggagggatccccagggctgccagaggagcacttaagcagactgaggatagacccaacacaggatggtgagtccagggccattggtgataccatttcagctgctgcagatgaagcttaatctgaagcagcatattttgcttccagacttgctaaatatgtgaaccaataaattatcattgttgcttaacactatgaattgggatttctgtcactcgtgcctaactgataaacctgtcttctagatttttctagaaagacagtcatcatgaatacacttttattattgcactttttgttagagttctccagagaaacagaacccataggacatatatagatatacagagagatgtgtcaggagggattggctctgtggttatagaagtctagatatcccacaatctgccctctgcaagctggaggtccagcaaagctgctgctgtcattcctgcccaagcctgagaatgggagaaggtggatgtcccaacttaatcagagagtgcaaatttccctttctttcaccttttttttctatttaggccctcagtggattggatgatgcctgtccacattggcaagggtggatattctcgtctcagtgtaccgatttgaatgcaaatctcttctggaaacaccctcacagacatactcagaaatgttttaccagctatctggggatcccttagcccaggtgaattgacacctaaaattaaccatcacacagttactcatttgaaaggaattcatcattgctatgagtaggaagcataattaactgggatagtaattctgtttaattgaaatttatggctgagagcagttaaaaaaccatttttatgtcaacagttgttattgaaaaatattttcttcctaaagatgatggagttggtataagcctgcaattatttaaaggcctcaggttctggttagttgaggttaattgtaaataataatctcaaatcttttattgtaagagcctcctgggatcacataattcaaaactccttcttttgttgagatattctcctctcaactggcagctgtatttgctgacactgatggtgaattgtttaaccttttgaaaccattttctataattcgagggtgatatttgcacatgtacttggctttctttataaataaacaatacaaagcttatttcagaaagttagtaaaagtggcaaagctaggagctgagggcagactgacatttttgcaaatttgaggaccacttaaaataatggtttattctgcaaacagacttcaaactgtttgcttataaacactataatataaaaaataatgagcctaacattgctttttaatatctcatttgctgccttgtaaggaatggtatctaaaagatcagttttactgacttttttggagctagacttgaggaactgaagtccattgggtaaaatagctttcattaagagcaacgagaaaaatatcatggaatgcacttaagtatagaaataattaagatttctagccaattaagatcattatgagctacttctaagattcagtaggtttcccaaagaagaaaaacgaggctttatgccttcatcaggaatccgggccaggtctaccagggaggctattattctagcctctttggggagtgggagaaagagtatatcatttacacttttatgaaggtactgactgtgaaacccaaagcaccctagctcaacatatcatctcaaacaacttgattcatttttcactggagagttttcttcagaaagtaattagaaatcatgcaggttttgccatagtaaaggaaaaagaatagatagctgagagtctataatataagcaacatctacaaagtcagtgccactttccagcagacggaggactggggaaattagctttggcagctggtcttggaagaatgaatttgccgaaggctcatctgctgccttagtacagatgggatcatctggccaacttgtgtgaggaagagggaaatgatattctttgagcatatgtttgtttgattactgtgaaacaggcaagactctccataagtattttttaacaaccggtaactacgtatctggtttcataaagaccatattgaaatgagaagaaaatgctatttagaatgtctgcaaacttagcaaggaaggatgcaaaggcaatgtagctactgcaggaaagattggacatatgagacctagctctgtacagagccctccagcattggctaattatttaacctaagtccaccatgattgaattggtaaaagcttgacaatatgatctggtttagccccttcatcagaagctgaggtaagagtctggtgggtggagaggtgagtatgtgtgagactgaagtagctgaggaccttgcacgttcatggactgatggaggctaaggtgtcaagttcatggagagctatgggggtgggccagagatgggggtttagaattaggtggaactctgttggttagaacctgatgagcacttgaaagactaggaatttcatatagaagtcactggaatgacatggacaaatttcactaagttttatgttagttttagatttatagaaaaattgtaaagagaatacaaggagttcctatataccatgcatctggtttctcctcttattaatatcttacactactgtggtgtatttgtatcataccaatgagcctgaattgatacattattgttacctcaagcccatagattatttagattgtctcagtttttactcaatgtcctttttctgttctagggtcccattcaggacaccacattacttttaggtatcatgtctccttagtctcctcttggttgtgacagtttctcagactttccttgtttttgataaccttgatggtttgaaggaggacttgggcaggtatttagtagaatgtccttctattgtgatttttctgatatttttctcttgatgagactgggtttatgggtttgtggaagaaagacaacagaggaaaagtgctgttttgatcacatgatatcaaaggtacatactatcaacacgattgatctctgttgatgttgaccttgatcacttggctgagacagtttgtcaggtttctccatggtaaagtgactcttttctccccctttcatattgtgctgtttagaacacagtcaccatgcacagacaacattgaaggagtggagagttattctcaaacttcttgaaggcagaatatttaaatacattatttggaattctacacgggagacttgtcttttctccctcatttatttgtatccaatcatttatttatattagtatggactcatggatattaattgtacactttgggtgataatcaaattctacttcatttattttgttgcaaccatcgagagttctttccattggttcctgtgtcctttagaaataaccccacatagtgaaagtctgtaattttatgttgcctcagtattcattttgaatatagctttaactttctcctattagaagcagggattagtcacccttgatccagtttccagttctctgcctcctctcagttccttaatgtggtcaatccagacatctgccttatacaactgctcttggtgaaccccttccctctggaacagctagatgcagccaacttcactcactccgctgaccctcacactccacagggactacacagatatgcctcagtgaccacctctcagtcacagcatgaccacacggaacttttgcctgtttgctttaaacccaccaattagaactctcctgggaaacctgcttgagcaatgccctggaccccaatcaaggcctcagtccttaggtccctctctttctctggctgctcacctgctggttgaatacattgtcctgtgatctttctgacggcctgccttggtatccctcttttttttttttctttcttttttttttttttttttgagacagagtcttgctctgttgcccaggctggagtgcagtggtgtgatctctgcacactgcaagctctgcttcctgggtccatgtcattctcctgcctcagcctcccaagtggctgggactacaggtgcccgccaccatacccggctaatttttttctgtatttttagtagagacggggtttcaccatgttagccaggatggtcttgatctcttgattttgtgatccacctgcctcggcctcccaaagtgctgggattacaggtgtgagccaccacgcccggccggtatccctcttttcttatagacctgtaggtaataaactgcttctgttattttctgtttttatgtatgtatgtgtgtgttgccttctctatgtttcacctgacagacctatctggacctaacttttatcctggccaaggctcttatagaaagtggttatcttcaaagaaataaattggacacaggtcagacaagagtataagggcatctgccaatataaacaaatttcctgtgagaaatttgttcaacacctggtcaggtacctggtcacaggttgcacagttaagtgctaggctgtcctccaggataagtattccatgaaaggcatgatgtaaacatccatgaccaaatcccttggagccctgtcagggcaaggctagagtatatagtcactctcctgaaaggaccgctgaaccaaattagagaaagattaaaaaaaaaaccccatcattgtatgcatgtgtgagtgtttcaacactctcttactttctgatgttataggctcatctcatatgttttctgccccagtcctaaaatctgccctttccccataaatctcaatataatcgcattggaaaatggtattagaaaccaggatctgggtgctaggtatgcttgttgttactgaggagtcattacttctaggccctgtcagctgacaaagcaaggaaatatatgtgtttatactaatccatatatatatatatatatatatatatatatatatatatatatatgcacacacacccatctacaagtatttttatatttaaccacctgtgtctgtattaagctaaacatgagctcatactgataactcacctctaattcattaccacctggataattctggcatcctcccatgcttatctgtaaacactcactccaacagcgagaaaccgtttccaccatgcatcattcatttacttaattgttcaattctattatacatctatagtagtagcagatttcttaacacatacttccattggaaacaactttatcaactagagtacagagctaatgactgtttattttgcctttaagtttataattcatttctaagtcatggataattttttaatgtgaaaatatctttctgctatgtggggaatagatttaagaagggtagagaaaactaatggggaagctaagtccagctgaaaagtaatggtggtttggtctaggataaataaaagcaaacatttaagttcttattagtaagttctatgtaaaagttagttatttttgtaccatgagcccttctaaccacttataatccttaactcactgaagcttacaaacacctgtgaactctactatcactgtccccatttcatagatgaggaaactgaggcacagagaggtccaggaagggttagaattagaattcagactctagcaatcaggttgtaggtcctgagcttttaaacagtttcaatatttcctctcagttaaatctcccaactcttgactgtatgaggggcaataattctctcattttttgcaaagtactagcatacactgttatgcactgtaggatattcctaagtaggtaagtaaacatccctgattgagaaaagattaacgcaccaaaccaaaaccaacacaccaaacccaactctgcttaaagtggtggaaagatcaactctgcttggtggtggaaagatcagtgctttactgaacaggctgccatgccgctgggccttccatcatttatggaccacagaggagaaagatctaattcagcagctatgagctgtgatggtgcctgctgccctgaggtagctataaactacctcagagcacaggttaagtgcatccaaaccaagaagaaaataatcatatgcattttaaatcttagttttttttttaaataaggaagtcattgataaacgatgaaatatagctgtctcattaaaacaatattcaaaggatatgaaaaatagtcttttgtaggaagcctgtggctatttatatttctgaatcagtttttccatttatcttaggaaatcaaaacaatgattctgcatactgaattttaccatcaggattcaaatttgttttcagatactggtgtggtacatttgtgggcatattttgccatcaccacaatcagacaaagactatctattcccagggtctcctggtaccctgaatcaccatctgaggcacaataaactccttatggtaacttattggcttcaagcagaagctggaatgccacatcccaccagattcagagcagggatgtgccaaatttaaccaaaagcaaatgagcaaggaactctcagcagctctgctttaggcaaagttataatctgattttggtcctgggaaacaaagctagtggcatatgtttttggtaaaatcatcttttgtggtagatattgggctccctactgtcatactagacccacaagcttgtgagctgggagggtaccacctcagagaaactgaagaaaagacctgcagacatgagctttattagggaacttacatagagggaatgcaggagcagcaggctggacaggaaaactgttccaatttgtaaaagcatgcaggttatacagtacccttcccacagcaacctccacttagcaacccccacctagcccaaaacaaatgggctcagttccttgtatggcctgtgttccaatgaacaggccaggctccaggttgtttctcataggtatggtataaacatctgagttggccattcttggggtctatagctgggaacactgagcaaacattcactaaggaacacaggttcattctcagggtatgcttgggttattgctgcccggcaagaccctgggttcagaggcatctcagtgtgaaagctccaaagcatcatctgccttttttgatgttttgtatcctcatggcctaggacagtcctgtttcaaggtggtcatgcaataaattgcagacatccagtaatttgaatgactggctggcagaatagaatagacaagcatttccatcctaatcacctctcccactgcacagcccacaggagagaaggagagaagctaatcattgtcatatagagcctcatgggaagttaaccaccataaaatcttaggtttccagagatgagaaaggcctcagtttcttctgtactgtttgatgaaacactacagcatatgaaagctcacttatcccaaattactcactgtatgctgaggccataggaatttgaatgactgtctccaagttacttgtcagttggaggaagtccaactttctcccaggcagagaacccaaggccacaataggctagagctagaattcaacaccctggtttctcaggttagaggccacagaatatgcctttcaatagggtagaaattatggcttgttccctgcccttcagtatttagaattaagtcctaacttggtgctctttcttcactgtgaaagtgaattcaatacacaccttttctgtttttacaatgctcagctggctaactggggaaaactacacatgcttcctcaatctaaaatcacttgtaaatgcacaattgccttttgcatggccgcaggacttcactgggaaacatggtgaacctaggttattttcttatgctctgtacttgaccctctttgcttctcaacataaggaaactaatttgcacttggtgagctaagatttgtgtcatttgctgtggataatcctttcctggatttttaataggttattttattttatttctttttttttcaacttctgggagcacagattaataagttatttttaagtgttctaattatttagagtagttgtgggaaggctgcactatttttgtaaaaaaaaagtgttttcttaaggcttggaagcagcagtttataaatggtaaaagcaacacaaagtaaaaaaaaaaaaaaaaaaaaaaaaaaaaaaaaaaaaaaaaaaaaaaagccaaaccactgcttttctgtctttaccttgtagacatctgcaatggcagttcacatggctcagatagctcacttctgcagagagctgaatttaagtgggacagggtagcaagaataattactttgacaatcattttgccacctgatgactgtgctgcctgtcctgagctgaggttaacaagagcaaaacagaagtttataaacatttgtacctcttatatacatgggagaaaatgcagagcaatgagtaaattgcctgagttgatctcaaagaaagagtgtaaacttctgggcttaaccacccactggacttttctgaaacaaagaaaggatgcagtgaaagacccagttaagagatgactgtggaaaaagcaccttaaacaaaggaggtctgttatacagatttatatcagtgccttatccattgtccaagctcactaatgatttggagtcattcttctgttcctagtgcagagagggagacacccttacaaatggagatttgctggatagaaatgtggccaaagagttcaataaaagggtaagatcatgaatattcagctatagaactccttctccgtgctgtcaaccattcctcctcagatcctctttcttttgggggtttattgagctgcttttcccaaaacagaagcactagggcttcctgaagactctgccttcccctctctatcaaccctcccattataaatatgtaagtgcccaatgggttcaccttgcccactgcctagacatagccgatttatcaagaaaggggaattgcgatagagaaagagtaattcacacagagccggctgtgcaggagactgaagttttattattactcaaatcagtgtctccgagcatttggggatcagagtttttaaggacaacttggtgggcagggggaagccagtgaggcaggagtgctgattggtcagataggagatgaaatcatgggaagttgaacctgttcttttgcactgagtcagttcctgggtggtggccacaagatcagatgggccagtttattgatctgagtggagccagctgatccatcaagtgcagggtctgcaaaatatctcaagcactgatcttaggagcaatttagggagggttggaatcttgtagcctccagctatatgactcctaaaccataatttctaatcttgtggcaaatttcttagtcctacaaaggtggtctagtccccaggcaagaagttttgttttggaaaagggctgttattgttttaggtttaaactataagttcctcccaaagttagtccagcctacacccaggaatgaacaaggatagcttggaggttagaagcaagatggagtcagttaggttagatctctttcattgtctcagtcataattttgcaaaggcagtttcaaatacgtcctcagtccagacctctcaatggggcatgggatcctgttcataatcttgcaccacctgtcttgtcttgccttatctgtgtgtatttattatggttttagttgcaagtaacagaaaatcccatcctaagaaggttaccagagcagccttgatgaaataactgggaaggttcttattcttactgtttttattcagttcctttatttataggcacagctgcttaaagactgttaccggaaaggaatcctgatccagacgccaagagagggttcttggactcatgcaagaaagacttcagaatacgagttttgaatttttgaattgctgttaaaactttcatcatgaacactgaagtgagtgaaaagagacttttgcagtcatttttttggtaagcctattacctgatctgctctgagtaattagcttccttgctcaccgagccatcttctatttctgcttctcacagtctcaagtcctctctcccgaggacatgtgcctcctgagctgcaaagcatggtatgggtgttgtccagggtgggggttttcaaaaatggggagacccccaaccagaaatattcagatttcggctttcagcaggatgacaggaaggactgggatgcactttgtagatacttgttaaacttcaacgaagaatttgaagatttgtataaatcatgggttttaggtcaatagcatctagttagcactgaggtaggtacctggcaaaggccttattcctccatgtctgattcacactgttggacatattctcttttcttttctttcattttgagatagggccttactccattgcccgggctggagtgctgtggcagacacagctcactgtagcctcaacctcctgggctcaagtgatcctcccatctcagccttctgagtagctgggaccacgggcatgcactaccatgcctggctaatttttgtatttttttttttagagatggggtcttactgtgttgcccaggttggtctcaaactccaggactcaagcaatcctcctgcctcagtctcccaaactgcttggactacaggtgtgagccaccacaaccagcctcattggatatattcttttgtagctaatttttgtgtttttagtagaggtgggattttgtcatcttggccagactggtctggaactcctgacctcaggtgatctgcccacttcagcctctcaaagtgcagcggttacaggcgtgagtcaccgctcccggccaatttaatttcaagaagacaaaatacaaaatggaaaaataaatttgaaacaagcacttacataatgaaataattatttatttggggagttataatggaaactattttgatatgcgcccgggttttgttgcatggttcacacacaaaaattctttatattttttcagtctttgatgatttctaataaaatgagaagagtttgttattgaacatcactttgcttttcttctttaattggctgcagaaatgccagttcccaaggagaaagcatttgccagtttctcttcagtgttttaattttccagttataagccatagctgccagatatttttctcctgtgaatatcaataatgtatgtttaactagatttacattttgtttcttttttattattgacatttttcataattagatgattgtggatttaacaataggaaaaaaaaggcaaactgtctttagtgttaacgtcaatccctgcctcagaacaggagtgcttcagagtaggggcattattccactcagcacatgagcatccgctcagcatcatatatgcaccaaagaagatgcactgcatgaggcaatccccttagcgcatatcctttcagatagatgagacaaatacacataactgcaaatgagaaagatacaaagtgttaaggaaacgtggcagaaagctttctgcaggtccacagttggattacattttccatggggggctatttcccagaatgtgtgccacttccatgactgctatacaaaccctccatgaatgtcctttgctgtccttttctgccagctggctgcagatgacagtgacaccctgggagttgagaaatgcttgtaagatggaaggaggctgtgtccctgaatgatcacctggaagagagccaccttagccaatgaaactcctgctatgaatgtttgctgagcaagaaatatacttactgctttatatgcctttgaagctataggttcatattgttaccacaatttaaagtgctataataaaaagagttcaggaagcaggcacatggaagcaataagagcaacaaacatttacacaggtattgtttaagtgcttttgtttaacaatcactatagctattagtagcctcattgtaataatgagtaaagcttagagattaaaaagtatttcttataacacagttatttgagaagactgcccagctgaaaacttggcctatctaattataaagaagagccagtgcatgttcctaaaatactagggtgatatgattagaataagctggcttatcaccacagatccacttaagggcaagttacaaataagtcgatgtttacaaaatcttgagagtccactgaggcatattaccatatgtttgccaggaaactctttttaattgtataggtaatattcacattatagaaacattttttaataaatagaaaaaatctttttcatcaacccacaatcttaatataatccttgtttgtattttgatgtacttctttctatactatttttctttttcttttctttttttttttttttttttttttgaggttgagtctcactctattgtccaggttggaatgcagtggcctgatctcggctcactgcaacctccatctcccgcgttcggtggattctcatgcctcagcctctggagtagctgggattacaggtgcctgccaccacacccagctaatttttgtatttttagtagagatggggtttcaccatgttggccatgctggtctcgaacacctgacctcaaatgatctgcctgcctcggcctcccaaagtgctgggattacaggcatgagccaccgtgcctggcccatactattttctatacatgtttttaactaggctataatcttattgtatgtacaattctgaattttgctcttttcacctgagtatatcacaatcattttccatgttattaaaaagttttcaaatgttttcagtataaaaaatcatatgtgccaattaaataaaattggatgaggaaaaaagtagggaaattttctctcttgcatccatcactcaagaagcaacgagaatgttctgctatttcactcaatattttgtcataacaatcttctaatgctttacataattttaaaaagctaacttttattagtaattgtaaaccaaatacaaattctatgcacgtagctgaagaacacagaaaagcacaaaggcaaaataaaatataatcttactactttaagataaacatttacagtattctattaacatatatgtatatgtgcatacattttaaaagatagtgtatcatatatattgttttgtagcattttttaaaaaaaattcagtattctatctgtaatggttaatttcatgtgtaacttggctaggctatagtgcccagttgtttggtcaaacactaaatgttgctgtgaaggtatcttttagaagtaatacttagaatcagttgacattaggtaaaagaggttacctttgatgatgtgggtgtaccttgtccgattagttgaaagcctaaagaacaaatgctgaggtttcctgcctgagtttccagcctaccatctggtattacaaattttaaacttaagattgcaacatcaatctttgcctgagtttctagcctcctggcctgttctacaaattttgaacttgccaactcttacaatcccatgagccaattccttaaaataaatctctctgtatttatatatgctttggagagccacagaatgatgttacaatatcgttaacattttctacctcagtattcttttacaagattttaatggcttcctaatgattaattaaatggtaatcatattaataagatcatagtattcaattgaatgatgttccatagtttacatatccattcctctactgttaacacctctaacaatttttttattgtggtagaatacatattaacaaaaaatttgccattaagtgtacaattcagaggcattatttacattcattatatggtgtagcataatcataatctatttccagaacttttgcatcaccctaaacagaaactgtaaccaccagatcatataccatagttgttttaagttgttaagttttgtaatattcattattccaaatagccatagataactgataccaaagttagtaccatgagtagggtgctactgaagaaaatgtaaagcaagtgtcattgtttttaggactggacagtgagtgatgctagaaaagtgatgaggtggcaattaggactgttggtgtg

SEQ ID NO: 2937 - DNA, 860 bp, Homo sapiens
tttttatcctgaggtgagaagttgctgcctgtgatccaacactcctgccagccaggacatggcagaaaatggctaggacaggcagccacagaccccagcagccacaggacagccggactgaggaggaccagagggcaccaggcacagaccccacacacgtacagtcatctcaagttctttcaatgagggaaacatcaccaacacactcacaagtattgggcctggtgaacaacccgaggccctgaagatcaggctctccccagccctcctggagccaaaccacccacggcagccaagtgacagcacccgcagagctgcccgagcctctgggaggtcacggggaggaagggaagacggaaacaccgtgacggccacttctgcctaaatcgttaggaactatttcagagtccctgcaacctgaaacggggattctccacacacctccacacggccagcagcgcagtaatcgcttttaattaaataaatcggaaacacaaatcaggccaatgtgttgaatcaaggtggcgtgcactgcgtatttatagctctatccacagaggactcctgacacatgctacgggctcccgcagccgctttattaaatggaataaataacaccgtgcaagacggcaaaacttcaccagacgggtctggggttctcccaactcaacactgttttcctgcaacgtctctgctagaatgaaaacatggtccagatgagaacagactggtgtctggtttagctaacgggtgggtggaagggaaccactctcagagcgatgctgcatcctcccgctggcgactaccccgagcccacctggcggtcaggtagcagatcctcacctgccccgagaggcgcc

SEQ ID NO: 2938 - DNA, 7539 bp, Homo sapiens
ggatggcagcagcagacacacagggtggttaagaacaacaaacacaggcaaaccacttcaatagaacatggctggcggccatatggacatatttgaatccaacaattaattcagcaaagaaagctgcttgtggcaagttttgaatgtgccattccaggtagtgctttgatgataaatgaggagaagattgcaaagaaaatgacagcaacatttataaaaggattcctcttaggactctagatgcacggagagtggccagattaatacagactggcaaaagaagaacttggcaaagtgatttgatcacacacttctcaccctcacatctcctgacagttcccctaatccctgccccacttccccgccatgggcttccatcaggaaactccttgatatcatcttcgagaagaaaactgaggcatagaacatttgggaatgaatctaagactacacatctagaatagcagagttacaggaatgcagatgtgattcctatggatgagggtaacctagaggctagaagaacaataggacagaagaagcctgggtccctgaacaaccttgtggagcatagacacctacgtggcctggactgccagctcacaatgggcctctctgtgagagaaggaaacttccctcttgtttaagcaactgtgcttttgagaatctcttggtctataccctaatgaataaggccatcataaatggatatcaaagtaaggaaatttgtgtaaatgatttaataaaacattacctcaggtatgaaataattctaccttgtgccttgacaacatcaggtattattcatgcccttttctctccctgtaatgtctcttatccacgggtagaaattatattttccatctaaggtttgctcaaatattatctacttaagtagctcttaccaattttgcctctcctcctgagctgaccctatgccttctatgctgttccaggtaatattaatctcttcctttgtacttctttcacagaacatacttttttgtctaacataataactataggcataagtgtatagattccactaggggcttcagaacagaaactatcatcttattaatttttttctccctgatatctagggaaatatgttatatataataggcccttagtaatcccataaatgtttgtgagatattcactgactataagccatactctgtatttatttagctaaaacagacgtctttcatatttagttagcagaaaatgctcacatttactcctttcctgtttaccaaatgaaagggtaattgttttttcacagattgcactagaaaagtgtcttctctctctttttcaaatagattgtctttaaaacatatgacaggaaaagtgactattgttaggataagataattacgattgtaacagctagtttaaaagaagtgtcagttgctcctgttttatttttcacaggatagagctgcggcctgtctcagtatgatgttttcaggatctggtatatatttttattttcctacatgaatctttcatccttttactgacatttattcattttatctaattatcctaaaaggaaagctctggccaggcaaattggttgttgtctgcctctgaagagacattcatatcgcgtcgcttagctttcaagttttgtgatcaggaaccctcaggcccatttttaaggaggtttcaggctagctgagcttcactgtctcccaaaatgtacaaaatgagattacatgagggacaagatcaatttactggaaggtacttaagcagtaaatctggagctttttgtccagtcactattgctttcaagctttgtagcagaaaattaagccacaagagctttgacaaattagatattactacctctaattgtgtatgtttaagcttatcacactgaattgcagcattgtaactgactattatgccaacaaggccttcgtttaatcagcgcagtgccatttaatcgcaattaatcactcaactaaaatgtcatattaaggtcacagaaacttgaagggctaaaagaaaagagaacattaaagtcagctgatggaggaaaagagcatggtgtgccaagggaagttctgagcactctttttcattagaagctggtagaacatttaatgagaattcagtcttaactttcagctgagatcagaacaacgtgcctcacttggttaagcaggagactattctgcccattcttagcgggcttctgtctgtaaataggatactcctgcccacagaatacctgaaattttacagattcatgatttttatttctattattctttggctttctggcattttcccctttcctattacttttaagaaggaaagaaatcagatatgatatggtactgaagacaagatgaaataaatagcatcattttgcacagtcacttacaaggtatttataaaaaggaacaattggattcacttgtttgccaggaagattttatttcccagaaaacttgtcaaatcgaatgttatagtgcaaaaagaaaatgactgaagcttttgttttttaaattttaatactcaagaagtactatgccagtctgaaagatctctgttagcccctcacaggacaaaacttgtgagaagtaatttcacccggaggaccgggactctgccacccatggctcattccttatgctttaaccctgcctagccctaagaaatattgttccactaactgattgactctgaaaacagagccatggtaaagggtatatagacaaagggcacacttaaggtctctctttgttaaggagtagtaggtaattttattttattttgttttattttattttattttatttatttatttatttattatactttaagttctagggtacatgtgcataacgtgcagttctgttacatatgtatacatgtgccatgttggtgtgctgcatccattgactttttcagcaacgtggatggaactggaggccattatgttaagtgaaataagccaagcccagagggacaaatattgcatgttcccactcatatgtgggagcaaaaacagtggatcttagaagacaaaaactagaatggtagttaccagaggccaggaagtgtagggggaaagaagacgaaggagaaaaaagaatataaatgtatttattaccatgaactgtacacttaaaatggtaaagatggtaaattgtatacatgcatctcctcagtaataaatagttttttaaaaaactgactctaatgaccactcttcaaacttgcaataaatagcacagacactggaaacaatgaccacctccaacaggaaaaatgaatttcagttttcatacccactgagcctatgaagcttggtgagcaagatgtctgtgtttgagcaaggctcgctcaaaccgtctcctgcagacctgtgtggaacggtgcagtccactagccacacgaggctactgagcacttgaaatgtgactagtataaattgacatgcactgcaaagatgaaatacacactaaatttcaaagactgactttaaaaaaagaatgtaaactcattaataattttttgttgattacatggtgaaataccaattttggagtatactgagttaaatgaaatatgttattaaaattaatttcatctgtttcttttcactcttttcaatgtggctactaggacgtttaaaattatgtgtatagctcatatcatatttctattggacagtgtttgtatagaccaatgagaagagtcacttacatcggtatcaccactgacctggaccagatgtgatccagtaacccagaggagaaacatttctgacctattctaatcctctaagccaaacaggctcttaatcaaagagctagtgtttttacaatatcaaatggaaaataaatataataacctcaatagtacacttgaaaaaatgaaggattaattttagaaagacaggaactggcattattcagattgaaggaaaaaacaacaaggcgaaatttaataaatatctcctggggacatatgagacaggttaagattgcagcatgaaggctggaggttaacttaaatgatttcttaagagtcagggttgtttaacacttgatacaggttgtgactcttcttttcctggagggcaatgataataaggcaaggcctcctctgaagtcctagataagcataagattggagaagccaatttaagatagctatgccatatcagcacttattcagatactttgagtgcctctgaaagttggtgatgagacgggactagattaccagccctttcaaacacactgagcctcagtcagagccatctttaatttctctccttaggtgttaataaaattcatcttaaaatttattactttatgatatctcaacattctcttacaaaatttgcacttaaaagcttatcaaaatcttatacctggaaattgaatggaagcaccttacaagctgaaacagtgtctttatttataacagtaaaaattacctttttattataacacacccttgtacgcatgtaactatatcatacatgttatataactaaatgtgtatgtgcactataggatatagtagccattcaaaaacatttgatgagtgaatatatgttcactcacaattgaaaaaaaaaccaaatgtccgcatttccacagctgaggtagagaaggcagctgaagtgtggcagaaagcccagcctctccagttctggtccagtgcatttatattgcaaaacgttgataagcaaatgctgcacatgggtataataaagtttggaaattttaccaatgagatgtagtgttagaacaattttatgccttggtaaattatcaataacttctctaaaaatatcgatgttttaaaatctcttgcaaggtaacttcctcagagagcatggctttatattagtaagtaaaggaatagtcactacataggtcagtatgagaaaaccaaatggaaccacaaatctctttctaaaaattctacctaaataaaagttcctgatcaagttaaaagcctagtttatagcacatgatgctttgtctgatctacatccaaggtaacttcttgagtggaagactttgggcttttttagacaaaggtttctggcctccatttttataaagcctagttaatttatatgctgaggtcttcggtggatcacaggtgtattttctctatatttataaccacacatcaatttttaaatggaaacatctgagctttcagtggctatgagccagtcttgagtgaggaagccatactcacacaaaacttggtataataaccaggtgtagccaaaataaggcacatccatatgcatgttgagtttctgccacataaggaatttataatagagtttatcacttatcagaatgtatttgggcttacactgactccattaccaaggaaaagcaattttaacgaggctttcctgtaaggaatctattgtttcttcttcctaaactatcaacttcacctgaaaatacttctaaaaatgagaaaaatagttaattttcagccattgagtctacctttggctggatgtattcctttaatttcagtgccaacgcataactatttggccttttataaaggttgcgtatttttcttctgagtagagttgccctcactatgtcagaaaacatgcatatgtactcttccaaatgaggggagggccttatagcctcactgatgatgagcccagagtgagtcactcaggatcttgatattgttttttgaaaacaacaacaacaaaaatactggtgtctgtatagaaaatgcctaattctttccaggtatcaataaattactttgctagtcagagtatcaatgttggatggtgttgtgaggtttacatccatgtctagaaaaccacatttatgctgcaagcaagctattataaaaagacgaaaaataatatatttttaaaggactttccaacaagttattggaactgttcctttaaatattaggaaagcactccaactagtatacctagtatactacctggtaaaaattaaaataactactacacgctttttttggaagatctgagtgatatttccaagtgtcctaaaaaacaattcttcttccccatctcaatccctaacctcttttgaaggaacagccattgtttgagccaggcaatttaattcttaggacttttatcaacatgacaggtctcagcctaaaccagggaacttttttttttccttttatttgttttcttttcaagatatagatgatatgcccctatccaatgtacagtttagtgagatggatgacacttcactcactggcagttcaaggaagtcttagcctagcttgtttacatgaacacgttttagaacagccatatagcttccagccagctctaccctgctgcccagcactaagggggaaagcaggcagtgagcccataggtcgctgataaactaactccccatttggcaagcagggaagggaatgataagggctctgatttatgttttatctgtcgctaagttttcagccagcctgaaatgacttggttctgttatcacctcagatgccacaggtttcttaagtgaggcagattctttggcgacttttaaaaagaactttatttcacctcttgcagaaggttagcttagcgatggatgctgctttaaaacactcccatctggcttcataaactgtgaggctataaaccagcttgtgggctctattccatggttagttcttgacatcacctgcatgtaactatgctacccttttggaaacacaaagctgggtgtgatgcatataatgacagggatgcttgaatcttttaaaaaaattacatacctaaaaatgtgttaatatgaaaattgcatacatcatcctacccaaacttatctaaaaagaaaactttctacaaattaattttctgtcaacatacgttgacttcagatagtaaaaagaaatgaagaagaaaaatctgtcttgagggagaaaaagagtgtcagtggatacaattagaaagcaaaaaaaaaaaaaaagcccctgttttctgtgatggatgctgcagggcagctctgggggtcagtgggagattagctgacataaaagcaagggagtgtatccttatctagtaaactaacacaagtcagtaaatgaaagccctcggtccccaacctatttcaagttgtttccccctaagtttaaattggcttgtcgttttacaaggatggatgggtattatttttaagcctttattttacaatggaagaatgtgagtgtttcacaagtgaaatgttcccatggagaagggaatagcaatgaatcataaacagtgtaaacactcccaagcttcttatatatgtaaggttatgtgctaatatcttctctcccagtagtgttttctttccaaacaccgtaagaagagaagtaggggccagggagaggcctttggagctatcttttgaaaacaatgggagtctatctcctctattctcaactgtgtaatctttttgttatctgacgtgaactcatagaaactgactatgtatttcccctcagtaatatccttctgtg

SEQ ID NO: 2939 - DNA, 981 bp, Homo sapiens
ctagagagctggcgcacctcctgggcctgacgcgggcttcctggattgcataaaggctccttctccttacatagccagggcaaaggtgcatgacaactctgagcaagtcaaaacaaccgtcagcagcgggaaacctcgatgaacaaacaccgggagagtgtttctgcagatcctgctttgtgacttcgagtgaagtgtggaagcgctggaagcacttagaccctgcctgtgccgcagacccctgggaggcaccaacaccccggatcgagaagcccgatgggaaagaatgtctgggaaggacgtcatgcccgaggcttgcgtgacagtttccactcacagtgcgctcactctgaacctctgtgcacacgatgggcctgcatctcttcccactatctgctaggaaacacgagggaggaggccatgagaaccgtcaagaagttcatggactcaggaggacgtcgtgagcagtgctgaggtcatggaatgtgggctgggaccttgtgtttggtgacatcctgtaagtactcggctcgctcaagctaactgcccggctgggatcaccgctctaggaggactcaagagttcagatgagtggcccaggggcccgtcagtgctgtgcacctctccccccatgggtgggggaggagcctggggacttggccagtcctggaggagccctgagaccaggccctgtggtgggcaccacggcacggggaggtgcctggagggctggagcccacttggggggccatggtcagtcagggctgcagaagcagagaaatgcgggatgcccatgctggctgggactcgcccactgccctgcacatggcgagtgagggagagaggcaaggcacctttccaggggtgcatgggaggctgcggtcaaaggtcctgcacacccgcatgcgtgctcacatctgtagctgcagacactgacccccagagacccccgagctcatgtggggctggtgtaggcgtggg

SEQ ID NO: 2940 - DNA, 8772 bp, Homo sapiens
gcaaagtaagttttactatgtgtgaatgcatgatgtagaaagggaaaaggaattttgagtaaaatcataatgtggagaaccttgctaagaagaatttaactgtattttcttcatttcctctaatcattttcaagaaaaggaaaagataaatattgtatctagtatcttcccttgttatttaggattctggcttccttttagattttaaaaaaaacctcataggcaaaataataaaaaataaaaatattgtatttattatatcattcaggattgcttccaagtacacacatgcacacacatacacaaggttgctgccaagtacacacaccacatgcacacacattacaaggtaaaatataaaaagcggtgaagaagtcagagtaaaagaaaaattagagtagaaaaaatatgacatgaccaaaagtgaaattaactgatgaaatgcactctgtaaagttttgtaaactggctagagggaggccatgggtttcatactaggcttgcattataatgaagtcagctagatttttaactattcggagtgattcttgcctcttgcatgcttgctatccctagagtttgagtttatactggaagcactaaaacaaatatcagtatctttccaatacaggacacaatctacagaatttctgttcatttggttgaaatcttcatggtgcttagttaaaactattctgcatccattagaaaagtgaggctgaaatgcatattcagatgatgatcatagtcagaatgggagacacaggggaccagctgagcatggctggctagagacaataccccatctgccgctctgctccagccagtctcaggagccctaggggagcctgggctggtgtggccagcgtttattcatcaatctctttatttctggggattactcaattgagcttctcagatctgcttcttttactggggaatgggtgtaataaaagtatatatgtaagtagatacatgagatgatgacaaacatcccaaacagaagaacaaactggtagctctgcataaaaaagagatgctagataaaaacagttttcaaggatgctcccttatttgacaaaattaccattgagactgctatgaagagcatgcgttcgtagacagcttttaagttttaaaatgctttcatttatggggattaccaaatttttccagttaagaatcacaaacagcagacaagaatgaatgattaatgctggagttcctggagtatgggccaaagaagttcccccaaaccttacaaacagaaacacatgcctctgccagtccccacatgggatcccagatgagaaacctctcaaggagaataacaaaatgcagttggaatcaaagtgtatgaagcctcccagacacacccagcaggagtcaccaggaagcagctgggaagaggctgacagcccaccagcaatgagaccacaggagctgctgctcccgggagggagtctgctgtcatcctccacttgctagagttctccctcctctctgcttgttacacactgcttccctgctctagagcttgctccagagatgacttcaacagaacagagtggctcttccttacttgaaacacagatccattgtacctgtggctttggctctggattgtctttctacttagaggagaacaagggtgtgactgagccacatgatggaaagtaaaggtacaaccaaaaattgtggcgtttcctcttgtttatgacattaaatttccctcagcctctaccctcatgctgcctgcttctctaaggctgctcccagggaacaagttaataatctcaaatacagtaatttttgcccctttcagaggtaagagtttaacaggggacaaaggacgaattttccatcatggcatttcaaacatcagtaaaatgttgattatttttcagcactcttgatattatatctgagtagctcttgtagaaattaatgcaagctgtgttttcactgcaatgtgcccttactgtattcacatgcagcgagaggttatgctgatggaacttggccatgatttgtgatattgtttatttacatgtattaatataaaataaaatgcaacgtgctaagtaacatttaagccctcattaacctgttcctgaactatttttccaactccattgatccctactccttgtgattcagccagtacctcaactgtttgtttctatgcttgttcaaggtttgtaatccttagtcctttgctcaaaatgagagtcagcctggcataagggaaaaagcactcaactcagacgagcctgagtgggaaacatgacttaaataagttagcaacttatgcaatatcatttatataactttgagcctttagcataatcatctgtaaaatgaagcttcccactgtgggatgttcttgaaaagggtgttataggatatggaagcactatgcacagatgaggctctcagtaaagttgttccatcatctctgagtacgcaaattttattcatcctttaagttgcagcccagatagcaccttttgcataaagtgtctactgattgcctccactgggatgcaatctttccctcttctcaactcctatctctctttgcctttatcaatcatatagtaagtgcgtctttttattttgtatcacagggtctcaaactgagactctgaatgtggcttgtgcagagtgcttcctgggattctgtgtgtatgggttactctgcatggagcctcctgttgccaaccaaaaaaggactaagcttggctcctttccaattctctgtacataattttgtattcatattatgttctttttcttgaagaaggccctgattttataggtgtcagtccccccaaatcctgattagcacctggggaggagggagatgagggtatggaactactggcatggtgtctgtccatatccgcagagctgaaggagttgtatggatgaaagacataatggtattggaaacaagtgtgctctttggggtctggataacaaagtatggcaaaagttgaggagttgagggaatatctgcaatccaaaagttgaggattagcaatgacagaaccacaatatccacaataccctggacatgcaattggcattctcttcatggatgctaacatcagtagcaacttctcatcaagtcaaatgcctcctcttcagagagtcttgctcactttttgtaacccctttcaccaacctctgtgtcatctaccctatttgtcacttttttttaagaggcaggatcttgctcttgctctatcacccaggctggagtgcagtggtgcaattataactcactgtagcctcaacttctgggcttaagtagtactctcacctccaccttctgagtagctaagactacaggcatgtatcactatgcctgctcccttatttgtcactatctgaaatcatctgatttgcctttccttaacccttcccccaaccacatatacacaaagtgccaagagtcaggggcttttcccaaagtgtttattacttacctctagaagaaaggggtgcctgtcttacaggaagtactcatgaagtatctgaggggtgagtaaatgtgaagactgttcaaggggctttataagaagaagacgaaaataaaggaagccaatatagaagaagaaaggcaggatcaatacctcatagtaacatgagctgacaacctggtttgtgaacatatggaaagcactccttaggatctcccagaaatgtttgatggggatgcttcctgtgtgcagttcctattagagcaggtgggatatttcagtcctcattggctagggagacctgggggcaattaggttatatgcatacttgagtttttttcatggatcttatcttctctattaaactcttaggagaaggtaggacaatcctcaaattgcccaaaggacctaatatatggtcttgcaaaagtgtctgttgataatataagtgtccatcaacagttgactggataaataaattgtgatgtgtatatatatatatatatatgtgtgtgtgtgtgtatatatatatatatgtatacacaccatggaatactatgcatccataaaaagcatgaaatcatgtcctttatagcaacatggatggagctggaggacattatcctaagtgaactaattcagaaacagtaaaccaaataccatatgttctcacttacaagtgggagctaagcaatgggtatacatggacataaaaataagataaatgacactggggactccagaagaagaaagggcaggaagggctaagggttgaaaaattacctattgagtacagtgttcgctaatgagtacactagaaacccaatccccaccagtatgcaatatacccatgtaataaagatgcacgtgtaccctctgaatctaaaacaaaataatttttaaaagtatgttgaaataaagaatgaatgaatcagagtagaagagaatatcttgttccatataaacagtctgtgttagaaaaagcaatataataaaccagaagtgttcagttgtgaaaagggttgaaatttttcaacataaatacgttacataaaagatttctattagaaactccttagaaggcatctattagaaggtagtgtcccttggctgtaaagtctaaaactctcctttgccacaaaatgacattgtacacaaatgtaaataagtataactggttacttagcaaccacaaatatttacaaatatggaagtcaggctccatcaaaatgtcagggtaattattggcaaattgtatatcatgcaaatgttttgcagccatgcaaaatgaacattcttgtagggtgctgccacaattgctcttcactgctgcctagaagtgtcacttagtctcttgggttttgttatgttgaattaatgggacataaaattattttacagaacaagtggatatgtaatttaccatatgcttttccacaggggtcttccacttagttgtcatggggtttaacctagttaaaatgctgcagaattcagcattatttactagatcatcttcctcaaaaaagtcaatatttttttttctaaaaaagacagggagactagaaattttgtggtttaaattttttttcaaaatttattcttttatgaattatatttgtagaaggaatcttttattacttacatttaacagtcttcagaactagtttcaaagattctcttaaggtatgcatgtgcttttttaaaaaaagaaagagagatggagagcaggaaagaacaaggaaggacagggaggggtagagaaagactgaagggaagaaggaaggaaggatggtgggagggagggaaagaaggaaggaagggagggagggaaagaaaatgaaagaaaaagaaaatgaaggaaggaagagaaaatgaaagaaaaagaaagaaagaaaaagggaaggaagtaaggaaagaaggaaagaaggaaggaaggaaagaaggaaagaaggaaagaaaagaaagaaagaaggaaagaaaagagagaaggttgagcagatgggcatgatgtgtaagagctgatggaaaaattaatactaaattaatactaaactacatgtcctttattttgtaaatctgaatgatgccaaaatggataagcagaataactgcatgatgtgccaattaatacttgaactacagacagagggattaactgagtttcttacccaactgattggggtgtcggcggtgggggggggacctcaaataacattataattacacttaaacacaattttacactccctatatgttataaaaattaatttcatctcaagaagatctcaaaaataagatgtattctaattctcctgtggtcttacatctcctctacgatagagcttacagttggagccaatttatttagcctttctcagtatttcaaattcgtgtagagaagaagctttttctgccaagattcacaccaaagcaacttgatagtcttgtccaagaaggatcaaatgtgaaactagacaacaatgaaaattgtgcaatgtgcccgtctctctgcagccagtcaagtgcaaagaaatctgggtcattgttcttgggaggcttttcaaatggtcagagaaaacagttgagcacagggcttctggcctgcagtgttgcctcactatttgttttctcctctaaaactctagggggagaatgaaaaggcaaacacagccatcccacccctccttttcaaatggggttgtcatgccagatattctgagtaacttattcagcccaaggctaataagctgaacaacttgttttggctagacattcctcatctccatatggaactgcttgtgtgagtttggggactattatgtggtcaaagggaggatgttaaaccaagaaaacaaaaaatcccagcactttccttttctctcttataaatccactttcaaggctgaagtaaagtgcacggattgcccaaatccttaggcggaagacatcacagactatcacataagcaccatctttaataggtttgaagacatgcctcttacattgggctaaatttaccgataaatccaccatatctaaccttgcctactttgaacctagccttggggacttctttagaaagaaggcatattttcactgaaccaaagtaaatcttaattacatatttgcttaccatggagagcctttttgcttctgaatgggaatctgtaaccgataaaaggtagaaagtgggttgatttggtatgtttttacagaaatctatcagaagttgtatttgaaaaggggaaaaaaagatattctcaaagttttagataattgtgaagttagtagagttggttatttagtgttctttatgtagcatttcaggggaatgacttagaatattctctgatgctttcttaaaacaccaggtagggtcctacctcagcagactgattcagtagttcttagatgagtctcagtttcctcgtgacttttaaaggttcatagattattttaaaaattactcccaagtccaaagagttgagggtaattattccttaaaatttatttatagttttccattaaggaattattccagggaagtcaactggttttccaggctctgcagtgaggtggtaggcttcagtgagaggtgctgttaattcattcacttcttcatttatttagtcgttcattcagaaaacatgcactgaacagtttttatctgctaatcaatgagttatagtgctgaggatataaataggcatgactactataatcatagcaccataaagtctattcccactgtgtggctgctatgacaagtcagactgagtaactgcccatgatgccaacttcctagagagatttgacagtcaaaggccagtgctatacatttcatcttccatctcaaaggttaggaaaagtacacatgactgcataattatggggtaagtgcccaaatatttctgttttgtgctttgcttttcaaattatgtttatgtgaaatataacctacatacagaaaagacacaataatatttgtgctaaataattttcaagcaaacacccattaactccacttaggttgatatagaatgttacaagctccataaaaaaacccttcaccaaagtgtccctttaaatcaaaacccctttcttcctcagaagtagccactcttctgacttctgaactttatttgaatacagttatactgtatggtttctttggcatcttgacactcgcacttaacattgtatttttaagattaatccatgctgtcgcatgtagttctagtttgcttattttcattgctatataatattccattgtatgaacttgctgcaatttatctagccattctcttgatgggcatttggggtgcttctagcttttggctactacaaatgttgctgcttacagtggaattgttggactatagggcatgtttacagtcaactttcacacatactgccaaacgatatttcatactggataaatcaaatttacactctgatgagcagcttgagaattcctattgcttcacatgcttgccaacattaatgttgttgaagtttagaactcttaaccaatctgaagactgcaagttgttctcctatagcacctttctgaggttgtttagctttgtcattcatatgtaactatttattccattgggaatgtatttttgactatgatgcaagagcgagcctaattctgtttttgtttgtttgtttgtgtgtgtgtgtgttttttctttgagacggagtcttgctctctctcccagtctggagtgcagtggcgccatctcagcttactgcaagctccgcctcccgggttctcgccattctgcctcagcctcccgagtaactgggagtacaggcgcccgccaccatgcccggctcattttttgtattttttagtagagacagggcttcaccgtgttagccaggatggtcttgatctcctgacctcatgatccacccgcctgggcctcccaaagtgctaggattacaggcgtgagccactgtgcccagccctgttttttatacagatgctcaatttccggtttttccattgattgaaaggcctttatttctccactgatatactgtgtcacatctgtcatacagcaagtgtcaatactcccacatacacatttcttcatttcgcctctctttttctatctctatgtcaattcacgctgtcttggttagaatagctttaagtctggtatctagaatttcagagctgctaccttgttttccttcttcaacaacatcttagctactcttattactttatatttccatacatatttcagaattagctgtcaag

SEQ ID NO: 2941 - DNA, 3518 bp, Homo sapiens
tatgcccagcctgaagtttttattttaaagcaaacttctcatggaagtctaacacacaggagattgcacaagttgtaactgtatgcttggagaatgttcacaaaatccatacctttgtgtatccagaaccccgaccaagaacagatgccgggcccccagtcgctgccccatcaaggttcaggacaaagaggtgtgggcaggccactgggccagctggtaacatcatggcagagaaagtgaacaacttcccaccattgcccaaattcatcccgctgaagccatgtttctaccaagacttcgaggcagatattcctccccagcatgtcagcatgaccaagcgcctctactacctctggatgttgaacagcgtcacgctggccgtgaacctggtgggctgtctcgcgtggctgatcggaggcgggggagccaccaactttggcctcgcctttctctggctcatcctcttcacaccctgctcctacgtctgctggtttcggcccatttacaaggccttcaaggcttgggggccttgaaggcagggaagccctggccctctgcccaggtgacgggagccacctcctctgccgcaggactgacagctccttcagtttcatggcattcttctttaccttcatggctcagttggtcatcagcatcatccaggccgtgggcatcccaggctggggcgtctgcggctggattgctaccatctccttcttcggaacgaacattggctcggcggtggtgatgctaattcccactgtcatgttcacagtgatggccgtcttttccttcatcgccctcagcatggttcataaattttaccggggaagtggggggagtttcagcaaagctcaggaggagtggaccacaggggcctggaagaatccacatgtgcagcaggcagcccagaacgcagccatgggggcagcccagggtgccatgaatcagcctcagactcagtattccgccacccccaattacacgtactccaatgagatgtgaaccagccacgcctaccaggtggcagagctggggccattgggacagggggctcaagccacatcgtcatttgtggttaccaagcagggttcccccttcccttttctccttccctactttgtacaaaggaccagagttatatatatatatatatgtatatgtctgtaccccagcccccacctttcagattctgctcttggcactcagctgtgggctgcacgtggagctgtcccgtgcggtagtagctgtgtctgtgtcccctcgtgaaatagtgtgcagtggaggtctcttgtggtgctagatgtgtgtttagagctaaaccagcccccacccccaccctccacctgcccctcttgcctctggcccctctgaccctggcccagggacccctcacggggccaggggaggcatagcagaaagactggccccttcctagggttatgagctggaactgtttctactttcagtcttcctgggaagtaacagtacttagcactcttggtggtgggtgggagggtgggtacaggccagggatattcccttgctcttttgatccctccaggcctcgcctccttcagcctcctcctccctcatctgttccctgatgtcacattccctgtgcaatcttcccttgcccatggtctgtctatctctttcctatgtggcttttctttgtcttccccaaggctgagtgtcccagttttatctgctcctgagactgagcccagatccccaaatctaatctgatttacagttcaaggaagctgatggggagctgggccttacccctgatgtaggaggggcacacagctgggggtgcagagcccacctgggtacctgacccccaggggatgaaaatgcaaggatgagtctgcttgggcctgagagtttgatctgcaggggcaggctcatcttttctctcccctgccttctcctccttctctccccagagcccccttgagcccctctgcctatgtccctctgcctcctccccatgcccccagttgctgtggcttgattctgctaccctgaccccaccatgtgccaggtggcatctgccttactgccttccctgaggagctgggacatgctgggcagttgtcagatgtaaaggcacagctggagcagagggcatgtcagtaatgattggtccctggggaaggtctggctggctccagcacagtgaggcatttaggtatctctcggtgaccgttggattcctggaagcagtagctgttctgtttggatctggtaggacagggctcagagggctaggcacggagggaaggtcagaggagaaggcaggcagggcccagtgagaggggagcatgccttcccccaccctggcttgctcttggtcacagggcggttctgggcacttgaactcagggcccaagcagaagcacaggcccagtcctggctgcaagcacaatagcctgaatgggatttcaggttaggcagggtgggaggggaggctctctggctttagttttgttttgttttccaaatcaaggtaacttgctcccttctgcctacaggccttggtcttggcttgtcctcacccagtcggaactccctaccactttcaggagagtggttttaggcccgtggggctgttctgttccaagcagtgtgagaacatggctggtagaggctctagctgtgtgcggggcctgaaggggagtgggttctcgcccaaagagcatctgcccatttcccaccttcccttctcccaccagaagcttgcctgagctgtttggacaaaaatccaaaccccacttggctactctggcctggcttcagcttggaacccaatacctaggcttacaggccatcctgagccaggggcctctggaaattctcttcctgatggtcctttaggtttgggcacaaaatataattgcctctcccctctcccattttctctcttgggagcaatggtcacagtccctggtacctgaaaaggtacctaggtctaggcccttcttccctttcccttcctctcccctaccccagaactttggctccctttcccttctctctctggtagctccaggaggcctgtgatccagctccctgcctagcatccatgacctgttggatgttacctccaatcagtttcctgtcctacctgcctctttggcttggacctatatggccatgctctggctctacccttgggaagcctgatcccggtgtgtggcccagcttgttcaggccctgggatgctgcatctccaggcaactatgcactttcccggggagagaaccagtatgagaagtgggggcagggcacacattcatctttgtaggaaggtctggcctggggtcgggtgaaggagggcccaggtcagttctggggtcccagtgacctgctttgccattctcctggtgccgctgctgctccctgtttctggagctggatgttccccagctggcagttgagctgcctgagccaatgtgtctgtctttggtaactgagtgaaccataataaaggggaacatttggccctgtgt

SEQ ID NO: 2942 - DNA, 598 bp, Homo sapiens
ggcagccttaaattcttaataagaaagaagagtggggcagtttgaggattattcaactggatcctaaatgagcttcctgtattaccatttaagactgccaaaaccgagggaggagccaagagggccgaataggaacagctccgtctacagcaaccagcgtgagcgacgcagaagacagtggcacaggtagcacttggctttattgacacactgctgaagaggacacaacttcctgaagaaaaagagaggctaaagagagtttgtagataaatactgcttttcaatctgaataaaattgcatgaagacttggaacatacatacttaaaggaaggctggaatgcagtggcacagtcatagcctcaaactcctgagcttcagaaatcatccccactcagcctcatgaatagctggaactgcaggagatacaaaggcttacaatggattaacaagattatacaaatgcatctaggatatacagctcatccaaggtgaagtcctatttctagtgtgtaaactagaaatagaatgttaataaattggaattttgtcctgtggccatgtgttctaaggtagaataactatcagttttaaaataac

SEQ ID NO: 2943 - DNA, 1308 bp, Homo sapiens
gagagcagccccagaggccatggaaagaagtagctttgaacaggaggttccagtggcctcccagtcaagcgagggggtggatccctgccccaccaccagcaccgcaagccccaaagatggcccacacagggaccaccccctgggcggcgttcaccccatggagttgggccccacagccactggacagccctggcccctggaccctgagaactctcatgagcccagcagccaccctgagaagcctctgccagcagtctcgcctgacccccaagatcaagtccagatgccaagatcctgcctctggtgagaggtagctcctaaaatgaacagatttaaagacaggtggccactgacagccactccaggaacttgaactgcaggggcagagccagtgaatcaccggacctccagcacctgcaggcagcttggaagtttcttccccgagtggagcttcgacccacccactccaggaacccagagccacattagaagttcctgagggctggagaacactgctgggcacactctccagctcaataaaccatcagtcccagaagcaaaggtcacacagcccctgacctccctcaccagtggaggctgggtagtgctggccatcccaaaagggctctgtcctgggagtctggtgtgtctcctacatgcaatttccacggacccagctctgtggagggcatgactgctggccagaagctagtggtcctggggccctatggttcgactgagtccacactcccctggagcctggctggcctctgcaaacaaacataattttggggaccttccttcctgtttcttcccaccctgtcttctcccctaggtggttcctgagcccccacccccaatcccagtgctacacctgaggttctggagctcagaatctgacagcctctcccccattctgtgtgtgtcggggggacagagggaaccatttaagaaaagataccaaagtagaagtcaaaagaaagacatgttggctataggcgtggtggctcatgcctataatcccagcactttgggaagccggggtaggaggatcaccagaggccagcaggtccacaccagcctgggcaacacagcaagacaccgcatctacagaaaaattttaaaattagctgggcgtggtggtgtgtacctgtaggcctagctgctcaggaggctgaagcaggaggatcacttgagcctgagttcaacactgcagtgagctatggtggcaccactgcactccagcctgggtgacagagcaagaccctgtctctaaaataaattttaaaaagacatattacacttgga

SEQ ID NO: 2944 - DNA, 6534 bp, Homo sapiens
agagactggagaggtgggagaggggtagctatgaaaggaaaatgtgtggaggtgacatggtctgtaggttgggccaggccagaagagaaggtcaaagagaaatgagtgttccagtcaggcttgatgtcttagggaagatcctggggcccagcccactgccccctcctctccgtctctcctgctcccggggctgagggaatggaaggagctgtgccactgtgaggaggaggacctgcatctgtgaggggcctgctgggaccagctgctggggagtacagctttctctcagtagctgaagggggctgcctcttttccaaggggcagctgccacgccaccgcaggaaaatctggcttgccattttggatacctggattttcccacagtgtgagggggctgggggtgtggcccaggaaggtgcacctgaggtgggagaagaaagaagaagactggatgggagtcagctgaattgggggccgcagaggctggggtgagagggagggaaggaggtgtcaaagctcagcctcccaaagctgagcgagaagagcatgacgggagggtgtttcccacctcctcgcccactccagcgcagggtcctgtctccgtccaaacgctgcaagcctttccacattcctgcactaccttcctgcgctgcctttggagatctgagagtcttcaggcatgaactctgggaagtgatggatgatgcacacacaaaagacccacacctatgagtctactcagatgaagacacaaccccacccaccccagttttgcagggaagtaaagcaatacaataattcatgtggagtaggagtggcggccacttcctgctggctgtggtggccagttgtttgcaacagtctgtgcactggctgtctcctcacccttccttcccactcaggaatgcctattgcaatgcaaggaaatcagaatgacattattaaggatgtagacttgaattgtttctaatttatttatttattttgagacagggtctcactctgctgcccgggctggaatgcaatggtgtgatctcgactcactgcaacctctgcctcctgggctcaagcaaccctcctgcctcagcctcccaagtagctgggactgcagccgtgtgccaccaccacacccagctaatttttgtctttttgtagagacagggtctcaccatgttgaccaggctggtctcaaacccctgagcttaagtgatccacctgcctcagcctcctgaagtcctgggattacaggtgtgagccaccgtgcccagctctaatttatttttaaaaggtgaattgctccagaagtgttttgaacattcttagcaacagcaattctctttcttcacctttacacctgactggggtaggcctggttgtcatgacatcactgtggaaagcaaccacctgggggactgcttggtgatcagtcaagccttcagctgaccagctttcccttctatggtctggagcaccacagggcagggacaggagagcaccaattcttcaatgtgaacagaactctccgacatcatcagaagggatgtctgccggttttgcctccccaagcatcctttctgcctttttctgctcgcagcatcttgcttcccttctgggagtgcctactgcctgttccattgcactaatgtctgccctctccaaagcttaggcatgtgacccaatcagactagagtgtctttcctgagaacccagggttgtggccccggcaacaagatagatagcagttaggtcagagtgctcttgacccatgaattcttactactctgaattttgagcagggtttacataaataataaattagagcaagctcaaagttagccctaaaatactgtcactttctcttgattttaatatactttcttgaagaggtgagagaaagcttgcactatccctaataggtaggaaattgtatgtcacctgcatgatagctgtggcctggggtcctgtccttccaaagcatggctgtccaaatcttccagtttaggaatctaaactggaaaatgtagccactgcgcagcactgccttcataccatccagaaaccagatatttcctttttccttaaagtgccccaggaatagagttactagatttaataaatacaaatacaggatacccggttacattcgaattttagataaacataaatgaatactttttttagtgtaattatgtcccatgcaatatttgggcatcctgtattatgtctggcaaccctactcagggaagaaaatgatgtttcgtctcttggggttgacttacaaacactcaccctcctttacccgattctgctgtcccttctcccccacaagcaaatggcttctgtaagagtggccgtattattcgccagatggttcgaccaagggttacatctgacaaaagatggaccaaccagtgcagcttcctaagaatttttcaaacagtaagaaagaattaagtgctttcaggtgttggagtttgagacattaagctcagggactggtggcagccttgatttccaacacatggacaggactggcctctattgagagagaatgaggtagacgcgcaggcggaagcagagagtgctgacagtgttcaaatattaaattccagttgttcttgaggggctccttgcctttgccatgtttcttttttcttttctttttttttttgagacagagtctcactctgtctcccacgctagagtgcagtggtgcgatctcggcttgctgcaacctccgcctccctggttcaagcaattctcctgcctcagcctcccaagtagctgggattacaggtgcataccactatgcctggctaatttttgtatttttagcagagatggggtttcaccatgttggtcaagttggtcttgaactcctgacctcaggtgatccaccctcctcggcctcccaaagtgctgggattacaggtgtcagccaccaagcccggcctgccttgttttcataaactaaaaataaaatcctaagccccccaaccaactaaatggaccccctcttgcccaggtgaccccagagaaacctgaaaaactgagttcttggccatgaggggagggaggttggacacacctcattataccctctcccttttggagtttaggcacaactggccagcattaatgctaaaacagagatcataagactaataaaatggactcttcgtgacaataagataccgaattataaacaggacctaaggccatgccagacaaggggtaattcacacactcctacaggttgctgcagcccagtgtattggttaatagaattccttatcttaaaacattcctttctgctgactccagatttttaaacagagctttactcctttagccaatggcaaattaaagaatctctgaatccacctataacctgtaagctcccccacttcaagatatccgcctttgcaggctgaaccaatgtatacattccatgtattgatttatgactttgcctgcaagtcctgcctccctaaaatgtataaaaccaaactgtaggccgggcgtggtggctcacacctataatcccagcactttgggaggccgaggcgagcagatcacgaggtcaagggatcgagaccatcctggccaacatggtgaaaccccatctctactaaaaatacaaaaaaaaaattagccgggtgtggtggcatgtgcctgtgatcccagctacttgggaggctgagggaggagaaccacttgaactcgggaagtggagcgagctgagattgctccactgcactgcacttcagcctggcagcagagcgagactccgtctcaaaaaaaaaaaaaaacaaaaaaaacctgtaatccccaactgcttcccgtgcactatcttggacctcttgagactgtgttcctgggccatgttcattcatattggctcagaataaacctctttaaaatatttagagcctggtttttggattaacattttgattatttatgcttttttagtttacatgaactactaagttctttttgcccaagggttgaaaccaaatacaagtcgcaacactttatcatattggagtcagctgttaagtttctgttcccaagatgtgaggaggagcagtgtcttactcatcttggtctcctcagcatctaacccagcaactggcatagagtaggacctcaatcatgttttcaaaaaattaataaatgactccctgggcatggagatgagcaatgtagtgcacatttgactgatctgatttcttcttttttaaatcatgaatgtatttctttttaattattttcgtagagacaaggacttgctatgttgcccagggtggtcttgaactcctggtctcaagtgatcctcccaccttggcctcccaaagtgtggggattacagacgtgagccaccatgcccagccatgatttgatttcttgacagaaactcaccaaacatcaggaatcttttccaccagctcactggaaaatcctgaaacttagagaatctctcactccacagctggccggaatggaaggcaaggttgtggttgggttactggtttttgcccaggtaggaaagtaagggagcctttatgataaggatcatggtcgctgaaacaaccatggttgcttcaaaagtagcctccttgcattatgcagtttttttaaaaaaaactttatttttagttatttcttagagacaggatctcactctgttgctcaggctggagtgtagtggcatgactatatctcactgcctccttgaactcctgggctcaagtgatactcctgcctcagcctcccaagtagtcgggaccacaggcacacaccaccatgcccagctcattttcaagttttttgtagagacagggttctgctatgttacctaggctagtcttgaactcctaggctcaagggattcctctgccttagctttccaaagtgctggaattacaggtgtgaaccattgcacgtggcctgtgcagttgttttgatttcctttctaaacagatgagaatgaaatatgagcaaatcctgttgggtccttctaaagaggctctgggaagatggcactggctctgtttgtctatgcccaggacagctcctggagagcagtggggaagcacaggaaagggtccctgcaaggcatgctcaaggtggtgctgtcaagaacagtggaacttggctgggtgcaatggctcacgcctgtaatcccagcactttgggaggccgaggtgggtggatctcctgaggtcaggagttcgagaccagcctggccaacatggtgaaaccccatctctactaaaaataaaaatacaaaaattagctgggcatgatggtgggcgcctgtaatcccagctacctgggaagccgaggcagaagaatcacttgaacccgggaggtggaggttgcagtgagctgagatagcgccactgcactccagcctgggcaacaagagtgaaactctgtctcaaaaaacaaaacaaaacaaaaacaaattccagcatgtcctgcctggcctttgtcctgtcatccccattaccctgactcagtattctcaaaagcctggaatatagttgccttctagtctcaggttacaccagagcggggcacctggatgcatagcactcctccaccccacccccaccccatagactttcaggaaagaggagtcagctttcagcaggactgccaacctgtctggaaggagggaggacagcaagctctgtagcatccctagagagtggttgcccagtctcccaaactgcagggagacagctctctctctctctctttgccagaggaagaatgaacttctgtcaccctctgcactcaaggaactccatcacctctaaattatttgtgtcaaccactgaagtccaaggagaatttcagagctgggagaatttgtttgtattttcacaatttataatgctctttttgtcagaccaatttgccaatacaaaaggatggcctaacataccattatggagagaggaaacacaacaagcaaactaaagcttttgcaacatcaaagtgaatattatctttggcaaaatgtaagagagatgtggggaaataaaggctgctgggaaggttctgttactaaggggtttgtcagctgatccccgaggccccttttggctctgaagttctggagaattagattctttcctacatttattctgctttctctgtccttttatcgcatgtgtttatttcaccagctttgtttcttctatgctcatcacatttgcatgctgatttttctaacaatgataaggaaagtctctctctgaacggaaattttgatagcacaatgggtggacaggacagttgtgatttgtagaaatgtttcctcacagctatcttacctgcatgaatattcttgctgggacttcctagggagtgtgtcttcttgtcttctgttccttgaataataacctgatcatttactgacatgttgacctaaaaataaattccatatcacttctctctctcattaatgatgtgtcaactgttatgctacgagatgcaaatatgttatctcatttaaaa

SEQ ID NO: 2945 - DNA, 4051 bp, Homo sapiens
aggcagggttttgctctgtcactcaggtgggagggcaagtggtgcaatcatggctcattgcagcctcaacctcctgggctcaagggatctgcccgcctcattttctgagtttttgtagagacaggatctcaccatgttgttcaggccggtctcgaactcctgggcttaagcaatccctccactttggcctcccaaagtgctgggattacaggcatgagcgacagcttccagcttttctgaggcattttaaagcaagttcccacaaaacctctctcacccaaggcttcagcctgcttctctggaaaataagaccctttcttatatcaatacaataccattatcaaacccaacaacatggcatttaacagccagtttttgaagatttcctcgtactcagtccattttcaaatttccccacaattttctgaacaggctctccacccctccgaccccaggcctgttcttggggccaactagttttaaccatttctgtttttagtgcgtctggtgggtacctttacatctctaaataatcagcttgctttttttttttttttttttgagacagagtttcactcttgttgcccaggctggagtgcaacggcgggatccctgctcatcgaaacctccgcctcttgggttcaagcgattctcctgcctcagcctcttgagcatctgggattacaggcatgtgccaccaggcccggctaattttgtatatttagcagagacagggtttctccatgttggtcaggctggtctctaactcccatcctcaggtgatccgcccgcctcggcctcccaaagtgctggagtacaggtgtgagccacggtgcctagctggctcccgcctttgtaagatgaaggcatctgtctgaatcaggatcagggcgagtgtattgttaacacctctacccatgagtagcagagtgggcccagagtcacctgtgctgcatctgaagatggtccagcactttcccaacacacgcctcgacataaactcgttaaacatttgcccactgactgaagagaatgccatttgtgtctctgctccttgcttctcagccaccctggggaaaccctttcttctgagcctgagctaccctggaggtcacagtcccacagtcaccatggcaactcccttcagggtatgagggagggagctgaggaaaagagtcagaaacttaccaggaggccccaggagaaagccactttcacagagaaaaatttcaaagtctcagtgattgggttggtatatggggcactgccttgtatgggatgtgtcatttctggaaagttaccctatgtcattctttggggtaaaattttgtgatgttactttaaacatacgctagagttccctacattgggagccttgttgtgaattcttttgcaaagtgaataaaaaccctcattattctttgaatgcaagcatagatattcagatgtcaagtggttttacagttcagcacagcagtgcttttggatttggaaggtgttgggtagtaagagtgtgagtggggcctgggaaggaatctactttgagtgatgctttggacgttatctggatgctgtcttaaggttagttgctaccaaaagaaaagcctgggctgaggagtctggtgtaggtgatttataaaggaactgctctcaggagaaatctgtaggatgggagaaacaggatagggaaaggaaagaatccaggcaaagattggatatcaggtcccagactcagcctgatcccatgaggagttctggggtgaattacaccccagcatttaccaccttgaatcaaaggagctgggctttatactctcaaattagtcagttattgcttataggtttcccaggataaagtgtaaaattttcagagggaagcagctttggtgcccccagtcagtcttctgaaagtcatcagtgcaagctgttagcaacaaaaaacacagaggtggagagtgggcatgtggagctggtgatagggatttcaggggatctaggagggcttcaatagagtctactataggtgccaaatatggtacataaatgactttccaaggtctctaccttaacaacaaaaaatcagtgaaattacttagcttcccacaacacagtattcagaaccatgttttagaagaaagataacagtgtacgtaggcagatacagaattggttgagagaatatttctgaagaatatggaaggaatggctgttgattgggtagatagctctagaagttgaacacaggactccacctggggcttgtattgtgaaatatttatatctacatcttagagcagatggagagctcttgccaagtatatctgtggattctcctaaactgagaggaaaggtaatggaacaaatgacaaaagagttgaaaggaagattccaattaatgaataactgtaagattaacattaaagaaataaatgtaaatgtaatgtgaagttaatttcattatgatcatccacataatggaatattatatagccactgtattagtctgttcttgcactgctataaagaaatacctgagactgggtaatttatagagaaaagaggtttaattggctcacagctctgcaggctatatagaaggcatggcagcatctgcttagcttctggggaggcctcaggaaacttacaatcatggcagaaggtgaagggggagctggcatttcacattgctggagcaggaggaaaagagagagtaaggaggtactacacacttgtaaacaaccagatctcatgagaaatcactatcaccattcggtccttctaggcctcagggcctgtgatgggtggggcttccaggaaggcctctgaaatgccttccagtccttttccccattgtcttggctgttcacagttgactccttctttttacttttgcaaatttctgcagcctgcttgaattcctcccctgaaaatggaattttcttttctaccacatggccaggttgcagatttttcaaacttttatgctctgcttttctttttaaatataagttcccgttttaggttatttctttgttcatgcatatgagcataggctgttggaggcagccaggtcacctcttccacatcttgaatgctttgctgcttaggcatggtaaatcatcactctcaagttcaaagttccatggattcctaaagcaggggcgcaatgtagctaggctttttgctaaagcatggcaaaagtaacctttactccagttcccaataagttcctcatttccatctgagacctccttagcctggacttcattttccatatcactatcagcattttggtcaaagccactcaacaaatctctaggaagttccaaactttcccttatcttccttcttttctgccccttgcactcttcaaacctctgcctgttgcccagttccaaagctgcttccacattttcagatatttttatagcaatgccccactcctcagtaccaactttctatattagtccattcttgcactgctgtaaagaaatacctgagactagataatatatagagaaaagaggtttaattgtctcatggttctgcaggctgtacagaaaacatagtggcttctgcttctggggaggcctcaggaagcttcctatcatggcagaaggtaaagagggagggaggcacttcacattgccagagcagggggaagagataggtagagagagagggagagaaggtgctacacacttttatactagcagatctcatcagaactcattatcgtgatgacaacaccaagggggatggtgctaaaccattcatgagaaactgtctctgtgatccaatcacctcacaccaggccccacctccggcgttggggattacatttcaatgtgagatttgggctgggacacagatccaaaccatatcagctgctaaaaataatgtcaaagaataatgacatggaaaaatgttcataattatttggttataaaaggccatcgcaatatgcatggaaaacattttcaaagacatattctaaaatggtgtgattctataagtggaatataattcatttttgctctctcgttttgct

SEQ ID NO: 2946 - DNA, 1653 bp, Homo sapiens
tgggaaaactgcccaggagccaggtctctcttctcgcctgcaggcatacgaggagcggcagcggcactggcagcgagagcgtgaggccctgcgagaggactgtgcggcccaggcacagcgggcacagcgggcccaacagctgctgcagctgcaggtgttccagctgcagcaggagaagcggcaattgcaggacgacttcgcacagctgctgcaggagcgcgaacagctggagcggcgctgcgccaccttggagcgggagcagcgggagctcgggccgaggcttgaggagaccaagtgggaggtgtgccagaaatcaggcgagatctccctgctgaagcagcagctgaaagagtctcaggcagagctggtgcagaagggcagcgagctggtggctctgcgggtggcgctgcgggaggcccgtgctacgctgcgggtcagtgagggccgtgcgcggggtctacaggaggccgcccgagctcgggagctggagctggaagcctgttcccaggagctgcagcgacaccgccaggaagctgagcagctgcgggagaaagctgggcagttggatgctgaggcggccggactccgggagccccctgtgccacctgccaccgctgacccattcctcctggcagagagtgatgaggccaaagtgcagcgggcagcagccggggttgggggcagcttgcgggcccaggtggagcgattgcgggtggagctgcagcgggagcggcggcggggtgaggagcagcgggacagctttgagggggagcggctggcctggcaggcagagaaggagcaggtgatccgctaccagaagcagctgcagcacaactacatccagatgtaccggcgcaaccggcagctagagcaggagctgcagcagctcagcctggagctggaggcccgggagctcgctgacctgggcctggccgagcaggccccctgcatctgcctggaggagatcactgctactgagatctagggccctcagcaaccagctctgtagggagctctgccagaggggcagcagctgcagatccacttaggccccagggtccacggatggccccaaaggctgagggccccaaagccacttgtctcctaggatccaggcctctgggcttctgccaagaactcagggtggccctatgacttggaggagcaagatcagaccgctcaaaggtccccgtgttcactgttacccagaggctcttgttactacccacttcattccccaccgctgccagtgccactgccaaccctgttcacaggcgcttccagcccactccagccaggggagcagggaagaagaaggggctccctcctcttcacattccccccgaccccaaagccagagaaagccagatggcaccagctgctccggatgtgcctgcccacattgggggacagggccgggcctgggctcggttcccaggtttgagctctgcagcctctctcctggagtgagggggctgaagtcagaccaaaggaagaactcagaaatgtcttgtttatttgtgtttgtgaccaagcagcctctcccttcacccaggtttatggcctcgttttcacttgtatatttttcacactgtaaatttcttgtacaaacccaaagaaaaaattaaaaaaaatttttttgtttaaaaataa

SEQ ID NO: 2947 - DNA, 5209 bp, Homo sapiens
cacaaatctggcccaacaggatgcagataatctggcccaacaggaattcagtaataaggatttttccccaaaaaatatgcactgtattcttagaaactttattcccgtcatctttctactttaaaaggcatttaccccatgaaatgtatctcttttggtattttcctgactgcaaatgcaaaaacaaggaccaacgaatcccaggactgcaatagaccactgacctttagtcagtgaagaactgattccccaaaccacacttaacactcccctgctttctccatgcaaatgcagaatttcttttccccactaagttacaaatatctttaaggcagaaaaacccatgttattaatttttttaaatctccacttctaatgtcagatgactagtaaatcaatttgttagaatacattgttttctgtccatatcttctgcgagtcactcgcccagcagccaggcttctcaagaacggaaggactgctgacgttcacaggtggctaccgggtgggacgctgtgcctgggttatctgatttcttccttcctgccacctcgggaggctacaacaggtgccctgtggccccaccgcaccagggcctgcaccccatccaccagcgccacatcactatgcccacaagcgtcccccagcagcaggtctttggcctggcggaacccaagaggaagtcctcgctcttctggcacaccttcaacaggctcacccccttccggaaatgaaaacaggaggctgtgcttccatggagctgggtgtcaagagaagaactgtctttgtttcttgtgtgcttcaatccagggaaagtttcttggacccagtgataaaaacttccttttagggatcaatgaaggagagaaggtcttggaatcaccttcagtctttggagacccagctgcctttgtggaagggaggagacggtcatgacacaaagctttatcctacacagaaacacccgtgacccactatgagatggcccagatgtgggacccggtaccatgctctaaagcgagtgattaggcagcagctgaagccacccctgctgatgatgagcaagtgcctgctgcaggtccaaacacagcatccagggctttgcagttcctaaggagtgatgaggttagaggatcacttctgcatttgattttcaaggatgccgtcaagacggggttgacacaatgctgcacgtgtctggtcacacttagaaattgagctcttactctcttctgtaatactgggggacctacagctgccgtggggctgaccacggtgttccctggcatcgtctgtgtccacacagatgctaactggtagtgcaaatgtcatcctgcaaggttcctcttcctgcaagcaaagtggagagaaagaagatgcatctgtcaccttcatcagggtcctcagtgcagagcaacttacgcatcctcaagaatccactgcttttcaggcaaggagggagaaatcctgctgcacactggctttgtcccggagtcggattccctcctgcctgcacgccttcagtaactccgagcagaaatcacatcttgcccacatgctgtaacctaagaaactgctatgcaaggctgggtgctgtggctcatgcctgtaatcccagcactttgggaggccaaggcaggtggatcacctgaggtcaggagttcgagacaagcgtggccaatatggcaaagcccagtctctactaataatacaaaaattagctgggcatggtggcgcatgcctgtaatcccagctactgggaaggctgaggtaggagaatcttttgaatctgggaagcggaggttgcagtgagctgagatcgcaccactgcactccagcctgggagatacagcgagactgtctccaaaaacaaaaacaaaaacaaaaaacattcaaacaactgtttgcaatataaaaagctcatttactgtaatatttatgatacagtgaatatgaaaatgcactggtcagaaggcactctcaaagagccgcactgctcctgacatcgtccttagcaatgaagtcacaaagacagccaaagcagtcctgcttcttggaaatcagaagctgcctttatcacatataaagccaaacagggcataaccatgtcacgtgagcatgtcatcaggcttctgaggacttgttctttataaaaaaagaccttcacaaaatatcttggcttagagatagcagtctttattaacaaaggccacctaggctgacacctgcagataatcatctccttttctttgtctatgttgtacattttcatgatataacttttaactatgtctagagaaggcaggctctgcaagagaggtgccctttcaacccgctcagtgccctggacaggagatgctgtgttaaactgttaatggatatctatatgagaagctcatttttgtatgctatccctgcagtttttttttttctaacaggcccatgtttgagaataaacaagtctgtgatgtcagagacaaaggtgtattcttcagtctgcaggtgtgtggcacctcccttctcccctgcagccccccacatccagagccgttcctgagagtgacatcatgcatcaagaaaacataaccttggtcctcaggtgaacccttggaacattctgtgaccgcctgatgtccattctgagccaccttggcacacatgcttacaggcagcactgctaagggttcaggtgccccatggctgacagcccgagttgcttctgtggaccatcatgccgctcggcacgtcctgagacagaagttgctgcaggaaggagcttctggagaggtcctgtggcatgtgtgggggtgtgtgtgtgtatgtttccttcttgaacagacattccaactttagatgtgtttatagaactgacctttttactaacaaaatacaatgatatatgttggaaactacttaatatgcttttcctgcacaccttagcaataactgtaggggtctctgctagagttgtttgtatgtacagcaattttgaacaaattgttttaaatgtaatataagagaattagtttaaggaagtaaagagaatcatttgcttgtgttacattttcagtgaggattcagtttaagagtcattcttaggacttccatttcctaatatttattcatgggtaatgaagaaatggtttgcattttgtggccagtcctaatttattttccagctgagccctaacttccggctcccacctacctccacggacttcctaacagagacttatgaataccaggatgtgtttttgttaagtcaggttcaattcgttgcccctgtcagttttatagagtgtgagggtcactccattaaagatctctcctgggtggatcctacttggatgttcaggtgattttgaaaactgctaacatttttaaaaggctagaacatcctttgacttcttgaaaatctgcatgtctggcttgggttttattaccacatgcctgagttcttcaagaatggaaggctcaagtattctcatcttccatttgccaaacttccttcctgatttgagtcacgtgttccacttggaaagaaagggaacagagagcctcctccatggacagtgtatgaatttcattgggaatcttgctctctcccgcctctatgcctttctctctttttaaccttactttacataatattatagatgggccaagaaaagaaaagatgacataacattttgatgaatttcacctattccattcttcacgtttcagaattggtcgactttgttagaagataattgaagtagccttgggtcaaaagcaaccttttcaattgtgatcatacctaaaacatataaaaaccctgccgtagattaaaagcaattataaaatcataaaattgaatgtttgcagaatcctggagcagtagatttctttgtctttggcctgcggactagaaagagggcagcagtagtatgctggagcttccctgggataccagccacatggtttcttttcattagatctgatttttgtttcccactgtagatctgattttgtagttgaaaacatttcaccaccatcaaacactatttctgaatattgtgcctttttatacctagcctagatgaaaaccgatgccattcttattcagaaaatccccccatcctacatgactgttatctagacataaagcaaagtgcatttaattcaaaatttggttcacaatataagtattttgtaaaagccagctgaaccagcattttatcaggtggaaatctctgcaagccaaattgctgatactccttcatgcagatcaacttggtgtcccagtcagaatagaacagcataattacctggagttagggggagtatttctgcactattacttgtcagggagagaagaaacttagaattgtccctcaaaggagtgtcaagaagtatgaataaatgtcctttcaccagctcacaggccagaaatggaggacccaagtcaactaggtgaaactactagcagacccagctttcccataataacctaatctgcaaattgttctattaaagtctcattgttttcaggatgcaatgaaagtggatttcaaaaggctttggaaaaataagtggaacatgactgatcttgaaaaaaaaagcaaaagcttaaatatttgatacaagtttacttagctacaacatactttacattgttgcctttagttatctcacaggcactgacattttatatttagaaaatacttttaatctttctaatctttttttgtaaatattagtgtccattctgtatgactcgctaacctactttgcaaggctttgggcaacattttagctcattaacttcaagatgatgtgtcatctgtataggtcaaagaatgggacttctgaactgaggaatttgctgttgacagccaaagtatagtgtacaagattgatgtaacttgatatgtatttttgttgaagttttttgtaaaaaaaaattatttacaatgttatttgaatgatttttttaaatgctgtgaatctatatttgttgttttgtatattaaaattcatttgccaaactcgttctgatgatgcatttgagtagcagcctttaaaaggaggaagtggagagctgggtgcgggggcttctgggatttgtagctcctctgctgccctgatgtccctagacttctcagtggcaacaactcatccattcaggagctccatgtaaccactgggtaggcgtgggagaaggggg

SEQ ID NO: 2948 - DNA, 14487 bp, Homo sapiens
gttgtttatgtaagaatttcaaggccacaactccatatttgaagtaaagtgctcataaaattaattgcaaggtaatttgccgttaatagttatctgatttctactttgatctagtggttgttaagaagagaggttttggtttttttaatcttgattttgctgttgattcctacttttaattgctgtactggagaaaatgatttctgtgggcttctttgaggtacagcacatgattcacaattgtatatggtctgataacataagaaaataacattttctcagttagtagaatacaaatacttaaaaatatatgtttttaaatatttgaaaaggggtctgctgattccattattaatgtattgcatccttacttgattaaattacttttgtttctggaggatttttttgtatatgtatatttgatgctgtgtccctggtgagttataaactccttgaactacagcttttatcatgcatttgttataaatttttattcattttatatatattgatattgtcaatcctcctttttaaaatttggatttgactttataattctgcacatccttttcttttcaacatttgccttcatttttcaagtgtgtttcttatagacagcacatgtctgtattttttaaaaacccaatttgatattccttgtttcataacaggaaaatttggttcatttgaattcagtgtgaagattaatatttcggtgttgttctcactttatttgctatttaccgtttattccttttttcgatttttacctctctttatattcttgctaataatattaagctttttgctagttctgttgtttctcttttggtttttgaattaatgttattttatgattccccatagccctaactataaacttattctaacaatataaactattctaaaaatcacatataatttatgtgtctttatttatgtgtctttattaacacataaaaattaataagtaagtgtaaccactcgagtatttaatttgccattcctcctgcccctttaaaaaggagacatttccactggcccctgctcttccatcctgagcaaactccccaccttcacagtagccaacacttgggtttacagcaatggtttcagattttcagcgtttcatatcctggctaacatttttgagataataatttcttctgtttagcaataagttcttaagatttaaatatattccagtcatatcattttattaattcatttttttctctataccttaaaatctatggcatctcatggttcgacattaggaaatccatcactatgattcagtaagtaaacaaattcaaggtgtcacatcatattgctttttatgcttttgattttagtaatatcctttcacattcataatccagatagagagataagcaagattgtatccaccaagcctcctctttattgatcttccaaactgaaaaacatagctgccattttagtcagcagttaaactttattatagaatatttttataccttttctgctaacattacctgcaactcccatggtgatgctcaaatcccatttgggaattcagtgaactagcagaatgaaattctaagagactggggcttgttgatgtgtccacgctttccatgggaactgatgttaaatatttcacaaataccataacttccaggaattcacatattctttattgaatgtagaattgtgaaatctttaagaaataactgaatcattatttcttcactgtctcctgcctgtgaaagcagaactatgaaatagctcaagggaatcagtgagagatttgtatccattatattcagtagcctgcatgtgtccaaatcacaaatgaaatgatgtgggcaaatataaattaaaattgaatgttgcagaagtggttgaggaacttcaccaggatacattaatgtacaaactgaaaactgatgaaaggtaagagtttggtcctatgtggtgtaaaggataggagcagttttgtggacatttcttcattcttctctttctgcttttccagacttctgaagagagatttgctaggaaaaataaaaagatatataaatttcagtgatgctgaaggtatgtgcaaacaaattgtcctcattaatagtaaaggtataaattgatgtggattttctagaagacaatttaaaggtacacacttggtttctaaaaagtacactttttaaaatctatctttttaatcccaatttatttacaatttattataagaaagtatttaggtaattatgcaaagatgtatgtaaagtaagttcactaattgttctcagtacaaaaaaaaggatgaaattccataaacatctattaagaaagacctggttaaataatgtattgtacctccatatgtttagtcattaaaaatggtcacttaaatctctagtgtattgacatcaaataatgtcaacaataaatttaaaaagcataactctctagtgtattgacatcaaataatgtcaacaataaatttaaaaagcataaatctctagggtattgacatcaaataatgtcaacaataaatttaaaaagcataaatatatagaaaaatatccctatctctatataaagaatgtctacatacccacttatgaatacatggaaacatatctgcaaggatatagtctaaaaccttatcggtagtgtttcttcgcagtagtgtgaaagaaatacagtagaaacatttaactccttccagtaatgggaaggagaggaagagctcacaaaaacagaaagcatatatttttgacattttgatattttaaatgtaatctcttttcttcatttttctggctacatatgttgattcaacacatattagtaagcaggatgtaatattcaataaaaacttctgtaattgtctgcattagttccaatttattcatatagaaactattcattttacatatctctttctattaaactaacatttagcatgtaaggcacagttttatttttgaaattattaataaattaaaatgttagtgacaaacataaactcttgagctttacaataggttaatgataaagaagacagccaatattagatggagaaaagcttcataaaacccacaggttagagaaaaattgttaggcatttaataaatgatagatcctttatattttgctgcacaaaaaccaaagatgaaaccttttttaaatgcatggtctcagcatgcatttcaaatcacatttttgaagtttatgaatttatgattatataggggaagaaaaaattctttgtttctccacccatcttagatctattggctggagctctgcaatttagactgacaaaagacggattaaacaagataaaaacaagtttattaacataggcacaatgcataagaatgggaactgtcactaatgtataactcaaatgagtggttagaccttagagttatataacaatctgaacaaggaataataaatatgttgagaagtgtcaggacaaaggaaaggaactttgggcttctaggggcagcaaattgtgggaaggtaaatttttgggaaaagttaatggaagatgttgggcacggtgtctcacgtctgtaatcccagcacttcgggagaccgaggcgagtggatcacccgtggtcaggagttcaagaccactccagccaacatggtgaaagcctgtgtctactaaaaacacaaaatattagctgggcatggtgggatgcacctgtatacccgctactccggaggatgaggcgggagaattgcttgaacctgggaggcacaggttgcagtgagccaagatcatcaagatcatgccactgcactccagcctgggtgacagagtgagactctgtctcaaaaaaaaaaaaaaaaagaaagaaagagagagagagagagagaaagaaagaaagaaaagaaagaagaaagaaagaaaagaaaagttaatggaggatgaggtctagttagtaggtttgttttatatactatgtagattcctctctggtgccttccttgggctggtagactttatagctgtttctggtgatatagaatcatcctgcccttcctgatagagggggaggataacagagagtttttctcgtgtcttcttgtgttttgttttgttttgttttgttttgttttgttttgtttaattgcctttgactcaaaatagtccttaggccagagtgacatattttggggtgacatcctctgaaccttttcaaatataaggtctgcctccttctttctacttcataacataaagtcttctttctcttccatgaatattacaattcctgcctgagtcttacaaggccctcctcttccctgtaggtcaggacacaattggtcctttgaattgaggtgtggtagtagccaagctttcaggagtgaggtttccacctttcatcttgtttctaaaagtaaatatctagtaaatgataaagctgtgtttttagttgtaagtctatggtgattgtatagcacagaatgattctaatgtattattttagcaatgaagacaagcagatttgatgcagaaatccttgacataaggagccaaaatatttatgttgcccttaggggatagatattaaatatatctacccatactaaactttttttttttaagagatggagttttgctgtgttgcccaggctggccttgaactcctggactcctcaagcaatcctcctgcctcagcctcctgagtagctgggattacaggtacatgtcactatgcccaactttcccaaattaagctttaacaaatcttctcaataatgttttcctaaattattcttgaatacagtcatgtagaacatataacaattatgaagttttaaaagtctttataattcaggaaattttgaattaataaaaacaaaggaaactttttgttttttgagacagagtctcattcggtctcccaggctggagtgcagtggcatgatctcgggttcaagggattctcctgcctcagtctcccgagtaactgggattacaggtgcttgccaggaaataaaggcaataaaaggtcattgctaattatctgctctaggtttaaaaagttcatctaaacttttcaagtatctttttttccctgaagcctacattttgttattactttagttggaaaacgactgcagtcaatgactcctcattccctcaccattctgacatgcactccagcatctctttgccattatttcagcaaagatagatataatatgctatagaagaaaaagagtagcaaccttaacttaagagttgagttcctattgtaaaataaagacattactgagactgggtttcaaacaaatatatttttaagctccactcctgtggatttttttgttttgttttgttttgtttttgtcttggtctctttgttgatcctgtcagccaatggtttctcacttgcctgtcagagctgaagagtccattccttgtcaattcagatgcgaagtggaacaaacgtcctttagtaacaaaacgaatccgaaatgaaaaaggatatgttactgctgactgtggtggttgtcaataaagatgttttcatagcaactattccttcaaaatacaatgaacatctgcaatagtcttttacccaaatgacaaattcctttcctactaaatcatgtctttacaaaattagaaggctctattttaaaccttgaattacttgacattgaaggtaatgctaattacaataaaatctcccacttacataattattaattcaaatttgcacctttttcctgaattttacctgcttagaaatccttatggtgctaatgatgaacataacgattaagaattttgttgctgaaatctctctatgcctcagtttaaccatgttaaaaattgataagataatacttaattgatagaaactgtgataataaaataacaccacaaatgtgattacaacagaacatggcaaaataaatgctagctaaatttttaaatcatggtttaaagatataatttgtgttactttaattaaataattgataaatagatttcttgccttgacattaaccttgagtattcatatttctgcaagtaggagaggaaggatgtgatgtctttccccatccgtcataagggtcatggccaacactcctataacaaaaggtaggctaacgagaaaaaagcatgacaaatatttaatcatgcttttacgtgacagagaagccttctgaaagaaggctcaaagaaccagggaaaactatccatctttatgcttagattcaatggagtggacagttgtgtagaaatgtgatcggacaaaggaagaattatctaatagtaatggactgcgtgtggaaacccataagaactgtctattctgattcttcttggcctctctgtgtggcatttcttcctcctgggtatggggcatgactccttctggaattagggtttgatgacctactatcaaataaggggaggtcagagaatgtctttatggccagctcctagatagaaaggcaggacaaggttagactaatcattctagcttttatttttggctttgaggaaaagcagatatggtttgtatgacccaccttagggaagaggaattccagtttttatggttcaccttgagggagaatgaggggcaaaagacatctgaatccttcacttcagggtatcattttctgaggctcaatatggacaagtatttataactaggtgcttaatatggccttttgagatacacagttcctatgctgcaatctcacaggcaatgaatggtctttataaaagtgtgttaaagttgaaaaaaaagcaacaaaacaaacaaaaacctgaagaaatattcctcattgaaggtccagcttacattaaaaagaaaactataataatttattctcttgagaagggttgtatagcaaaggaaaattcttgaatgttccctctgcttgccccatgcatcaattctattgatattaaagtaggcctagcaaatgtacttccattctcactgactcagtctttgtaattcaacaccaattctgaaaaatacttagaaattatttcagtaaacagctcttataagtgctacatgcataacaatatttcaatatcagagacttctatcccatgagaagatattttcaacctaaaatttattataaatgacctaacaaagaactattttttcagtaattggctattatggttcaatctgttatacccactttacactagaaactatcctatattttcttgttgcctacgtaaaagtgggcacgaaaaggttaaacagtaaacttcctgactcctgccagccaagggaagactactggtgttacctacgaagtgtcatggcattctcatttctgaataatgagggaaatctgctttcaatacaaacccccataagacagtcactcttccagacaaattaagctaaataatccatcatgacagctgagaagacaatgtgcaaaatgtcagtggaggccagggagagaaaggcagagatggactgtaagagctgcagcatgatgcaaatactgagaaaagacattctctgttaatacagctcttaattgtaggcattttttacagaacatattgagagtgaagcaaagcttccttagcagtactctgatgtcttctcagcaggataatgtagggtaattcacagtgaaggcaaggggttaggaaagtcacagccctaaaaatcaatgggctgcttacagggaagaaggtgcaacagatcttggagagcacagaaaagaagagatgagcagcctgtattgaacagaaaccaaaatattagttagatatatccagcaaagccattccacaagttcgttagtgagtaggtgccaaaagccaactgtaaatcctagatacttgtacatatgcatgcttatattacttatattttaagcagtcatatcctcaagctatattatgagttcagtcattctaaaaagatgcttccattgtcttcttggcacttactcagaatcttcagttatcttattcatactgtgtgcttactggttgtcttaacaggtgagggcaggggccctgtcttattcacctccatatctccaggatatagaatagtgcttggcacacagcaggaactcaataaatattcatactattttgagtcccttaatcctcatatcaactacaggatttagattttattgttatctccattttacagatgaggaaaatgaggaacagagaaattaagtaatttgcccaagctatgcatgaataagtggcagagtcaggatttgaagccaggcagtcaatccctagaatttacactccaacaactactgcctctagtggttatgtatgtatttatacacgtatatatttgcagaaataattgaaacttatttctgcctaggtgcatgatatattaaagcatcactaaatccttctgaatataattcaaacttcttcctaccatagacaaagtaatggcctatagtgaacataatgattatcccatcatacaccttgtactgtattagttttctttgcaatctcaattacacttgcatttttattatcatggttttataaaactttatgactggaaagtaccgtattcataaagagttgtgcctcatatatgttagacatatatgcatttttattagtaattataacttttatgcagccagatagccccaggtttatgattccacatcttttgtgttgtgtcatcttttgtagctagttgatattgtaatgtttgctgacttaattcattcagttattaatttctataaactagaatttaggggacatttcaatggactatggagagaaaataactgaaaattggaaattaagagcatctgagaaaattcaagttgtttgtacatcctggacataaatctcaggaaaactgacatattttccttccttgtcaagtcatacaaccaatgctatcactaaaactggtctaacatttaaacattcagacaatcagtttagtcaatgcttcaataagtttactgaactagcagtttcttaccaactagttacagaacagtcacagctgaaaatgatctatacattgtattataaatgggattaattattctgccagacaaccccaggtgtgccaaataacccaaccccttcctccaagacactcattgagaaactagacagcatctgagcattgtaggaacaaacactgaagtaaatggattctaaatccctttgagttctaaaatgctgtagagatctgagaagcccacaaccttataacagcaggcaacatagattacgcttaaaaagcaacatactttcaattgattgataaacccttttgttgttcatttattgcaaataggttttagagctcaattcacacttttgtgaataaacattgaaaatatttgattcaatggttatatttctgcctgacatgaggaaattatagaatctattaaccttaacaatttaattagcatgtcccagacttaatcactcactatctgggtagaattggcccaattagttaaccactctaaaccacagtttcctcatctgtaaaatgggatggaaaataataacaactcatagggttgttaagaggaatacataaattattcatgtgccctgtatggcacacaataagtccttattaaatgaaccggttgtagaactgtattaagaacaagtagtagtagcttccatatttagagagccatcaattctgttttccaacagctccattagtgagaattgtgctgtgtgttttccccccaccccgccccactacaactgcattgctatatgcaaggatataacttctgtctctaaaactattcaaatagtgagcctgggaaaaacaaacttaggtcaaaagagtttgactaaactggctgagaacatttaagttggataaaaatagatgtattttgtttgtataaatagattttggtcatgagaaagaaataaagaggttcctctcaaaagaaagcctggtttagcagtcagtaaacattgggaagagtcagcagttgacttccccactgtgtggaagaaactgccaaaagcccatccagaattaggtgtgtgggagggaagaacaaaggagaggcaaacaagaagctgtcactattcaccactttcaccttgaataacctttaattgaaaaataaagttgccaaaacaaggagtaaaagaaaaactaccattttattccctccttgagattgaattagagggaaacatactgaccacagtaatcccaaggttggactcacatgatggcaaatgtcacttagttctaaagctctaattagaaacagggctgaagttttagccagctcctgctactagaaataaaacatgaggcaacagcaacccaagccctggacaccccctgacagtgaactctgaggtgctttctgagtgagttgagtataaagctgacagagcctagagaattcatacttgagcaaatattgggaaagaataaactgggtcagttaccacctgtttctagattttatttttttctagacttcaactaagattgtctttcacattaataagaagaacgatgaacataatctatttcatccaacttctacattccaggcacagtatcaaccactttattacattttatcttctgtaatattcacagtgttattgggtagattaaacaacttgcccaagttcacacaactggtgactggcagaaatgggatttgaacttatttgatgccagaggaggtgtatcctttaatattttagaataacttatttatttcattatattttatgaaccttgaaatatgtttattgtaaaaaaaaaacgcagaaaatacagacaggctaagtaaaatgtgtctttacattaaagtatttaatttgcaaaagaacagttgttattttaaaatcctaccccacagtttttcatatttctctttctatgtagggttaatctcatcaggaatttctcttatccatccacagtttgtaggacaattctttgcacataatgggcactcaaatgtacgcagatcatattagtccaagaaaaagctgcttgttggggctaccaagccagcatggtaacaccttacaatcaccctttctacctgcagtcacattgttcccagagtggggtggtgatacttgccagctagcccaagtttctggatatagacctttaacaacttcacaagtacccttagaaaattcggttaagaccgaacatggacatgcttgctccatttttttccactctcaaaatatccttgagcagtaactcattcatagataagaaaaactttttctcttcagttttttcttttctttttgaatattctttgattttagcagaaataggcacagtaaaagaataaatataagagacgaagaataaaatttatgaaatttagaaagctcatgttagagaattgtactctttaggtagatccttatttaaagaataattagaggaaagaaaacaaaagatgaaagagtacaaatgagattcctgagcagttttttattttgattgataaacttttaaaatgtgtttgaattacaatatttatatatcaggaatatgaaaggtttaatcataaaaattacataatatttcttccaacattttcatcttgtccatttcttcatatctatagtggagaattatccctctgtaggcaagaagaagtctttattctcttcggaagctgctcctcttgcactccaaaatatagttctgatggaagctgccaatcactttatcccattcccagaacaggcatggtaccagactgaggtcaatcctatactccaccttatttgccatggaaaatagcctagcgatacttgcatgactcagggcagttggagtagtttgatggaattttttaaaccacagctgacaggaagtagctctgttccttattagttgcaaatgctgcaagcatatgaccctagagttatctgttgccagttgttgccttgtggagatcataggcttaagatgatgaaggcagcaatcagcaataagcagaggtgtgcttgtgtgtgtgtgtgtgtgtgtgtgtgtgtgtgtgtcagaatgagagagagagaaaaattactgcttctgaaaccaaatccatttccaaggtgtggttttagaagcaaataaattgccaatttcagagctgattcaagttgaatttttgtcctgtaaccaaaagagtcctgactaacagccaaaactcaggctgtcaagtaaacataatctgtaagaatccgctttccagcctccattccccttgacatcttcctgaaagaagatttgtataggaaatgctgacgtctctttggcaactgcataaaaattattgtattcaacaaatttattatatgtctctttgtggccaggcagcttgcttggcactggaaattggctagggagattggggcaagaaaaatacctctctccatggtggaggcatacataaaagccgattgctacacaactgcgtaagaagtgctttaatcaaagcctgaataaagtgttgtggaaactcaaaggagcaagcaaaatgcttcacatgaaagttggacattcgagtcaaagactcacaggattttcccaagcagaaaagaaaggagaggacatcatggacagaggaaatagcatggtgcaaaggcatggtatgaaaaaaatacacgacaaatttgtggaataacagaacttttgatgtgatcacagcataatgtggagttgggtaacagtgagggattaggctaaccagcttggcagaatactgactaaaaattcttaaatgctgtgctaagttgttagaattttatcttacaggttttgagaagccatctgcagctcacaactagatgagtgacacaatcagatgtgcgtatgcaagtaggtaatgaacatccatgtaaccatcaccctgagtcaataactatcccttcatgggtgaagttgggcaacttttcatatggttaacaacaattggccaggcacggtggctcacacctgtaatcctaacactttgggaggccgaggtcggtggatcatttgaggtcaggagttcgaaaccagcctggccaacatggggaaaccctgtctctactaaaactacaaaaaaaaaaaaaattagctgggcatagtagcaaatgcctgtaatcccagctactcaggaggctgaggcaggagaattgcttgaacccaggaggaggcagaggttgcagtgagccgagactgcaccactgccctccagcttgggtgacagagcaagactccatctcaaaaaaaaaaaaatccttttttttattatcatcaattttctgcagaccagtccattctactatagaattcctggcatttttcttctcaatctttaaaactttttatgttttatgaatatctttgtattgggtattagtattactaacttttctggtatagtttgcaagatatttgttcccatgctatgatttgtatttatttctttgcttatgttatatttttacagtgaaaaattttaaaaattatataacaaaatatatgttatttctcttgtgtcttctagattttgagtcatattaagcaatgtttccccattttcagaatatagaagaattcataactgctttttaaaaatacatgtacagttcctttttaaagccttgatttaaatatctgatccattgggaatttatcctggattatggtgtaagaaatggatccaattttatctttctccatatggctatccagttatctcagcaatgtttatttaactgtccatcttctacccagcaatttgagatgctacctataaagcatactaaatggtcacatgtgattgtatcttgtttctgaactttctaccttttcattagtttgtctgcctattcatgtgctaatatcaaactgtttaaataataaagtttttaatagtactttctaaagaaatctgatatagtttttccttccagctgttgtcctgaacattgcttttcttttttagagtttatctggttattcttacttgtttttaaattcctaatgaactttataatcaatttgtttaactctagaaaaaagcctggagacattgaactaagatcaaatttaatgtattaaatatggtagaaagaagagagaatgaaaaataatgttaacaatctaggtgaggaattgctgaggagacaaattaagtaaatcctgtggaaggaaagaagaaaggaggaaagaggattggatggaagaatctccacttctcataggtgtagtccttccttagcctgctttttaatgagtgctgctaaagcccttagcctgcctgtttacccttggaggtaagatcttcttctcctctgattagaaaagtcaatctccccaagcatttctgcttcattggtttcactctaccactgaatggctattatgtgccaggccttgggccaggtactcaaaactctgttagaccaagaacataactattcataccctg

SEQ ID NO: 2949 - DNA, 2696 bp, Homo sapiens
cagggaaattgagttgcagagctttgaaataacttgtccaaagccacacagctggaaagtttcaaactcaagcatgttggcccatgctcttcactgacacactctactgccttttgccaaatgtgctggacattcatgttggctgctcagaggtttctgttcctctgtaggaggatctatataaaaaggagacttataatcaatagatggcttgggcactgtctgatcatctggtcttctcagtccccggcaaagttcacggaccctgacacaccctgcagctgtctcctgaaggagtcagagtggaccactgaatcccagctgctcttctttcaaacgatgtgaccttgggaaagttacataacctgtctgtggctttgttttcttccttataaattggggtaataacacctacgtgtaaaggttattcaggtaatgtatgtttaaaagaaaaaaaatgtaaaaggaggaagtgaaaatgaggcagagtttgtgtcctgtgaaaggtaaggaaccagtcacaacatactgataatattaatagctagaactctctctgtagctgcccctgccgagtgttttataccattatctcattcacttctcccaactctttgaggaagagactgttgtacccatcatatcatcatacaaattgctatacccatcatacacataagaaaactgagactcaggaagtgaagtactggtccgagtggcagagctggaattcaaagcaagccttagaggctaagcactggcatttctgtacccatcttgggggagagctggtagctggctccagggaagcatccagcggaagacctggtcttggctgtcctcgtttgacacctactcttagtaacccagaagagtgcaggcacagtgggtattgcaaaggccggagaaggaaaccaacacagacatccgaaaaagctggtgcagagcaggagagaggaaatgggattcagtttggggaagtacagaccaagctagccacacagagctaatccacagcaaggatagagaggtcaggagagaaaaaaaaagaggagagctgggagctgaaagcagcgaggtggggtggctggctgtaactgagatgctgctctgtaaagtgatgaggccggggaggccacatctgctctgggcagcactcgcagagctgttgcagcacagagaggtcttgctctcctcttcacgtgcacagtggggaggccgcattcgaggctcagtgcgtgtgcgtgcgtgcgacacacacacatgctttgatactgagccccatgaaacccccatgagtctttttttttttaactttcctcctttctaagtttgacctatatatttccagatgcctctaagggaaattatggggctattgcatttatcgaatatggagtatagatcagagtggatgtggaggcagcaaggaaggaactgaaaaaagcagcactcagccatgctgatgagctagtcccaagttccagatctctctttagcctgaagctccgttccttcctgtccatctagaaggcaatgttgcctaaaggcaagagcctggatttatgtacggctcctgcttttactgcctatgtgaacttaattattctaccttatctggttcaatgtcctcaactttgaagtgagaacagtagtaatacctacctcctagggcttctgagaagatgaaagaccaaagtgccgctcctatgcaaaacctatccttgggaagtggagatcattattgcctttaaatctgtccaagggtttaataggagtgcattcacaatttgtctgtaggccttttattcagatgcctttagattttgctaaatcagacattgtacagattgacagattgaaatccatagtgaaaaaaaaagctagtttgagggctttcttctggagctgaaataaagcaatcctaacctttgggaagctggttaaatgggttcagagtagagcatttctatgtacctctggggcatttcaggcctggcagcatcaggagggttctcacatgtggcatgggcagcaaagctatgtggggattctgtctttcccaaacctcactgccttccatgtctcctaagacttggtaggatattcaaatacgacacacctgtctctcccagcacacagattatagctgtaggtcttcccatgacaaggtgtgggggaaatcaagtgagggattctgggagttttatctttcccttgatttggggggcataatgcctgctgggaatagaaggacggatttggacacttcagctggctgattcctgggaggggaaaaggacatctctggccttctagccagaaggggcctctggatcacccagtccagcttctagaaggctcgaggactagcattgtgtgtttgtggtcccttgtcagagtaagtgataggagagcctactcaacaccccaagactcctcagcgagtgcactcccacttcatcatcctgagtgaacacgatgcctccaggaatgtgggagacagaagccacagcggattcttttttcaaacccaagcaaggaaaatcagagagaagcaagtcaaatgccattatcttctctctgcagaactgactaagcaaaattatgaataggccaagaatgacttttctactgattgatgaacttgaatctgttcttctaggatttgattattcaattaataaaatatttac

SEQ ID NO: 2950 - DNA, 1948 bp, Homo sapiens
tgatactatgaaactttgaccaagaagatctcaggaactttattctcacacaagttgaacagcctgatctgcaagcctaagaagcactaacaggatcaaagacatcctaaaaagccagctttataaatggatcaatctccagaaatatgtcttaccaggatgggttctaagtgtgcaatgttcattgctaatctggaaatcctcatataaactcaatcctggagccaaataaaatggatttagtcctacaagtaactctgagcttctttgggacaatatatggacaaatatttggttccaaatctaaacttttttccagaatccttttattctctgtaatcacccataatatttggagatctgactcaggcaaaaacatgtggactaaggaggggagaaggtatcttagggctgaactagattgattagcaaaaaataattgccaattttctgaagaattttcaagtctaaattttcgacgaatataaaccaggcaaacatgatgcttttatccaaccttggtggaaaccattaaatgtgcttccagtgtcacggggctccgattctgaaaaatatcaaagcccaggtccctcaggtcccccagtttactcctaccctgttccagagatcagcatattgtcaaaaggacctttctgattctcaggcaaaatattttctatctcttacatagagtagtaactaaaaagactgcatctttaggaaacgaagacaaattgttgcagagaagctacctgtctttaaaagaagggatgatttatttttttctctctcttaactagaacaattaattggtaacataatagaaactctcagcagtaaatgagaaatggcctaatccctgaatagatcacaaacagagtgggaagtgttttttctgctttaattgcaggagttgatgttcaaagaattcccctgctcctcttggttctgttgtgttgctgacttcaggacttaaaaatctgagaatagaggttcaacttgttaatctaaggaaaaataaaaattaaaaattggaggcctaattatctttgttaaaaataagggaagagacagtttctacttttgtgtctaagagcctggaagtcaccactccgtcttaacaagtaaaaagctgaaccgattgaaaaaccaacaagtgttctagaatccgtaagagaagtgaggacacagggaaaataaacaaacaaaaagactgcccccaatattggagaaacaggtgaatacagggagttgtaacttaccagaatagagattctaagcggaaactgccacaagaacgagtgctgctgtgggaaagcctgaactgtaattgacaaattgctagacaactctgagagttaaaaataactgcaaggtgactcagtcataggaagcccccacaattttatgaggtttatttccaggagcttgactaggttctcactgtaaatatcagaaaaaatatcagtcagttctagccatcctatcccacctaaggggaggaaaaaaatggataaatatttgtgaagttcacagaagagaagcacaggcttactaaaaggctgagacctaatcataggccagtagaacacttcccttttcccctcatctcaccaccacattactgaatgactacttataccagtttattctgctcagtacatttatgtttgattatcaaaaaatcacaatgcaggccaggcatggtggctcatgcctgtaatcccagcattttgggaggccgaggcgggtggatcacctgaggtcaggagtttgacaccagcctggccaacgtggtgaaaccccatctctactaaaatacaaaacttagctgggtgtggtggtggacacctgtaatcccagctacccaggaggctgagccaggagaatcacatgaacccgggaggtggaggttgcagtgagccaagatcctaccactgaactccag

SEQ ID NO: 2951 - DNA, 2829 bp, Homo sapiens
ggaacagagtgaaattgctgggcatatgtgttgacacttgataagaaacacagattcccaggtcacctcatagacagggctgcactgggcctcctgcctaggcctgttcgatgaagcaccaacaagccccacagctttgttgcttttgctatgcccactgggaccagtgagagaagtgcggtcttatccctgggaggagagaaagagccagcatctgcaggcgcccacaggatgtcaagatcctctgctgatgtcacttgggaccaccttgcagatagactacttcattccttgtgactgagcctgcttgtgagacagcccagcccaagagaagcagccatatccttgtgcctgcaggaaccaacatcgtctgtgctaggttatgtgtttactcatttgcttacatcctccattcattcattcattttgtcagcccacaacatttactgagcattggctatgtaccagaaattgagaatttcatactcatatagagaaggggaaactgaggctctgagataaacatacacttcttcaaagtcccccaagaagcgagggaccaaaactagaatataaagtcaaatgcatcttatgcctaatcttactactggttgtttctcaacgggccatgcttgtaattacctggagagtcttatgcaaatacagacgtctgaaccccactccagaatcaattactgtctttagcactgggcccgggcctctgtgtttttttaaaactcactgccatccgccccacacacattgtctgactcaggatgcagcaagggagaggaatggaggctcttctgtaactggggctgaaactaaaggctgaccacccttcaccacctgtcacaagccccctgtccccttggggaagttggcatcctgtggggcaggccagctccctgttgttgacttgacatctttgctgagtcatcttgccaaattccacctagacaggctgtgctgtggtttcactgcttgtttgatgattggggtttcctgtcctgccatatggtgagtccctgtaaggcatggcggtaatggggccgcacactggcagatgggcgcttcctgacccagaagcccaacggagctgaagcccccaacttcactctcacctctacctgctccctggaagggtcagagattgaggtatttcaggctaaatatagaggcaggccattaagaaacagcatctcctcccctctccccaatctctctgggctttccatgtgatggtttaattgctcctgcaatctgttccgtttctcccttgcagtgcgggaaaagcagcagccacagcccatggtgagaagctgctttcagagatgggaacagcttttaagaggaagaaggaagcttcaggtctcagaacacagttgcaggcgggctttatttttagaggtctccgcagagattctgccccctgttcaggtctcgccagacaccaggcctggctttggaattgggggttggggggcaggcaccgttttatttggatcagtgtagcaggaagggcactgggcttgaagtcaggcaaacttgtgagaaagtcatttaacctcaaggacaggaaatgccactcgctctggcaacatggggatgtggaggaagggagggagcacagtagatggcacacagtaagcccagagtgtgggtctgccacccttggcacaatacgggtattgacaagagtcttgggctcattagttgtgtggccttggttttcacatctgtaaaatgggggtaataatagcagctgcttccaggactggctacatagtttgcagggccctgaacagaatgacaatgtgaggccccgagttgaaaaagctttaacaatttccacacagtgagagcagagcattaaaccaggcatgggagcacagccttctgagcacagggccctgtgcaactacacatcttgtcacatcttgtctactcacaggggtgtggtgaggaattaatgagacactgcatgtcaagtgcttctgacactggcagcctttattactactactaattgagcatcagatatactgtcgagagcagtgttacccattttgctatggcgtatattagagggagaaatagattaagatggaatttcatggtgtctccaatggcaagctatagttaggactttataaggtaacagtggggtgtaactgaagacttttgagccaccttcaaagttgtgtttaagaattcgaatcaggccaggcgtgatggcttatacctgtaatcctggcactttgggaggctgaggggggtggattgcttgagtttcggagttcaagattagtctgggctatgtggagaaaccacgtctttcaaaaaatacaaaagttagccatgcatggtagtgcatgcctatagttctagctacttgggaggctgaggtggaaagattgctttagcctgggaggttcaggctgcagtgagctgagactgtaccactgtactccagcctagaccacagtgcaagaccctctctctctctcagaaaaaaagaattctaatcagaacattaggtgggtaatagggaatggtggttggggggtgggtgctgaagagagggtactgcctgaatatgagtattgtgggaaaagtaaataaataaatagagacaccaaagaaatccttcctgggtcactgaagagaggtgctatgcgtaaactcagagaaccaggaaaaggagagttggggtggagcgagttgcttttggcgacatagagtgtgaggtgtcactgggaccactgtggatggatataaaacaggacactagaaacaggggagcagggcccacatttgggctaggag

SEQ ID NO: 2952 - DNA, 1154 bp, Homo sapiens
aagtggggaagccactgaatggttttgaggagagagaggacgttatctgacttaaggtttacatttaatcttaataggatgaagaggaacccaaagatgaagatttcagccctgacgggggttatattccacgaatcctttttctggatcccagtggcaaggtgcatcctgaaatcatcaatgagaatggaaaccccagctacaagtatttttatgtcagtgccgagcaagttgttcaggggatgaaggaagctcaggaaaggctgacgggtgatgccttcagaaagaaacatcttgaagatgaattgtaacatgaatgtgccccttctttcatcagagttagtgttctggaaggaaagcagcagggaagggaatattgaggaatcatctagaacaattaagccgaccaggaaacctcattcctacctacactggaaggagcgctctcactgtggaagagttctgctaacagaagctggtctgcatgtttgtggatccagcggagagtggcagactttcttctccttttccctctcacctaaatgtcaacttgtcattgaatgtaaagaatgaaaccttctgacacaaaacttgagccacttggatgtttactcctcgcacttaagtatttgagtcttttcccatttcctcccactttactcaccttagtggtgaaaggagactagtagcatcttttctacaacgttaaaattgcagaagtagcttatcattaaaaaacaacaacaacaacaataacaataaatcctaagtgtaaatcagttattctaccccctaccaaggatatcagcctgttttttcccttttttctcctgggaataattgtgggcttcttcccaaatttctacagcctctttcctcttctcatgcttgagcttccctgtttgcacgcatgcgtgtgcaggactggctgtgtgcttggactcggctccaggtggaagcatgctttcccttgttactgttggagaaactcaaaccttcaagccctaggtgtagccattttgtcaagtcatcaactgtatttttgtactggcattaacaaaaaaagagataaaatattgtaccattaaactttaataaaactttaaaaggaaatgtgctgtgatggcctttttgttattggaaaaggagggagg

SEQ ID NO: 2953 - DNA, 424 bp, Homo sapiens
ttcgtgatcacaggtataacatgatataccaatgaaagtcaagatttgctttgtgacaaaagtaattttagtaaatatttaaaaagcacaattttgaattttggttgtaaattggacgtattccttggttctaagggtctttttggagttcctgagctcagtgccccagaaggcacatacttcatatgaaatatgaaggatttcatactgcacaagaaaaagccttgagaaagacagaattgcttgtggaccgtgcgtgttccaccccacctgggccccagaccgtgctgatccttgatgagctctcggattccttgtgcagagtgaccgacttgtttcgaaatgaccaggctggcagttggctgagccagtctcttagaaccctttgaagcactggatgcaggctgatgagctgccataaacg

SEQ ID NO: 2954 - DNA, 1277 bp, Homo sapiens
ctccactatcttctggcatctaatatgaggatgctttttgagaggcactgcatggacaacggggaatactgaaagacacagcccagccattgaggagcttctccagtggacaaaatccaaataaggataaaatagatggtaatggaaaacactaggagtacttttgaattgtatttcatagtaataagaaatactccagaacaccttcctcaacatatgtgttttagacatacataattcataaggcatactgcctaagcattgaaataaaataaataatcttcaagctgggtgaccatccactttctagaagaaagcttgctatatttatttgtttatcccacaaacaaacatttttctgttgggtgcttactgtgtgttaggcaatgtgctagataaggggatacaatggagactaagactgtgcctctgctctttcaaagtttataggctaatgttctgagaatgaactctgagcatgtgtagtagtagcccttataaagatgaaaactgccacaacaagagttttggggcacatttaaaactaagtccctttagggatccagaagcactgactcctcctttacagcatggtgtcaccgacatgtcaaaaactgttttgattcaaatgctaaaaactattcagaagagaaattctgaataactactgcaggaaaaatataaaattaaacagttgtatccatctttgtgatattcatgacagcaaagggaagcatactacagaaaggaaatagtaaaatgcaaacagaaatatagtgggaaaacttacttctatctaaatagtaccagattaattatgataattttaaaagttatcagtgacacttcttagaacataaggttacacacccaaagttaaagcatgattatggtcactaggtgactttttaccaatgaactcttcaaaaggagttatgcagttggcctaattttaaaaagcaattttaatatctttagtcacacaaagtatatttcattactttatgtgatgttatgattcttttttaaagaactttgcttttacaaaaagaaagcccaaagatgcatacacatagtcacagatttttagatgggattcgttttccttttttcttggtaaaacatgtttttgccaagtttacaacccacttgaacttctgtctgttctttgattttagaatcaacttggaatccttttaacactggaaaaatcatagagttagtcataaagtttttttaaaagtcatagcaaagtttactgaagatatttattatca

SEQ ID NO: 2955 - DNA, 1900 bp, Homo sapiens
cagaggcattgctctcattcagtgctctcgcctccctcctggattgcctagtcagagtgagacatggagaggggctgatgtaaccaccccagcaggagtaaggaggctggaaggaggaaaccagtgatgaaggatttgccataaccttgtcctggatggagagccatggccaaagtgggtggagaggaatggccatgcaaggcagctgtgatggattcacctctgtgcaagacagctatgacggagttgatagaaagtgtgagaacatgggccacccctccttggatgtgtttctttccagattggaatggtgtgattctaagagtcctgggacagaaggagtattggaggtgtcaaggggctggaccggtgaggacaggagtcgaatgtgcccctgatctctgtccctctcctcggggctgcagcccttgtgacatcgaagtgccccaccccctccttcggcttccctcgctgctgcgcagaggccactggagggcgctgtctcctcacacttctggctgagctcacctccgctgtctgaacctccttttgaggctggagagaaattgagaggcctggagccagtgtctgggaggcctctggacacagctggacccaccgaggccacatggggtcagtaggatctgagcctgtggaaggaggtgccagagcaatgactaggagtcaaagtcctgggcttcagggcgagggcttgtggtgagctctggacaaatggctttgtctgttcgatcctcagtttttgtatctgcagactgtggagagtgacccaccttatggcactgttgtgagaagtgctacaaatgagaatgtacatgtgagtgcttcaaagaactcagatgttctccatgccagagtgggttttatttatttatttattttttgatggagtcttgctctgttgcccaggctggagtgtgcaatggtgcaatcttagctcactgcaacctctgcctcctgggttcaaggaattctcctgcctcagccttgccgagtagctgggattacaggtgcacaccaccacacccagctaatttttgtatttttagtagagatggggtttcaccatgttggccaggctggtctcaaactcctaaactcaaatgatccacctgcctaggcctcaaaaagtgctggaattacaggcatgagccatctcacctggctaatttttatattgttagtagagagagggtttcaccatgttgaccaggctggtctcaaactcctgaccccagatgatctgcccgcctctgcttcccaaagtgctgggattacaggcatgagccaccgtgcctgatccgccagagtaggtcttgatggttatcacccttgaagaatcatccagtaacccaaggagaagatcatttggctagggccccgtatgaccttcaaactggcataggcactgaactgttccttacgttctcacaacagccccaagaggtatgaattattatcatctccatttcatagctgggaaaacccaggctcagagaggcgccatagctccccctgggtcacccagccactgggtggccttaccggaattcagacccaggtctgtttggctccatagacttgcttaaactactggactgtcccgcactggcccatgccaagtcaggaaagggtttgatgtgacctactaaagtccctcgggctgaggtttcagctgagtgtcctttatttagtcctttggaggtgtggacccgtatgtctttggtatggatccacatttcagtggggtcagtaactccctggattggttttgccatttttttttctccccttggacttatacgcatgattcttccccctccctgggaagcagagctggccctgtgacataggtggctttacctgcagcttgacctcttta

SEQ ID NO: 2956 - DNA, 765 bp, Homo sapiens
attatctgtgtgctgtttgtggtggttgattatgggaacaaaccaaggtttagccaattcagcaaacatttatggagtgcctgcaatgtgcatgtcactgttttaaggcctgtgcctactgtaaaggtgacccacacatgatgcctgccttgcaggacttggagttcagcgataataagagatgcatacctgaaaagcctatttaagactcttccggttctacaaagaaggcttcttgaaagtggtagctttgattactctttggatttatttacatttatcctataatcagaaggtatacaaaacagactcacacatatataaaattaatagattagatagcatttaaacaaatatttcaggtaggtacttcaaatgcatttgacatttatcaaagaaatggtaagtgctgtcatccgtgggtggctggattaacatgtgggactacttatcaccaattttgttagggatcttagggaaattcctggatcttatattcacaagcaattgtataaatacttcccacagctcagagacctaataggatggggtcttagagaaacatcttttgagccacagacttctttgttaccagaaggaaaatgaaagaagaaatttaaataccacttgaagagagctgatcgccaccaactggcctctgggtggatttggccaatggaagcacctgtagagggaagagagtgaggttaggatatttcttcctgctgtctccgtgcttccctgcagagagtgtgaagaaatgac

SEQ ID NO: 2957 - DNA, 6394 bp, Homo sapiens
ggtcttgctgctgctccctctttgggtccgcactgcctttatgagctgtaacagtcaccgcgaaggtctgcagcttcaatcctgaggccagcgagaccacgaacccaccaggaggaatgaacaactccggatgggaggaacgaacaactccggatgggaggaacgaacaactccagacgcgcgccgctttaagagctgtaacattcactgcgaaggtctgcagcttcactcctgaagccagcgagaccatgaacccaccagaaggaagaaactccgaacacgtccgaacatcagaaggaacaaactccagacacaccatctttaagaactgtaatactcaccgcgaggttcggcagcttcagtcttgaagtcaatgagtccaagaacccaccaattctggacacagtaggatagtgtgttatgaagatgtatttattaggaggtaagcctcctcgaaaaaatcaaaagacctttgttgcaccaaattccttgctataatgattcctgttagagtgaaacgcctatttgcttccagagtataaatttcattccaattggaggaaaaggcttaaatgacttcaagaaacacattgtaaatttgccacctcttttgcattttcctgagatattttcctcaaggaattgacgtgcaaatcaccaaggtctacatatttttcccattacctacaaaagtagtgactataccaattagaaattttgttcactagtaaaaaatcaataagagtacactgcttggacacttacataagaagttataatttttttttctttctgaatcatttctcctaagccgttttctactgacaggagtctgtctcttcacattagtgacaggaagaaataattaagtgtaagttgtcacttgtgatcggaagatccatgaagtaaaagtgaactaagtggggcagatgaaatcctggctgtcctctctacatctgctgaaatagacttaggaatcatctctgaaacattcccacttctaatttccagaatttatgtggattacaaatgagaataatctagatttttcttgtagaatcttgaagaggcattctttatttttaatcacttacccttaggaatatcctcagaatgtgcctgaaattaggacaaatctatgtattatagttagagtgaaatattagtaattgtttaatgtcactacgcctaacttaactgttagtgtgaattttgagtggataaataaggaatatttattgctctcattgttcattcattcaacaagcatttagtgaataccttccatataccagagatttttcaagtaattgagaaaataaagataattaagatagttcacctcaagtttctcccagtttagaagaagataaattagaaaattgatggttagaatatagcatggtcagagctatgggaaaagagaatatcatatgagactggtgaacagacatgaggatgcaatgcttgttcttggtctggaaggatactttggagctatttaggagactaatgatggaagactttgctgggttgggtaaaatgtagcaactgcaataatagagaaaattgcagaaaaaaggccagtgtctgtctattctggctgctgtaacaaaaataccctagactggatggcttataaacaacagaaatttatttctcatatctctagatcctggaatgttcaagattaaggtgctggctgatttagtgtcttttgagggcctgtttcttgttgcttcgtgggatggtgtaaggaacaaagcaactttctgggccatcttttataaaggcactaataccatgcacaagggctctgcacttacgatctaatcacctaccagaggccccacctcctgatatcatcaccttgagagcgaggatctcaacatataaattttaggagaacacaaatagaccatagtcaccaacaactgcaaagtcaagtagatatgaggctgcacctctggggagcagcaagtaatgtggtctagctggggagaagggtaaggaaggaataatgtaggaggtgagcctgaagaaagagaggcaatggtcagatcataaagcctcaaatgcttccctgagaagtttgcattttattctgaagattataggagggcactgtagatttccaaacatggctagttttgtattttacaaggattactctggtattaagatattagcaagactggggataagggaccagttaagaagagaaaaagaaggaatgaagatgccctcccttcatctccatctttttaatggaaagatggttgtgcttctacctgaaaatggaaataatgagaagaagcgactttcttctttgggaggtggaggatgaagagaaaggccaagttcaatgtcactgaaaacaggacagaaggctctgagctatgtgctctgctaagtggaactattttgtttacatgcaccaacgccccatttgcagagaaccacgacgtaatcagtgcaagatacacaaaggtagatttattttgcagcctggcttaaaaacaataatgccaagacctctcaatttcaaaagtttaatttgtttgataaaatgctaagaactgtattgctcaatggtctttatcatgttcagtaaccatgatggatagaattcagatgatgtcttccctttatttaatagaagtgttttatatatatatatttctattattaatttatatagtaatggtacactattcaataatgatgagctacttgtaatggtctcatgaagattatattcttgaaaaaaaggttaaaatatggttttcttttgaaaagcattattagaatataggggtttaaagaagaaacatcatctggttgaactatctcatgcaaatgagaaaatgtcattccaaaagagaaatgaattcattcaagtgcatgcaggtaattgtatcaaaagctgtctaattctgcaaccagtgttatttctatcatactccattgccttccttgtacaagtttgttggcagacaatgaaatgcaatgttcactttcctggagctccaatctccatcctgaaatcacatttttatgcaatctgatattttgaaaaaaaaaaaaaagaactaataaataggtcagattaagttaaatgttcagttttctatatggtacactttgaaaatcactgaaggaattcacagccccaaaatttattctttatgtctgttgtggcatatgaatatatcatcattactgttactttgaaaattaagcttgtgtccttcaaattgtgtttgaagtcatctgtgccctactatattgagggataaactttagtccaaactttttgatacataaccattcccaacttgctagtttggcaatgatttaaaattcaaaggcttggaactgaaacatttttctttagagttatgattccttattacacatgtttttggtgaaatatttttaagatgactccaaatttaaagtctcatctctaagcctatcttactctcccacatcctggtttccattaatacttccccaagaggccagactgtaacatggatgttgtcacatggataaggtaaaggcgaggttgtcatcttttgttccaaaggtattaagaaaagacagcaaaaaaggaaaaaaagatacaaggagtaatatacacagcttatgtgaagaaaaaggacaggtgtttggtttgcctgcactcctctttgcttgtgttgagggcacagaaggcctctgatctttctaaaggaatagttgaaagtagctgcagtgtgaaccagcaggcctaccatgggacttgctaagtcaagggcaggatggaggacatggcagagacactgtgggtgcaatgtaatgatgagagccaactcagaacaaggaaggccagatcagatatgtgcaccgatccacaagttcagtacgagtacaagcagtttaatcagagcacaggcagatgaggaatatcctcactgtccagaaaaaccagaggatcccatagagattgtcttcgcccactgccgcagccccatactgcttccagatgaatgagtacaaagaaatagaagcttgtggaagcttctacaattatatgaataaaatacagtgaaaaactaaggggaccacttaaatgattatttggacttaattgtaaactaagttggactacatgtattttgttttcattttctttctccagatcatttataggagtggggtgtgagtaattttgcaaccctgccgtatatacacacagtcagattgactgtagattctatccctattatttaataaagggaagcagttattacactaatttgtatcttgtggctactcagtgcaaccctggactgactgtattcctaagaaaaggtaaggaatggaggtaaaatatatttaattaaatctacctatttaaattgctcttgtttacataaacttcaaaataggcatttgggggcatattctaaatagaatccctatggatcaggggttcccaaacttttagtccacagcacccttagaattcctgttattttttaaaacaaatgctgaaaaccaaacaaaatgacaatttaaataaataatttaatcttctttcattaagtaattagaaccaacagcctattatattttatgccctaataaaatcattgttattttgaaaagagtaaacagaaattaaaaaaaaatttattttataattaaataactacagttacttactaataggaggtgtatagctattgagtactgcacaatttttcaggccatgcagttatattgggcatggccatcccccatcttttcccaatccatattgatttttgcagagtacttgctttttacacagcaacagcaactgatgaaagctcaacttttcaaggatatgatgatgtcaattatgtagtttagtgcattcgaatgtagaaatggtgaaatacctcaagctagtatttcatatgatgtccaacagatattgggtattacagtgtttcccttaaaaagttaatatgtcctgcagtgtcctgtccctgtgagtttgttgtggtaggtttaggacacttacgtgcactaaaacctgaaggtacagaagctatgttcttttagcccagtgatataaattgggtaggaattatgggattaatattccttgcaatatctctagaacaatgtttggcacttagtgagtaccaattacactttatctattctaattactattattaagactgtccctgtgggaaacaaacatattctagtgaccaagtacagttttaattttgcttcatcacatttattgaaaggtgttcctcattgctccttattcaatggtcccataatacttgcttacatctctattgcagtggttatatataattgcaatttgcctatgtctgactctacctgcaagcagctcaagggcaaagaacactcagtcatttgacatcacaaagtcaaatgacatcacaaacaccacactttgcataacataaaaatatgtttaattagcatgtattgaatgaatgatcaaatgcagagtattaatcttcagtggtattgagcactgagtcataaataacatatttaattatcaacaactacttgaagttgtagaggatcttttcttgaagattttttaaatgtttgtattactaggtctgatttattgagactagtccattgaaacaggcttatacccagagaaatgatttaagcttctatatttgtagcatttgattttttccagacctctccagaaatcaatatggttgtcagggtgatctttatgtggtcatgtcaagcattagatccttacaaatctgagtattaagaatttaacaaaatataaaccaagcttcagggaatgtgaaaacttgactcaatttctttctgaggtaaaatgtgtacttactagatgacctgactcaaaatagttgttcaatgaagatcaaggaatttaactcaggattttaattccaagcatgatttaaatttgtaaggcttccccaggcacttttaagcaaaatgtcttcaacactcaactaaactgagtttaacatagttgagaataaatattttctggcttattatttaataataaaaattggaagcaattaaagaatatgaggttgctcaatttatttaatcttgagttgcagaaaatctgtgtgtaaagtaaactaaaatgaagttattgggtttttctggtaaacaaatctttcacaacatttctaggaagtttttaggtttatctttgcatgtaagtggtgatacagcaaaacgccaaactaaaccaatttgaattttcaagagaaatgattgtctcatcccctattcctgagtttgttgttgtcatcagtgttaccaataaattaataactcaatgaagggacatgaaggagaa

SEQ ID NO: 2958 - DNA, 14917 bp, Homo sapiens
gccacacagcctggtaagtcaaccaacagcctcctcacacctcatatttgcattccagttcactgagtgatttcacacactggctggcaattcttgagcctgctggaaaaccaaccagggattcacctcatccatcactggtctgcaactgccttttgagggccacagcaggggatggagaaatgtttcttaaccagggctacatcagccagtgaagggggatacgctctcaaatgcaaaccctggaaaaccagatggataagaagcagacctggagttcaagatgggctccaaagatcagatgtatttggagaaaacaaaaaacccacaacccaaaggatgggatttcacatctcaagacatctcccaggtaataagtctacagattacaaatcattttcatagaaaatatttttgtacaaattatacaggtattcaggagctgggtcattaatcaatccccatttctattttaacaggggggcaaggtaggggagagggaaaaacagttttggatacaactatttggaaggagagtagatatgaagagggcaaaccctagtttttcattacctacaatcaatgttttttttctttaaaaaaaaatctttcaatcttcagtatctctttaaaagcccacttcttacctactagccaatccaccccaattatttaaattcacttggtacacacctttgtccaccaggtaaattatattcattatgcccactgctgcagcacacataaaccaacacccctgcatggctgaacagggcctaatctaggactgatgggagaagtgcttgcaaaccaagatcaaggtgtcatttctctgctaatactgtctaccaagctgatccctacaaaaacgcacataaaagcaggcaagtttagctactgtgttgcaagagaaaccaggaccttgttaaatagttctctccattaccatttattctctcaagggaagcttaaaaaaaaaaaagaaaaagaaaaagaaaaaacaacgcattggtctggccacctcataaatcccacaagcattggtgtggcatttcagtggagaaggaaacttggggtggggaaaaacccattaaggttgtaaaaaaggctcccaatttaactgtccctgtccctatttatccacctttattcaccacccaagaccattcattaccctagagccctctgatctataaaaggggtcaaagcatcaggagcagggaaggagtgagaaccaaaagacatcaagaaactgatttgcttgagaaaagcagcgattcttcctttcatagctctccatggctgagagagaaaatgcccaagagatcatctatgtgacttagagactgctttttgggacgtcaagagtagcatgaagaacttaagataatgacaagagcctaaatatttaaagtttcaaggtttcaacagaatgtggatgtatttgaactttcaaaaatgtcctgtcacatctttcttcccattacctggagctcctccttttcccaggcattcatatttcttacctcctccccacccgctgcacaaatttgattgcatgaaggataagggggcagcatttctttctgcttctggtcctggttgcccaggttgcatggtatagggaaggaggcagcagaaactctaggccacagaggtgtggctggctgctctagggtggtgagatacaagagactgcaggtgcttggtgcccatatcatggagttaaggagccccaggtcagtgagggaagagtaaagtgaggaagagtagggatgggagagaaaaggttaataacgtgagcaagatcagctggatataacagtctaagttggaagttttttttccttcacgactttaaagactgctttctccattgctttgtagcatttagagttgctgctgagaagtctcatagtgttattctttttgataatctgagttttcttcctgtcacatgtaagatttcctcgtactctttatgttctaagtctcattacaatgctcctaggtgggaatttatttttatttattcttctggtatcaagagagaactttcaatctgagatttatgtcttttgaactggataattcttaggacaaaagctctcatgttaagcatcttatgttccttctctgtcattcttttcattctctttttctggatccatatgcatgtaaccactcattcatatatttgaactctttgtctttctgtgttgaatttggtgtgaactcctccttatgatcttcccattcaccagaacttcccttactgagtctagagttcattccatctattaagtattttttaaaatatcaagggctatatttctatttggttatttttgcatatttatctcttctcgctttatttttgcctattttagttccatgacggctagttctttttataatcgttattctcttatgggtttctttaagcttccttgttttaaccaatatgtcacactgttcattaaagttaatttccttctggagtgagttcatgttctgaatgaatttgtgttctgaattcatgttctgatttcatattttattgagtatatttttttcaggattagatttcgtgaattttgcaattttgatttgcaggtttattttaaaatgttttttgttgttttcagtctttttgtctctcctctgtccctgtgactgtttctctaaatccagtggttttgtgggtgtcttttcacccggctttctggaattccatgtcagaaccaggtgctataaatgcagctcaaggctctaggtcatgacaatgtcacagatatctcaggtccagtcaccaagccaacatgtggcttgggtctttttctggtttcaagactgcatctgtatcctcacacctccctgggcccacagattccataagtcatagctcggtctaagagcaatgcttcaaattcaggtcccttttctcaggtggagtagtagacttcccgtcacccagccaccgccacctgattctggacctggagccagcaggcccgtggcttcagcccaactcactcttttgtattctattgcttattctcatcatggaaataatcatctttttttttttgtcttgaactctgcaatgtcatcatttttttgttttttttttctagtttatccatctttgccatgtgcttggggaagaatggcaatgcgaaagtgtgagcttcccgtcccagcttattagaagcccacagctgtttttaaaaaatctacctttccggctgggtgcagtggctcacacctgtaatcccagcacttttggaggctgaggagggcggatcacaaggtcaggagatcgagaccatcctggctaacatggtgaaaccccgtctctactaaaaaatacaaaaaattagccaggcgtggtggcgggcacctgtagtcccagctacttgggaggctgaggccggagaatggcgtgaatccgggaggcagagcttgcagtgagccgagatcgcgccactgcactccagcctgggcaacaaagggagactccatctcaaaaaaaaaaaaaaaaaaaaaatctaccttgccatgctttcccttttctgtgactgttaattagtacataggccatgggctgtcatgcttaaaaactgaatgggaattttgtctttagcagtgttaggacgactggctgattataaaaataataggagccgggcacaatggttcacacctatagtcccagcactttgggaggctgaggcaggaggattgcttgaggccaggaatttgagacaagcctgatcaacatagtaagaccccatctctatattaaacaataaaaataataataataggtcatggttttccctgtcaagggtcaaactgttcttactgaacaagagctctctgaattgagttgcaaattctgtggttcctcaagatttacatacagaaaaagccaagtatattccctcaagatttttaaaaagatatgtaatcacgggattttagagctcaaaggaatatcaaaggtcttatattataggcccctcatttctggatctgcaagaagaaacagaaattaaaggtcttgctccaagcttcatggtatactggtagcaaagctagagctggttgggttcttctagattggtatttctccaacaaaatcatccacagcatatatcaaaagtgatataactaggaggcttgataaatgatttctacttaatgtttaattatttacaaagcaaaggtattttacacccaggttccttaaggtctcagtttcaatctgctgtgttttttaaataaaaatatgtgcataccagcatttttttgctccagatagaaagctgaatttagccagtatgctccttagtccatctatcacatggcagtaacctattaagtgtctaatttagataaatgtaagagatttaaaaaaataagagtagataaaataatagaagtattatgtatttcagggtccatagacacaagcatcaaaagctgactccggctgattagtcaaaaaagtaatttattacaaggattttgtgtagctcacaaacttgttgggaaggccagagaaccagacctgaggacaaactttcggaaatggctcaaaactttagaactggcctgttgagaaaaatcagtactgctccaagcactgaccactagatgatacatgaactagatgcttgcagcaatttgactttactgaagctacgactgccccagcatcaccgccatttctgatgtgaagacaccctccgcagtatgtaggtgctgtttcagtcttacctctgctgaccctgaaagccagtcacccctctcacaatcctcagcagcacaatgaattctgcctaaagcttctttcttcaagcaaggctctgctgtgcttggataatgctaattgggggactctcattcacaagctaatgagctagctgcaattgaggggctggggaaacaaattttctatctgggaaaaacagggctttaaatatggagatttacccaaatgcagcaacaatgttcatgtaccaagcaactaggaaggttaccaatgaattgccaagcacataaaggagttaaggtgtccatgaacggaggtaagatcatctactgagctagacagtctccatttacccttctaaacccttgctccacccttctccactctacacaatgcccttgaaggctgaaggctgactacatggtctgcatcaaccagctttcttgccctctgcctccagctgggtttggccagtgggaggggctggcaggagctgggaaggtggcagaaggatgaggtttgggcatttagtttcctcctggctgggttgcaggttgtttctctcctgacagcccctatttggtggccccctcctacagctgcccctcctctctcctgcccttcaggcccggtggttcccactaggaaaccctgggacacttaccccatcccttgggttttcccttacccttcactacacctggtaaatagtttattttaaattctctcaataatcccatttgcatgtactatcagttccctgccagaatgctggagtatattcaccttcactgtgacaaatgctcagatcttattttctcctgtcctcaattaaagtactggaatatatttccttttgttttcttctcaaacgcagatcactgattaattgaattagaagaagataatattttaaaatatgatagtaggagaaatcattttaaagttttggaatttattttatatatctctagccaagttattttcagtcctgggcatgcgatataaaaagctctaaaaaagcatgaatttgggactctatttcagtccaggagagactatggcatatacatctttcattttttttttttttttcttgagacagagtctcactctgacactcaggctggagtgcagtggcatgaccttggctcactgcaacctccgcctcctgggttcaagcaattctcctgcctcagcctcctgagtagctgggattacaggtgcatgccacaacacccggttaatttttgtatttttagtacagacgggattttgccatgtgggccagctggtctcgaattcctgtcctcaagtgatctgcccaccttggcctcccaaagtgctggtattacagatgtgagctaccatgcccagctcaatatatcttaaaagaaaaagaaaaagttctcctgctggttctcaagcaaaccacagatatatggtaaggaaaaagtgttacagtaggtagctagtcagacatgagcagagcaggagagggtttctccttgttccccccccccccactacacccccccttccaccacacacacacaccaggaatgtcaggtgacaggtgagggtcaggcagttgtcaactgtctctctaaaataataattggtcacagacagtgccagggaaaggcagtccccctatagatagaaaaaacctgaaactggtgaccagcagcttcccaataagatttcaggagctgggtgagtgagctcgagcatgagcattaagaagcaaaatggtggagtttaactggtatatgaccttcctctagaaatgcaagattggtaaggaaagaatgccccaagtgagcatgcatacaacttcagtaaacacatggcgcatgtccccatcccaggtgctagcaggccattgcgcatgtggacagcccatcccaagggaagaatcggggaaaagggataaaagaccccagaagtatgtcaacttataaaaccccaaagtcaaattacccacttgtcttgcaagtcacccacttggctctcttcaagtgtatttctcttccttttgtttctgctctaaaacttttaatatagttttactcctgctctaaaacttgcctcagtctctccttctgccttatgtccctcagttgaattctttcttctgaggaggcaagaattgaggttgctgcagactcatacagattcgccccagtaacttggatactggccactggtaacatattttggtgccgtgggacttggataacttctgccactaacatactttgatgctgcatgactcagatatgttccctagtggtaagagacccctctaccacaccttctttggctggaggcattcaatccttgtacatggtcttctccttttctctctcctgcttgctaaccaacccccagaataagtccttcagccataagtgactctgctcctcttggctgatttctcagttcactctgatggatggcttccaggggtgggaaggactgtggcatctgcaccgagtagatctgaggcatgaatggccctcctggacaggaggttcaccagaatggtagggctgaagcctaaaactgtgcaatgtctggggtttcctctgctttttcaactaaaattggctctttcccaagaacctgcactgcctattctcttgttttctctgtgtgtatgttctgaaaaggacttgtgcaccctctggaccatctgccacaggggcaagtctgtctctttgctcttactttgcatgccacgtgacctcttaaacacacactcccgcagctcttatgcatttgagaggcagcaaagacatgggcttccttgtggatatctcctgagatttatacttgttcttgttcttaccttaccagcttggatgactttcaaccctttcaaccctgtctgctgacacattgccgggacaaacactaattggaactccggctctgccagctccttatgacttactatatgcttttccttcctgttacaccccagggctgggtttcctggtggcttttgcaaataggtgggatgcttaaagggcagggtaaggccccatgcaggcagacaaactgcttcaaaagccacccctcttcctttgccccattcgtgggcaaaggaagaatttgccctcctctgccagttattagcccaagccccaagtcctccggaggttactactttacgtcaacagggcaaataaacgttgtcctcttgaatccaagggctgctatttttgcaagcatatgaaggctttccatgagtattcctctcacttcctcccacttcttcccgtagacttcatttctctaattacttccacattcttctcaacatgaattaggaccttcggggtcatattcaaaaggagtggggagggaagtctagcccccttgtggcagttagctgaaaaacaggcttttgtctgcttaacatgggaaatgggaatctgagaaaaaaggtcatcatttttattgctagaatgctccaagcaagagtcactataaagtcatggagataagggtataggccagcccaaggctacaggtgcaagagacaaaagtacccacaggacagagatgaagggtgctcccaggctaacagattatcattagaacagagatgaaaggttagggatatgcagtaagatcagttattctggaacctcaaggatgaacaggcgatccactgttcactccagtatctcctctgttctcaagtgggtaattgtgatgagatgggaccaagagtacacagtaaggctggttaattccggaacccaaaggacaatgggggatgctccattcaggataataggaatgtagagggaatgccttcttttttctttttcctttttttctctcctgttctctctttgcagatgggtaatcacattcccataccacaggacatgcccctgggatgcatcccccaaaactaggaaaagtttgattctaccaaatgttaaaacaaaacaaaaaaaaaccagttttcctttgtaatactgtttggcttaaaaataaactgggaggaaattacaaaagtcagccttggaacccagttcccctgtgcaggaggtcctcagattagcctcctcagtcttttataagtgagagtagaataaggaggacagggctaagaaaaaggagacatgtaggacaagaagcaggctcaactattggctgctttacgagttctccaaccccctctaggttgccctaagaacactcatacaggacaaagccaaggtcacctatggaggcggcaagtaaaattataaatttcccttttgctttcaagagctgcctactgtgtgctaatctccttctctaagcaactcccctccaaatcctgttgggtaatggggccaatggcaccccctccaagagattcacatccctttgggcaaaaatatacttttcaaatgggtgcctgcttaatacttacctgaaatctgaatttgtttttctctctaatagctatatttctcctgggaaacctacctaaatctttaaccagcaacttcaacctggatggtcttacctcaggagtttagaaatagctcaccattatttgggcaagtcctagcaaaaatataactgagcaatttcttgagggggagataacttctatagtatgtaaataacctcatttgcttccccgtcacagaacttgcacagcaactttcagtacaaatcttaactttctaacagaaggaatatgacttttgtctaattcaaaggttgtaaagaggtacttttcataaggaagatgataaagaaaagagatttcatatgagaaaggatcttgcatggtaaattattgtcctaaagtaaaatgactggttctttaaaaagagggatatttaggacaagtcagaaagtccaagcctgtcatagatgatctgtgtaaattgtgaaaaatttgtgaaagggaatttatgaaagaaatgttctgcaattttaaaggtttttagacctactaaataaatgctttatagactgccactttgacttttaactgtacaacttgactattttaaagctaggcatggcctggggacttacagagttagccattcccccaggtatgctggaaagagaccttatatgcacttctgtctagtgaatcgcttacttatcaggtttttcgcaaaagtaaaagttgtgaacagttagccatgtaacatgttcttgagactactggaaaagcagtcttacatgtaaggtacgcaaggaaagtagaatgtgcttttgttaaaagattgtaagaaggtatgggaatgtaagttttgcctagtttggagggttaaaggattgttttatgttagataggataaagctgaaggtttgagcaagttgtggaaggtttgtgaaaaattaatcctataaaagaaattctatgtgtgaaaattacccaaaattaaaggacttttattcagtttattcataaacactggaattaaagcacaacatagttttattaaagtattaatctgcttttgattaaagtgttatcagtacatgttccaaaattatgtgaaactcctataattctaatgtaacatagtatacattattaggaataattataattatgtttaattgttttgtgcctcaggggtaataaatttctttgtcaattgtgtctttgattgtggctaccctaagactttttgtcattaacagataattgttgtcttgttttaaccctctttaaaaggtggttttataatcagctatagaactctaacaggtgctcctaaatacaggcttctgataactttgaagattgagacattagaatagagaaaaaactttcaggactcttattggagagctaaaatgttcatgaatatcaagcagaacaaaagttaactgcatggactaaactaatagaagattgaaataatccttttatgactttttgcttaaaatgttgctaatcctttgttttccaaaaccaagaaaacttttcttttgagctatttacagcttttaataattgagtactcctgtaaacaaaattcgagcatatttgtttctctctacctgctttcttcaaaatttggaaactacttgtgagtattcttaacttatggcagtatagttatttgcataagtacaataagaatctgttgtcttttgcaacagaacacaactggagaagctggttattttacgaaggctttgactggaatgatatgcattcctttaaggaatcaaatttgacttatatagccaataaaagccccttgtgaaaactggcttcataccttgtctacacagtccctgtacagggttcccaacctgtggtctgtaaagaatgccactttctaacaggctcaggagccccaggttatcttgggacctcaagggagaggaatttaccaactcattcaggtatttgatggtataaaactgtggctgggtttaagccttaaaaaaagtcttgtctgagattccttatggaatgaagttccatcaaagccaatttaaacaggagcctattaggcaaataattattcttgctgtgctttatgcaaataatcaggccaagtataagacaactaaagtttattttgcaaacaaatcagttttatcatgattttttataaaaatgaggactggaaagagaaaaagtgtgtttcaaaaattatgatacacctgttatttttctattaatagatgctagtctcatcagttatttttaagtttttgcctgcattttagagtaatcctgcttattcctgtgaaccagccagtgatctctggctgcagctcagaagaaacaaaagggatgggtaatgtaaaaatctggatcagtattctaattctgagcacatattggaatctgctatcaaccccatgtacccaagtcttagtaggcatgactatagccaccagttacctgggtgtgtaggcagcctcagggttcttttttggggctgtcctcaccccattattttgttttaacattcctctaattctaataacctgatttgtctcctctagcctttaggccattgagctccagatgaacctcagtgagggatagtgtcctctcaatattcaagagttacccttctatgggggaccccctagactgcccatcagtgagacacaacagaggcaaaatcctgcccctctctcccttggacctggctggataccagtttccccaatccatggaaacagcctcctgctctgacaactagcaagaggccaagactcacagaaccacctacaaccccccaacctctgtcagcaggaagccattacagaaggctcaccttcatccattttctccaaataactggggtcttggactcttgaggggggaaatgctatagtaggtagctagtaagacatgagcagagcgggagagggctccccgccaaacccaactaggaagctcaggcgaccatcagatgagggtcaggtggttgttaactgtatctctaaaataataattggttgcagccagtgccagggaaaggcagtctccctatagatagaaaaaacctgaaactggtgatcagtagcttcccaataagatctcaggagttgggtgagtgagctcgagcatgccatgatggagtttaactggtatataaccttcctctaggaatgctagattggtaagggaagaatgccccaagtgagcatgcgtacaattccaataaacacattgtgcatgttcctctcccaagtgctagcaggccattgcacatgtggacagctcaccccaagagaagaattaagggagaaggaacacaaaacccccaaagtatgccagcatgtaaaaaccccaattcaaaggtcaaaccatgcaccatgaaaaacaagtgtgcacttgtgttgcagattgcccacttggccctcttccaagtgtgcttttttcctttcatttcttttgtaaagcttttttattttattttattttatttttgagacagagtctcactctgtcacccaagctggagtgcagtggcatgatctcagctcaccacaacctccgcctgcttggttcaagcaattctcctgtctctacctcccgagtagctggaattacaggcacgtgccaccaagcccagctaatttttgtatttttagtagagaagggttttcacgatgttggccaagctggtctcgaactcctgacctcaggtgatccacctgccttggcctcccaaagtgctgggattacaggtgtgagccacctcgcctggccgtaaagcttttaaataaacttttactcctgctctaagacttgcctcagtctctccttctgccttatgcccctcagttgaattctttcttctcaggaggcaagtattgaggttgcttcagacccatacagattcactgccagtaactcggatacttgccactggtaacaaaaggattcatagaaattcatagaaatggtatcatagaaatgattcatagaaatgaaagaggaaatgatagataccggtcccacctttgcacatattccagctgacatattgccttctcaataccacacctctgagagggcaaaaattaattacctgagtggattttttttaatgcagaataagattgtatgtgcctgaattcttataaaactctataaagggcttccatgcttaaatagctatttcctctagtagcttttgattgatggataattttctcacattctaacagatgtctcagccatttctgccacctgtagcagaaaatattctgcacataacacttttactaatataatacagtaatgaatcaatagaaatattactgcactctgctttaaagaaaagacatctcaagaaaacaaggtcagctcttccagggatgctgtctggaagcgctcagaatgtcagtgtttgacatattgtcttaggcttcctacaacagcctctaacagaactctgctgtactgaacccctagtaatagaattgtttacctttacaccaagaaggatggaaaagcaccaaaatctgcatgtggtgtgtgcccaggccgactttgagggatttctgctgtgagacctaaagttcttatgattggccagtatgaaaaaacatgtcagcagggcctaaggtgtcccatgtgtgccaaatgtgcctgtgacaagttgaaaggtgctttccttatcaagaaggagaaaattgtttcaaaggtgttgaaggcacaagaaagtaagaaagctaaatttaaaaaatgaagcttttttggttataaaaaaatcaaaaggcaacagcagcaacaagacaaggtcaaaatgaggtaactgagtgaaaaaacaaaaacaaaaacaaaacaaacgaactgggggccaagcatggtggctcattcctgtaatctcagcacttgggaggctgaggtaggaggatcacttgaacccaggagtttgagaccagtctgggaaacatagggagagcccatctctagaaaaaaaattacctgggcatggtggcccacagatactcaggaagctgaggtgggaggattgcttgagcctgggagttcgaggctgcagtgagtgagctatcatcatgccactgcactccagtctgggcaacggagtgaaaccctgtctctaaaaaaatcaaaatcaaaattaactggcagtacaggttcaactcctccaaatctactcttggaaccatgtatataattactgatcttcagaatgatgcatgggaactgcattatcatcagtctttaaaaattgttttattaagtttacaatttactaaatgtcttttatgagcccagatctcctctaaattttatggggaatgaagaaatatgatacatggcacctgtcctcaagcagcttacagtataatggaaaaaacagggaaaattatttaaatcatattaaatgcaaagttgtatggcattcaatgtagagaagttcaggtaagactgtatgatgcatatttcagtgtttctaactggtcaaccagtttggatgagtgaatcttggtggatgacccagtcggtgactgtgagcacctctccaagctttctcttaatatggcttgaaattgtgttttattttcagcatctacattataaactacttctaaaactgtttcacaataatgcttctaacactgttttttaatatcctactcttgtgc

SEQ ID NO: 2959 - DNA, 2014 bp, Homo sapiens
ctgtcatcggcaggcagaagtagaactcgtttggggccgtggagcctaattgtaaagagcagtcagacttggaggaaatggttactaaatttgtctgaatcggaaatgcacctcctttagtggatatgagatggaacgtcgcagttgcttcctaaaggtctccttttcatcatcctcctgaccttttataaaagaaagaagcaaagagaagaatgaaaaatgcacgagtcactgttttacttctttcaactcccatcgctgatgttgacatggaccaacagagatttgaaataaagccagtgtagcgggaggagtggtgaactccagaattttgggactaatccccaccatcaaaggctgggctgtgtggtacaagaaaagcaggatgtcagtgagaatccggcattgatctcccccgtctacaaacatgaatcaagacgaagtttgcccctgcaccccacctcaccctccctctcaacagggccatgcacttgcttctccttccagaggaggggcgtccccgtgctgctggaagaagcacttggaacactttctcttttgcttctctttttttgggaggttgttgtttttgtggttgccattgacttcgagtgtggctgggggtgagttgcccaatagttgtggtacgtctcagacactctgtcacccaaatatggaactgtggcagcagaaacaccttatgaaaatagcatgaaaatgtgtaatgtgccataaataaacagaaagagaccgccaggaagctgtgctaatcaccgctttgatgtcgcctgaattactgtattttttaagggcctcgtgtttctgcttgtttgttgcgactcagctgccactgctctatgaaaggttggatccagttttccagctcttctcccctttgcagtgacagctgttgtcccttgactcataggaaagcgatttctccacccttccctgactcccagccctttcctggcaggactcctgcgaaccttactcttcgtccctgccctgaggtggccgagggtgaggacggccgcttggcctgagtccatgcgctcccaaagttcctgtgtcatttgccagccggtcccaggactctgcagcaacgtcctatttttaatctctggtaacctggccttctcttatttggccatgtcatgtcgggaaatggaagtttggcttgacttatgtagcaaagagcttgtaggagcacaagcccctcgctgagcagagcttgcaggaagaaagccccagatccttcagttttgggttgccagggctttctggctttgcctacacctggcagtcactcaaaaaaagtcccaatcctgaattgcttctcataagtctacatgttcttaggtttgataagagctcaaggctgctctccttgattttaagattctatgatgtcacaaagcgcaggtgaatgccagacactgtttcctttctgtaactacccaggtaaccacttgcacaagtgacctgtgggcagccctggtgcaagttccgtccatgcccggggcaatcccggctccactgctgggtccaggaacgccctcttgtggttggaagagctttgaccgactttattttttttaaaaaagaattacattattaaacattttctcaatttttgtgttttatctagtcttgggagtgaaaaatgctagtttttagttgaggataagtaggggggagagaaattagaggtagttttaccatcatcatcattgctgtattcaagccccagtccaccgagcttgtccttccagcctggacattgaagacgtctctttaatggtctctttgccttctggattctgtgccctcacctgcgtcaaaattaaactaaattttcttgaaacactttgtttgtttttgtccctgctttgttcagaaaatgtgaaaagctgccctctggataatttaaaggctgaacccttcataggctctaggttcttctagagtcttcgtaaacccagttcgtcctctcccaggagcgtctctgtcc

SEQ ID NO: 2960 - DNA, 6779 bp, Homo sapiens
cactggcttcttagcagtagctttgctgggagctgcggtattccaacagcccctagtgtcggctgggatgatgtgacttgggggttaaatgcagtttgcagtttcaaaaaagaaaagcatgatttgttgaaagaggctcctgaagaagaacatataaactcagatccctctactttccaagtgtgagaagattttgttctacagtcgcttctgtgagatcaccacagccctggcaaaccaagagggaggaaccttgtgcctttgaagtgtgattcacagtgcttgataaagtgccagtattctctaaattttaggttcacagcaaattggatggaagttacagaaattcttctatttttaattttaaactaacatacgacaaaaggatttcctgatttatccaccatttcaaaaaaaggtccgaagaaaatgaaggagcctcttcctgtactcatggtacataaggccttcaggagcttccggattaacaccttgtattcccagaacttgttgacaatgggttcatggaggagaaacctgatgtcttcgataaggtaacagaaaccacagaaatcaaaaccgtggataagaggagactacagaaagatttctccttctggagtacatgaatcaaattgcattgaatcaaaagttttgtgaagatttgagatgagaatgagagccaaataagccatatcataagaagctgtgatcagaaataaaatgaggacaatgcttactgtggctttcaaggcaggagaaagcacacccgagggggtcgtgtcccacactaggcagatctaatggtgccacaaaagacaggtgttttgtcagatttcagccacacactttcacacctgcaacgcattaactaccgcagcaatgttaatgaagaccaggtgcctgttctccagcataaatgaggaactggcaggagatttgctgtttgctacctgacgtctacccctgagtctctgaaccccgtccttctggttgaaggggaaggtgtagtgatgtacaaaaaatgattcctgttggacattcaacacgatactccaatgtactttgaacacgtcatgttctgtgaaggtaaaaattactcctcaagtttataaagtaaggaccttcgggactggcacgacctcattatggctaaccagctagctcccctcagcactgttttttcctgctggtcaccagtaagtgagacaaacctgtcttatcaaccacaattgttattgcacctacattgaaatattatatatgcgtgtttgtgtagtttttatattacgatgtttcgacatcttaaaaatactttcttgctcagaatagcctgccctgtggtggaggtagggggctagccaatttttaaagactgctaggactctgctgagcatgacttcaatatgcaaactaatatagagccatccctcttctgtccagtttgtacactccaggaggcaatatttttctgccttaatcatcccagggccaggtaccagacaactaagaccaccattatagcttagagcccaccaaaactattcaaactagccaatgtgaaactctttatgctgcattgccttgtctttcccttgaaaatctcagttaaaggctcttgtctaaactttcccctcactcctgtcttctgcctcctgctcaccctggtgtctttcccacatagcactacacggtgtgctgtgcctcctctctctaggatctgtgaatataataaagtttcttctttcctgagcctctcctgtctcctcttgtggccactcttgactgaccatcacataaaagaacacaaagcaatttcctacagaattgaggatgtaacttgtacttctctttggcacaggggagcaaacagtttatttgataggcggagagtgaattgagtctgagaagttaaaagtaaatgtacagttttctcctgatctgtggacagaacataagcttggaacatgcagctgggaaaaatcctaaagtatggattcccgatttgtgagtttgtgaggctatagaataaatactgtgacggttgttacttagtggcagctgatatcatctgccagttttgcatatatttctcttcattttctaaggcaaaccacagatgttttatcccttgcaattgcacctgcagacctaaaaccagttaaaaaaaaaacatacacacacacacacaacaggatagcagatgtttcgaaattggaacagttatgttattggacatggaaaaaaaccccaccaaaactattctactttttgtcagtacaaatcctaggaagtaactcctcttctcaatatggtacaaagactaacagtcctgacttttcatttcccctaatccagagggcagttttgacattttatttacgtaaaaggtgataggttttattctagccctgagattcaactcacctctaataaattgtcccacagtattcctgacccactagcataaaataaaggaatgcttttaagtcatatgagggcaccacatttgctgatgcaaaaatgtgttactctgataggaaagttaattaagcaataagacatgacatgacgtgaattattgtgtaataactcatgcctttggtgtagctaggcacaaacctgaaggccaagtacccctacagcatctgggcatgaattatgctacaataattcaagccctgaagcattccaatgaagcaggggttgggagctggggaagaaaacgaaggacaaaaattgatctctaataagtaagaggatgaaaaggagttgtgttgagaactgcatatgctccccctaaagcagtgcatttatgacaagcatttgaggatgaaggacactgggattctttttatcacttctcatagctttaagaaaacactacaagcttccaactcagggcctggtaccatatgctgaggaaaatgctttgctggaagtatgggcacttggggttcagcaactgcagtggattctttttgacacaaagtgggaaataactcatctctcaataactctggacatttctcgttctgccctctgattctggggaaatagatatcttaagaatcagaattcacggctcatgggaggtgggggtccagctacacaagtcttctgatccatgaaatgaataccatttcccttgcttccctgtatcccacattaaattggggtcaggttttggcatcagaaataaggaaatgaagaagtcctggttccccaggctttcatttgacgtgaagaactaaagacaaaccatatagaagccatagcacaaagactgaaatacaatgaacctattaggtatcacgtccaaaaagtgggagcaaaattaggtccacagaaagatctttctgcttattttcttccctttcatgggcatactgatttgatgaatgatgatgtacctaacaagtcccagttagtggctatggtcctgttaatctcacagctagatgatagcttgacagccaatcagatcactctttgttaaaatccaatttaattaaacaaaaaaatctacaaaggaagcagcattttcctccatttaaatgttgacacgtaaaactgttgagattgacaagaacgtgtcctgtccagcctcactcaactcaagctgcacgcagaacagctttactccttccctcttgttctccttctttaaccttcagccacagactgcacggagatgagcagttcagcaaatctgcgacttcagatcttacaagtttgctggtaaaattccaaaattcatagtcagaccatgcctccctccataagactaacatatggtattaacaaattttatcaacactgtataaagggaacggctccagaatgtgtttctgttattcttacagttactctgttgcctttcagcatggcactgatactgcctctctttggtcctgtttgaaatgcttattttaacatttatttcttctcttaaatggcttcatcctggaattccttctttatttggtaagttgcaattcagcctctttgttgagcaagtggagatctcataatttcctatttatgttataaaagtttacagcgtatttaacaaatactccctgagggaaaaagcgcattttgatgaacaaaaagtagtctacagcaggggtcatcaaactttgtgtaaagggccaagcaataaatgctttcagctttgcagtcctgttgaaactacttcacactgccatcttggcataaaaggtgccatagacgatatgtaaaagaatgtgctagcctgtggtccaataaaactttatttacaaatataagcagcaggctgaattggcctgatagctgtagcttaccaacccacactgtagagagttcaagggaagggggccaattctgttcccgcactttagattatgaattcttaagagctgagaggagggtatggaggcagggaggttagagaggtgggaaattcagctgtatagtaaaagataaaaaatctggaatcagataggtgagtgattgaattttgatccagccactttctcctgtgtgactttgggaaagttatttaacttctctgatcttcactctcctcatgcttttataggcaatccttaactagggcagaggctgttaactattcataaacctctgtatctccttcctgggctcaaagctagactatatttcccagcttcctttgcagcgatgagcttctgtgtggttagaatctcatcagtagaatatgcagagagggtgtgtaccagttctggtctagtgcatttaaaacagtgggactcctatgtccacactctccatcttggtggctggaatccaaacttggtggtgtagccttcagcacatgtacaagataatgcaatttgggatgtggagagacaagaaggaaggggtcttatctctgaatggctgcatggcacagcactgcctcatgagcggaaacactcgttgggctgttttgtgagaggaaaataaacgctgttcttgaaactcctcattttagtgttttcttgctgcagcagtttagcctgaaggaaacaatgcagtatctaacatatgactattacaaatctataaaataattcatgtaaactgcttggcatttaatgggcattctataaaggagagagagcttttatctgtttccttattcaggagggctatggtaaattggccttctcatatccatttttcttcattgtggtaagaataatctttgcaaaatacaaaagtgattatatcatcatccagcctaaaattcttaacaggccacttcttgctgttaagataaaaattagaattcttaccataaatttcaaccttcctgatctggcccttgctgacatttgcaggcacatctcttgccactgttgccctagctcttccacctggtctctctgttctccttgcagttatctggacatgctatactcttcccacacagtttcattcaggctatgtctggaaggctcccttccccatgcaaccaaatctcttaactagagcacattctttctgatttctgctcaaatgctttggggaggcttccttgatgccaattgtatgtttttatttactaaaggtattatatacccttcgcttctaggatggatctcaattctgatgggaatgtgtagttattggaagtctcccccactagactgtaagccccttgacacaggaatctgcatatatttttgatcatgattaaatctcttttaacaactcgcaagaatttgaacaaatgttgtgccagagaagttgaatctataagtaacattttatataacataaattaacaataaattagagttatttacaagaatgaaactataaaaataacaggagaaattacagataatttgcaaaacataatctttgaatgcggaagcctgcttgagcaattatattttattatctgaaactaaaatttctaatgcaagaatactcaccatagtaaaggcacaaaagcatatttacaaaacacattagcatgaaaggataatttccttgatataggaagaaaattataaataaaacaattccagagagaattagaaacatgaataagtaacacacagaaaaaagtagtttataaatatatgataagacattcaacctaactttaaagcaatggaaattaaaattacaggcgtattttcaccaaccatatcagcaatgacaaaatgactgatgatttcttagggtaaaaatgaatcattatatactgatggtaaaaataaaaattgttgtaaaacctctttgattctatttggcaatatctgtgaaaattttaaatgcacacatcatttgacccagtaatgtcacatcgaagaatttgctctgaactgggctgtatgattgttcttcaaaatatatatgtatatgtgtatatgtataagcgtattggttacagcatagatagcagtagcagcactctggaaactgcctaaatactcattaaagtagcacaaaataaatgagttgtggtatgaacatacagctgaaaactataataacattagaaaagatgacataaatgtatcagtataaaaaatgtcaactaccagtaattaaaaagagcaagtgacagaataatgtatatgctatgatgccatttatatgaagaacatacgtagagatatataagtataatgcatgcgcacatgtgtggaatgggtggaaaacacgtgattttgagctttcgcaagtgactaccttggggaatgggtgtgttaatggcaggtaggtggggtggggagatgaggggtatggtggaaaac

SEQ ID NO: 2961 - DNA, 3933 bp, Homo sapiens
ctctattgaactggaagttaagactgccactaggccactttgggctccttatgcctgggtcaacaggccaaggagggagttatagtgttggctgcatggctgatctgactactaaggggaaattggactactgctcaacaatggagattctctctggactatttcatggctcaggaaccacatcctccttccccacttcctgagtgtatgggatggccacatatactgaagctcaatcttatgaaaagagcatttcagaggcaggaggatctggatttgaattccggcttgatcctgggctgaacaggaccagttctgctttctgccctggggcaagttacccaacatcgctgagcatctgtttccttcactataaaatgaggatgatgataccacgtgggattgttgagaagataaaaagagaaagcacttgaaaagcttctaaacatgacctctcacaaagctgttcaataactgttagctcccttttctcctccttgcagctgctgtttcctggagttgcaaacgtttctaggtgagctcatgtgagaccatctgaaacattccaagaagtagtccagatgtaaagacagctttatctttggccaggtgcagtcttactagaatggcccatcctggtagagaatcatgtggccccttagacaactatgacaccaggaattggatgaaacaaagtttcagctacaggatgaggatatatagataaatgttgatgacatatttctttccttttttggtttccttttcccttgaaaatgctttcagatctctgagacatcccgttgtcatcttcctcttttaaaacccttcgtgtgctcttttctatgaagggctggttggcagctgatgaggccccaggctggaaggaactcaccggctcatggctcaccaacccctaactacagctgggcaggcaaggagggaggctgcaatttcattcacttctttagattgatgttttgacatctttagaagcctctgttaaaatggaaatgtggaatctgagtagtgtggtcaaactggtatacgaggacattttggtggtgactcaagtctgatgaagcttttctagtaatttgtgccttccatttcctaggaacaagagtgagtgaggactaaggacacaaaacagcagcagtttcagccccactcctataatattctaaaagcttgtccttagatcttgatattcttctctcaggcagagagcttaagaatattagagaaatatcctgatacttttgcattttaaggtaagccacagccagaaagaacaatgggaggcccagaagcccacctccaaccactccaaccagatacaccaaggactctggctcagaccagatacagccaccttggtgatccagagaggcctcctgctgggtgcagtggctcaagcctgtaatcccaccactttgagaagctgaggtgggaggattgcttgaagccaggagttcaagaccagcctgggcaacatagcaagaccccatctctacaaaagaaaaaaagagagagagagtgagagaggcctcctatcaggaatcatgctcaagttccaattcaatttcaatgagagataagggagtaaacagcaggaaggagggagattccagaagaccccaagactgcattgttgggctgtcattgttcatgggaattactcacccatgggtctccatcgggtttcacccacaggtctgtgcaccatgtcttgctctctaggaaccagaacatctctatggttctttggatagaagtactctatttcagtgactcttagatttttgtttatttttaaaaagggatagttgtggtgaattgcattaggattactaaaataaaagcattaagaaactccccaaaactccaaatacatctggagtcattctttcctaatagggacaatattttattaccaaaaatggtagaagggttagaagggcctaagtctcaggataaaggatagttcattgcatttaactaattcacattcagaaaaatgtttttcaaattgatcttatttttcttattttgccatggattgataaaactttatcacaaattagaacagagaattaggaggtctatgtttaaatccagaccctgatgctatttacatcccctaggcaaaggaattattctctctgacttttattttgttatttcctaaaggaaagaattgtattagttgatttcttaagcagctctcactttctttgagctcctatttctctgattgtaatgtggaaaactgagctctatttcatacataaccacacccttcatctaacattttataacaaatattgtttccctgatttctccatttgcagcccagataacaactctcttcctaggattagtgaaagcttgtagtatcatacaaaacccagtaattttcccactaatcggggagtttcccagaattatctgccaaaggttattttggcacctaacaacgttttttacttttccgtcatcagtattatcatcaacaaaaaatatttcttaagttaacaaggaaaatactgaatacagagaataaagacataatcatagaatgggtaaaagttcaggcagtctgttagagagcagtacttttctcatatcttaaccacatcaaggacctgggacagggatgatggtgattggagcggcagctttgagggtcacatactgatgtcgtcagtggaaagagaagccagcaccccccttctcatcagtccaaaaccatcatagaaaaaaaaaaacaggattacgtaagaagttggactatggggagggcaggagaagtgagactttatggggccagatgtcaaggacatttcacaaaagagagccataccttagatcaatgctgcgactggctcccagagacatttagtcatgtctggaaacatctttgattatcacatctgtgaaggagtgctattgacatctagagagtagaagccagaggtgctgctaaacatcccagagaacacagtcaccctataaacacagggcagcccccacaatgaagaattatccagcccaaaatgtcaatggtgttgaagttgaaaaatcctgcattggagtaaacttgagagtgatcatgagactaagagcaagagaacatttgacgtcggtgtgataaacaaggaaagggatatctttgaggcagagaagaggaaagtgaggaggtacattccttaccaaaatctggacacctcccatcctttactgaggttctagaatcagtcctaagaagtacagaagatctagcatccaggccgggcctgttgtcctgagagcagaagcagggagttgggatgaaaagcagagggactactgctctccctcatcagtgcatttaccatggaaaactgctggtgtgaagatggctaagaccacactgaatgagaaggaatgagagcaagtgacgtgagggccaagtcgtcagacccagagcaaagcatggtgagcaaagtggatctgctccctcaagaggtgcaaacctaactcctggactttccccagctcagagcagctgccctgttagaacagggccacaccattgctggggtttggcacacaaaaatccctgaccttaagtgctctgagttactaaataatcccagggtaattaggtagtcccaagggaatcccatagtttaaaattatgggctcctgaaggtcctgtttggtccctaaagtcttactaagattcattatttccttaatcaatagttattgaatacctattacttgccaggtctgtccagcaggtgagaaaacaattggaagcagaaacagacatagtcctctcatgcctagcacttagagtctttcaggagaaatagtaagtaagcaaatcatcacgcaagtatcatagctgaaatgcatgctctgaaggcatgagggagtatcatg

SEQ ID NO: 2962 - DNA, 2540 bp, Homo sapiens
aaatcaatacggcacttaggggacaccaaggcgcagagacacttgccccaaatcatgcagtaatgccctggtgccaccgtgaacagtgctgaagcttcctgaccccttgtccaggggacctggctgccttttatagaaagtttccacacaccttctattcctaacctcgatcacaagcatcgccggcccagatgctctgtgtcaccggcttagtaacataccccatttaggagcatgagcacaacttgtttgcagtgggaatgaattaactgaattctagatattgttttttggctgcctttttttgtttgtttttatttcaaacacagctaactaatcagggctgtggacaccaagaatgccaactttgattcttcaaggaaaatcagcagctgaccacacaccacccttcctggtcctccccgagatgccaagaacatccaaagtctgcagttttgagatgttacccttcggatgcatacctcaatctgcctgaaaatcatggaattctggagatggaagggacctcagagattttctggttctctctgttctggttgtaagtgttcttaccacacaccactcccaaccatggggagcctttccaccactgaagagagctggggttactaaagccacaatcagcttctctgcaacttctaaccatttggctaagatcagtttttctgaaaccacaaagaaaaaaaatctacgaacaagtactagcgtaccaatgttcacagtagcattattcacaagtcataaggtggaagcaacccaaatgtccatcaacagatgaataggtaaacaacatgcggaatatacatccaatggaatcctcttcagcctcaacaaggaaggaaattccagtgcatgctataacatagatggacctcaaggacactgtgctaagttaattaagctagacacaaaaggacaaatgctgtatgactccacttgtatgaggtctcttgagtagtcagaaagcagaatggtggctgccaggagctgggggggggggcaggaagaatggggagttattgtttaatgggaacagagtttctgtttgggatgatgataaagttctagaaattgatagctgtgatggtcacacaacattgtgaatataattaatgccacaggactgtatatttaaaaatgattaaaatggcagattttatgttatgataaaaaaatacaaaaagataaatctactctcccttcaggggaagacagccattcacctaaatctttttcaggctaacagtctccagttttttctaacaatctttaggtggtatgatttccaggcccctgcagcttcctggccaccctcctctggctacacttaatgcctctttgaaaacctggtacccagaactgaatggtggactgcgctcagcttctccttccaggtcccgccctgaggcacccggcttaacccccaagtcaaacgctgcacagagcaggcctgctgcctgcccactctggctaccaggccaaaggcccaggtctggaagaataaaaagatgccaccaccctactaccttgctgctgctccatccccagacagctgtgggcagctgcagctgagaagtgaaactaacaacagcatctgggggagggggcggcacccagctgagccctttccataggtttcccgtttctggttgggggggggggcgggggtgtctggccaatggaaacagggcaggccctcagggatgcctcttatcagcaacccactggaagtctgtaacccccttcatggtacggtgtgcagggcagggatgggaggcacagctagatgtgtgcagccccagcctaagccaggcctgttgggcaccacaatgggctcacccgcctcggtccatctggaaaaggtttgaaagcttgaggcaggaaagttcccttttgcattttaaagtgtgttgaaactgagtagcctgggtgttggtctcattccacaagtgagtaatccatttcctgaaagtaagctgctccccctttggaagtggcccagcgatttgggggtgctgttagaggtgtcactaactcggtaaatatttattggcacaagcaaggagcttttctaggaatatcagttaatttgctaaactaatggctttaaggtagcacccttgaaaaaaattaattcctttctgatgggtgagcaatttatgcctgggacagggcaccagacaggcagtgtgtttcacttactagttagaataaccacaaataaattaaaaccaggcctgactttaaaatctctaccttcttccttttcttgactcctgattttctattaatatctgagccagtaatggattgactttggaaaactcttttctatggcaatattttgctgggagtttgaaatgatggggtttgaaaactccctttcctgtgagtcttttggcttctgggatcccatacggatgatctcatatatctacccctcactaagactgtgcccacctggatctatctggagacgtgcctcctgttcttctgtgtagagcaatttagactttcat

SEQ ID NO: 2963 - DNA, 1095 bp, Homo sapiens
attgtagaattgcataatatgctctatctcatccaaaaatagtttttgatgtcagagtagtcatatgaacgcaacattgacccctttacccccctaaataataaatcttgagcttcttattgtatggtaatagatttctttcatgagagaaatttctcagggagttaatccactctctctcccctactgcaagatcccgctgcagtggtcctaaaaaagaaaaagaaaaagaaatttctcatactacagaagaataaagtagccacgctctgtgttttgaatcaattttcaaggattttttttccactttgcttaggcgttctttcacccacaactacacccccaggttccagattttggaatggtgtaaataacgccccccggcgcccatccacttagcggaaggaaagtcagccactaggctgcgggctccgggctgtccccagcgtgggagaggctgtcctgctggcccggctgtttattgcagcgatttggatgttccaagagtcacaagggacactgctcacgtccccatctagggggtcacttcatagcagcatcagctctttcttttcatccttcttgcttgagtctgcctccggtcctctggatggagcaggctacaacggacgctcggagtttgctttcatccacaaccacgtgcccaggttctaaatttggaatggtgctaatagtgtcaaatgtgcaattctgggtaggtatatgtgggtggatgggatggcttataggttgtattaaaattttattttttttctccgttgaaatgtcagccccaccagaaactattaatattatgacattatctccttcaagaaatggatgtgatgataaaatgctttagtaattttgaatattataatattatgaccactaacattaaatgctgtgatttttaaaaatggctttcaattagaaggttttgataacttgagtctttctgtcatctctcagtaatgtgccattactaaaatatttttccccccctctctccaaggcctcaacattttccttactgcattcatgtaagagctgtggttttggtatgaaggttaaatcccctcacttctgacttac

SEQ ID NO: 2964 - DNA, 1115 bp, Homo sapiens
gtttgttagtcattacaaagttatttctttccttagctgtgaatgggaagtgattgcggatgatcttcaactttcatcaggaacggaggaagagtccctgtggcccacacctggccagactcacctgaactcaccctccactgctcaggtgggaaggcagggagaggtcggaggtggaagactatttgttgcactctctctgtacccacaggctgggagctgctggcaggcaggtctaagcttggtaacctctgtttgtctcatactggaggctgagttcatttttgctgaaaagctacagctgttcatactctctaaagtttacaaatccagaggaatgcagaagtttgggtgatagtacaaatgagactctctcctgggagaccgtagggacgcgtatgctcctgagaggcggcggggtttggggacaaggaagcccaagcttcacggtctctcgcgctggtatttgatgacagggccaaagcacagggcccaggtgcagccagcgggagcttgctccttttcctcaccagactgggcaaagttgcagaggccagccaggcttgcaccaaagtgacggctgtgaacacggaggcctggctccaccttgtatctcggttttctcaccaggggcggggagagttaaatgaaggcagccctttccagtccaacagcccctgatgttcgtcctgttcatgaaagaaaacggagagtgtttgctggcagcttagcaacatcactgtcgacagggctcttcctgcccggctacattaaaaatggcttccaaaataacattacaagactagtacatggccatgacagaactttttaaaaatgtaaaaaattatcagaaacattataatcggccataaactcacctccttttgttaatattttggtaaatgagcctttttttttaacctggacgttgaattattgatactattctgtacataggcttttgtgtgccttttcacctaatgtccagtcacagctcttccctattttgtgtaaaaacatcctttgtaaatggcaagtactatggcaaatgcactgaacataatttattaagctgattggatattttggtggttttgctcttagatacacccctg

SEQ ID NO: 2965 - DNA, 1105 bp, Homo sapiens
gggccacatagggtggacaggggctgtgagttacagcctttaggtgctaccctcagcctgggcttccctccaggcctggcgcaccttgatcttcactttgaaagagtcgatcagaaagaccaccttggggatgccttccagggagggcagctgcccatcatctggcacctccaggtcgaacctctgcagcagccaggccatgatgaggaagagctcctggcgggccaggatctcacctatacaggagcgaggtcctgctccgaagggcaaatagcttactgacggtgagatgagctgggtccccgctggattcaagaaacgctctgcagcaaactcaccgatgctgctccagagtggaagaggaaaagtgggtctgggacttcgtactcccttccttgctcagcctcatgccccctcattcttccgccgtgaggaaaatgccctttactccctcattcccactcactcatgttttcctcagcttctgccagatcaaacctaaatccagcccttctccatcccttccctcctaacaggcgcttctgtctgaacacctgtgtctgtggactttggtgtctggcagtgtatgtgggtgtgcgtttggagctgcagcgcatgttatgtgcgtgctgcagctggttggaacatggagctcccagcctttcatcccagaccacatgtctctgagggcagcaggaagctcctctgggaagtcaggcagatctgtggatgagtcaatgcgtgtctgtaggtggtagagacatggagccacggggctgggggcaggatgatttttatatttaattaattaattatttattttgagacagagtcccgctctgtcacccaggctggagtgcagtggtgcaatcttggctcactgcaacctccgccgccttggttcaagtgattctcctgcctcagcctcctgagtagctgggactacaggcacgcgccacgatgcatggctaatttttgtatttttagtagagacggggtttcaccatattggtcaggctggtcttgaacccctgacctcatgatccacccgcctcgacctcccaaagtgttgggatgacaggtgtgagccaccgtgcccggccgg

SEQ ID NO: 2966 - DNA, 6791 bp, Homo sapiens
agtaaccaccctgctggctgctcctctaatttgccctggcacaaggacagaatgtgttctgctgatacacgtttctaaagcaccaagcagcctctgctgacagctggcttggttgctgtgtcaatgcagaaaaagtgagagagcaaaagaatttggttcagagtggaagtttaacaggtgaaagaaagagaagggttctctgcacagagaggagtcctggagaaatgggctgctggccaggcgtggtggctcacccctgtaatcccagcactttgggaagctgagatgggtggatcacctgaggtcaggagttcaagaccagcttggtcaacatggtgaaaccccgtctccactaaaaatacaaaaattagttgggtataatggtacatacctgcaatcccagctacgcaggaggccggggcaggagaatcacttgaacctggaaggtggaggtagcagtgagttgagatgatgccactgtgctccagcctgggtgacagtgcatgactcatctcaaaaaataaataaacaaataaataaaaggaaaagagaaaatgggttgctgcttccacagtgaagtgcacgaggttttatagatgagcttgaggaggtggtgttttacatagggtacgaaagattggttggatcaggtatgccattggcatagtgcatgaagaagctggccaccccaccctaatcttttaagaataatatttttaaaattatatattgtcttagtccatttgtgccgccatgacaaaataccacagactgggtaatttatacataacagaatcttattttttacagttctggaggctgggaagttcaagatcaaggcgccagcattggtgtccggtgggggcattcttgctgtgtcctcacaaggtagaaaaatggaaggacaaacactgtgccctcacatagcagaagagcagaagagcaaaaacggcctaagctagtcccctccaggttttttataaggcactcgtccattaatcacttcccaaaaggccccacctttcaataaggattgagtttcaacacttgaatttggggaccattcaaaccacagcatctatatacatctgtaaaataacttacacttgcagcactatatgcctagcaatatactgacacattaatacttggagattaaagtgacttttgtggtcacctagctaattggtgatagagcttgaaatgaaaactccagcatctaactccaaaatatgtgttcttaactattaacttgtttactccttgttcaattattattcccattcacagaagtagacattattaacactcccattctactgaacaggaaagagaggaatacaaagttcaataacttggtcacagccctaaaatagaaaagcatgaatttgacccagtaagccaaacttggagcctgtgcatgttatgttaaccatgacattatgctgcctctctgaagacatcttatcaataaggcttagtaattcacttctttagataatgaaacaaatgaggtgtaaaacgaacctgaggttttaaagttaagacagctagactgtagtaaaaatctagcttagctccctattacctgctctaacttgagctaagctcaagctccttatttatgaaatggctcaataatcctttcttcatgatatggtattgaggcttggaggagaaaacatccataaatggtttaatgtgggccttgtacatactatgtagttgaagacaacaatcacacctgttcaccttgtatgtccagcatcacaccagactcataggagacaatgtaaattttgcttaatgtatgtattaatcaattaaataactgattgacagactgattgattaatagagttctgaatcacccatctgattccaacaacccacctctcttttctggctcatttctagtctatcattttaaacttgaatcaattttctgtatatcctatatccattagtagatttaaaaagagatgatagcaattttagaaaacataaggataaggcaagtctaatacataaagaatttcatccatttaatcataccatcatccttttagactgttcattgcacagaaaaattacagtttcagaaacctcactctttctccctcccaaataagatctaaaatgttttattgtatctgactcccttccttcctctaaaaaccatgcttcggttttttaatgaaaaaaaaaatagacaaaagaaaaagaagaatataattctgagttattgaatttctgattcatttttgttcactaacttttttttttttttttttgagacatggcctcactctgttgcccaggctggagtgcaatggcgtgatctcaactcactgcagcctcaatctcccaggctcatggttctgcccacctcaggatccccaagtagctggagctacaggcatgcaccatcgcatttggctaatttttgctttttttttttttttgccttttttttgtaaagacacggttttgccatgttgcccaggctgcactaacaatttgaactgggtcttcagtcaccaggtaggcctgtaagtaaatctagagtcttgaatattggtggcattccaaaaaattagcacaaattgaatgaaaaatttgtaaactttccttcagttggccaaaaaacaaaactaaataaaatttatattataaaaaataatatttaaatagattattaaattttattaaagtaaaatttatattataaaagataatataataacattctttgatttttcagtcttgggacagttttctgaaggagacataaatgatgctttaaaaaagaatgtactcatggtcatattttggtaaattttggtaaaatgcctttccgtttcccacattttgccctcctccccttcacacccccctccccattcacactggcatgtcaagttttcgtggtagtcagctcagtcagtaaagatagagactttatgttttcaaggcataggtatggcaacatcatgcttggaagaaaataaaatgtgcctgcaactgtgatcgcacatgccataaaaataataccaccatctgcaaataggaactcacatttgtattaggctgtggcttattttctacagaaagaggactcgtttaatcatttttcatggaaagcaaaacactacaaaggaaatataagattttttttgacattttactctttcaatgcagatctttgttctttttcagagaataatattctcttagtaagtacctctttcgctgtcatgaaaagtctaactttttaagaatgagaatctaaaatgtctgtcttctagcacagattaggagggactcttcaaaatatgctatgctgtaaatcggggaggcttctggcccttgtctcaagctgtgttgtactaaacatgttaaataaatcagcaaagaagtatttttaaagataaaaataaaaatattcatgctcataatatatcaagtgacctctgaaataagaaatggcataaaaaagaggaaaattaaaatgcgggatgggttgcaaattcatgaaaacatatatctccacttttccacgttcactccctgctgctgctgctgccactcctgttctcggatgctcagaagaagctttctcgtttacgaacacactgatatttcctctagggaaggaaaacagtccactagtggtgcaataacctaaaagggaaacatctgtttggagcatggagcaatttgttggcccagttcacaatacaaagattgcagctgaaatcctctatacaattctgcaggtctcaccagatcacaaggaaaggaaaattggtctttataggagcatctcctgggacctaactggattaaagaataggctgtgtttttcatttagataaagtttttttagataaagatttttttaatagtacagaaaattcgagaaaaacagcacttaataaaaggatacggctaaaacagtaaattttacgttatgtgtattttatcacaaaaaagaaagataaaaggaaaaaaacaagacacatcctactcctcacatttcagattctaaaacaggtgttaaaaaccccaaatctgaatattaccaaagtaaatctaacttgaaggagacttttgctgtaaatttgcatcctcaacttttactaagaggccttttgtttctgtagagactaatgtcatttttaaggttttggtccttcaaaagggccatcctctcatcctatcaagcctgtgttcactgagagggtttagaacatacccagaggtgtgaggatctaacattaggtgttacatgtacatgaaactagcatgaaaaagaagagataggaatatgttgaaaagttattggaatataaactaatctaaaaataaatacataaatactgtacctcttttcaaagcaccatactgaattttacaagtagacaataatgaagtggctagacaaatctggcaaacaaactaggtgcattaattaccatgaggctgctgctaaccgacaactgtttggtgtcacccaccatacatttgaaaataattgcatttaaaactgggtatcactggttatatagtttggggctaatttatttattttcaaattgcttcataaaacataactgataaaagagaaaatagatacattaggcaacatactcacatttgagtcatatctaatacttgtatgtcaataaattaaataaaatctaaactaaccattgttaataaaaattccatttgaacttctataaatttgtggtcatatgaaccactgtagaatgtaacttgattattccacaatgtatatgtacttcaaaacatcatgttgtacatgataaatgtatacaattttatccacaatttaacaataaaaaactttttaaaaaattaagaggattaaaaaatgatatgtcaggttaagtgcagtggctcacaactgtaatcccagcacgtggtggcaccaaggtaggaggactgcttgagtccaggagtttgagaccagcctgggcaagacagttggactcagtctctaaaaaagaaaaagaaaattagacaggcgtggtggtggtggcgcacacctgtgatcccaactactcaggtggctgaggcgggaggatctcttgagcccaggatttcaaggattcagtgacctgtgatgatgccactgcgctccagtctgggcagagagcaacacctagtctcttaaaaaaaattttttaaagatatgtcatgctggccaagcacagtggctcacgcctgtaatcccagcactttgggaggctgaggcgggcagatcacctgaggtcaggagctcaagaccagcctggccaacatggcaaaaccccatttctactaaaagtacaaaaattagccgggtgtggtggcaggcacctgtaatcccagctactcaggaggctgaggcaggagaagcttgaaccagggcggccgaggttgcagtgagccgagattgagccactacactccagcctgggtgacaaaagcaagactcaaaaaaacaaaacaaaaacaaaaaggtatgtcatgctaactaatcaaaaataaataaaacataagtttaaattaggggaaaaatataattcaaaattattaaaagagaaaagaaaaaaattttatctctttattttaaaaaaattccaaagaaactacagacaatcctttcacaacatgaatttagaacttttcctcgtcatcctctattttcaaagaaatgactacatacatttgatgtatgatccgattcaacacagggctacagctatcagtgttttaaataatctattattagttaacaataaactgactggtacaacaaatccttacttgtcaacaggtatttgtcaggaggccagacttctagttatgatgatgagtgtttgtgttacactgctaagtttgcaaagtaatttttcacatgcagtatttcatttgaatcccactgctccctaataaagtattatcaccagtctcctttgacagagaagtaaagtgacaaagtcaaaacgttagtacagaaaagagtttcaaatagaactctgctgctataactccagttacgcagaatctttccaaaaaaaaaaagctcaaaatacaacttgaaatgcagaaataaaaacaaccacaaaggctttgagagttttaattatttgtatcaagtgaatattctagtattcaagcacttttaagtaatagttcatagttgatactttgagacctacgaagaaggcacaagacaaaaaagaaaggaaggaaggaaggaagacataagaataataaaagcataaggttctgttggcaaactttgttctctcatagggcaacataggattatcatttatcagtactttctagggggttgtcataacaaagcgtcacagattgggtgattgatttaaacaacagaaattttgttctcctggttctggaggctagaaggttgagatcaaagagcaatgaccaccttttccctgagtcttcagatcatcttccttctgtatgtgtctgtgtccaaatttcctctttttatgagggcaccagtcatactggattagagcccaccttaatgacctctttttaacttaattacctctttaaagaccctatttccaaatacagtcacattttgtggtactgggggttaagatttcaacatatgaatttcaggagacacaatttagctcataatatataactcacaaatatttaccacccacttactatgtgcagagcaccatgctgaactcagagtactaatccctgcccttgatggaatatcc

SEQ ID NO: 2967 - DNA, 1180 bp, Homo sapiens
ctgacccctcagggagcctcgggcacactgtcagtgttgtggctgtaccatatggatggggtttgtctgtagcgccccgtctcctggctttgttaagttagtgcctgacgcacatgttggatcttgtttaacagacaccctgtagaccttgaatctgcagaaagcagctccgagccccagaccagctctcaggatgactttgatgtgtactctggcacacccaccaaggtgagacacatggacagtcaagtggaggatgagtttgatttggaagcttgtttaactgaacccttgagagacttctcagccatgagctaactgccccctggcggccaggaagagaaacagctcctccccgactaggtggaaggctggccaggcaccaagcatgtgtgtgcacttgtacctggtggtttctctgttagcagtccattagctcatgctgaattatttttgccttactttcttaagaaacattaattttatgtatagtgagtatattttgcatgttttaaattgtaaatggagctaagtccaagaaagtacttgaagctctcttccagcgagcttaattgcgtaatccctgttgtcctccagggtaagctgacacgtctacataactggttttccacaggcatcttcagttattgcttgtcaggtggactgttttggatttaaccatgtaatccatgggaccaattgagagtcagctacttttataggcatcaaagtattctcagacacctttaatatctttatggaaacttaatttttggccttttatcaatatgtcataacagcattctgaagtcagacattgttaaattgagctattaaactaatgagttttatgtaagttatatggtcttaatttggtacttgtaaatagcactagttagactctttagaatactccaagagttagggcagcagagtggagcgatttagaaagaacattttaaaacaatcagttaatttaccatgtaaaattgctgtaaatgataatgtgtacagattttctgttcaaatattcaattgtaaacttcttgttaagactgttacgtttctattgcttttgtatgggatattgcaaaaataaaaaggaaagaaccctctttcactgactggggctgttgccaggtgggccagctgccgtgagagctgacatgtttggagggtc

SEQ ID NO: 2968 - DNA, 14976 bp, Homo sapiens
attacctttcctgtcattttcttcttgtccaaatgaagttattacaatgaataattttaatacaactctctttctccaaaaatgttcagcgttctcatcctgcttaaccatcagctggaaataaagcttggagatatttcacggttgtaaccacagtggtgaaaaggtgggagacttttaggaagacatcaaatgcctttttatatttcacacaacctcctgggaggtggaggctaggagtctctggcaaaactaattcattatctgtaaacctgttttttatgccaacctagacctcacagaggaccaggacagaatgctatctgaattatgctgtctctctggggcactgctgtctcttcatctttgatgttctgtgccacatgctcatttttctgggccatttgcccatgtactttgttctggataggtttgcttttttaaatttcacatgtaaacttgagaagaaaggaacttgggagtttttcatgattggcaaagcaatgagctctgcagctatccatggaagattatggcgatggatgaaaccagcattctggaggtcatctccagcaacaaaaaatgactagaactttcttatctctgttaagaattttattgatgataacttttagtaacttgaggaaaccttagcgtattcgtctttactatggcatttttcacaaacgtagaaagctgctaatgttaattttaatgtaatttttaagttagcatacaaattacatccctcttgacttactgcccatatagctggagtcattcaaaaagtcagaaatatcagcctctttgcagtggtttcctttagcttttcaggaatatagatgtcgaacaattagtaaaattctcaaatgacagacactttttttcctcactctgagttatatgtgtttgctgatgtgaacagatggactcggtgattgggtgagacttctttagctctgccttctgggtgtcactcattgtcatcactcgtggttagggaaggacttcccttcacattctgttatactctgattccctgtaaaacctaaagattatttctaaaagtcattggttcaactcaccagatttctcattggttctcagagggtgtattcacttagcctataaacccaccactgccatctaatcatgcaatttcttcatctctaaatgtatttgctcacaattctctgtataacacaaagtaaagaaataatggaaaataatattctgcttctaatgctgctgcctgcttagatgtatttcatttcttctaagaccctatcatattggctagtaattatttcctgactcttattttctgctttattttctattcaacctctcaacctctccttcatgagctgctggtaactgagtttgattcattgctcaacaagaattttcattgttcccaatcatctttgtagatgtggttacttcaaaagcgtgtgcttaaaaatatgaagtatatgattatcgagatgtggaaaaattcataataccttatttgtaccattcttagtgagaactgcagctaatattccttgactccttaccatgtcccaatgcccgggccatgtgtgtgctctgtttgtgtatgcacatgaatgggtacatgtgcatgtgtgtcttcaagtgcatgtgcatgaatgagatctcatgtaattcttaaaacagctctatgaattttgggtatactcactatcttccttttacagatgaggatacaaaaattcagagtgattaagtaatttccccaacatcacatacctggtaagcagcagaactcaaaatcacattgggtagctacccaagtcttgcttttgatgccagcattgctcccttactgtacttttctttttgacttatggcatagttatttgaggatgggttttgctcactgcagcagattaaagatgctgtaagttctttgacatcttcccatcaagagttgagttctatttccccttttctatactctggacttgcctgagactactttgataatagagtgtaatataaataatggcggggcattctgagccttgccctaaaaaggactggcagcttccactttgatctctaggaactctgagccagtgtgtaagaagtccacataccctggggctattctacagagaggaagcttaaaccagccacttggaaaggcgaaagagagatagagaagacggtccagccagtcccacctgttccagccctcagtcgttctaactctccaactgtacaagccattttagctcaggccacaaacttcattgagcagaagctagcttattcttactatggattgtcctaattcttgactagtggaatcatgaaatacaatgataataaattgttgtgtcaagccattaagctttttagttgcttgttactgaggaggagataaccaaaacatccacgtttgtgaatgatatattctttgaaaacagagatgatgtctcattcatctttatatttctagcatttgtgtcactggaggtcaattaattttagatgattgaatgaataaatggatgagtggaattaagctattgggaagacaagcacacaaatctcatggagcttctgttccagagggagggagggggagacaggtaataaagacataaataaacattctcaggaggtggtgagtactatgattggaaaataaggcagtgtaagaggacatttttgcagagactggatgagggaattgagtgagccttttagtacctacaggccacatggactttgactttcatgcttaaaaacaaagaatctggcttctatgttctctatgtccatatacccctgagttttgtgatggctgcatcacatctcagggtctgaaaagaggttggtgccagggcagaaagcgtgggcagaaaaagcattggttatgatatcactcaacaaaaaccacccctggaatatgctgcattctctcttccaaatccttgcaagtatagtcccctctgtgtgaaatgttctttacaactgcaagccctttcatcgttttcttgtcaagttaaaatgttccattctcagacagataaatttcttcctctactgtgttacagatctttgtattaatagtacttttttcaaatgcttgctcatcctctctaatataaaagctattgttatatagctttcccccagctatttgtgaaataaatgagagtaaagtatctgtgtcttcccatcatctccactatagctcttagtacagtgtattgcagtagaagatgcttgttacattcaaaacaagaaacagagggaagagataaggaaggaaagggccatgcctccttaactttactcatgtaagaaacacctggcacataaaatatattcggtaaataatgaatgaatgaatacatgaatgaattaattcgtgggtaacttggtactattttcagtatttttggtcataggttcattttctctcctattaaattcctaaaggcaaatatatttttttccagtagttgagtagtcctcattgatgatctgggcatcacactttttgtaatgtacataaggaaccaaattacctggtattgtaaaaattggtcaccagagcatgtcctcaagttctgcacatttaattaaactaatgtcgtaatggtaaccagattctcacagtgtgaaagctccttctgggaagtaacttaggaatttttagacgctaatgttcgttctctctctttctctctatcagaacataacctataactatttaagttcaccaactgaaatattaatgagctaaaaatgctaatttttaatactgaaattgcccaatttatatctagaaaacaatttatgcagtaagatgccttaatgtgatacaggcacacacacccaccacccccctccacacacacacacatgtgcgcgcgcacacacacacacacacattttaactattttgctataatccaaatgaataatttgcaaaaatacatttcccccatacatacctgtggactctttaatggtagctgaacttaaaactttctttctcgtgtaagtttttggaaggatattgattaattaggatgtaatgacattaactatgccactcttgtttcagtagcaatttcaattaatagtgtgagatgtagaatatgtaaaaaaggagtcagatatattgtctttgcattaaaatgacaatggattctgtttatatcattccattatgtcagacagtactgaatggtttagatgtattaatagacaccccaaatgttacctctcccttttaaatatcataactggcagaagtacaaatgttagtgaaggtacaaaactatttcctgattgaatgggagaaaatgaccttgaatgagtcgacacagttaaggaaattaattattctaattcactacatttgaagaattaagtcagagactttaaactgggacattagaatgaatgaccatatcatttgctatataaatatcaggaatagaaagcttgtttgttatttgctgtttgtttaattggttggttcctggctgtaaagggaacattgggctcatcctaattgattaagtaccttgtttctccatattctttaattttggattcaaggcttgtatgtaatctgtttgatggttttatttgcttttttctgtaatgcaactttgctgactaggaattggtttactctttcatgtctgacggctctaataaattgaggagcttaggcagacagctcttttatccaagggcccttactgggctggtgatactgctgaaacctgcctagcctcaaaaaatgctcagagagggataagagtcctgtagggaggaagaaacaggggaatttttttgcagtgacctcaaaatagagacagagagacagagacagagagagagagagagaggacaaatcactcacatggaagtctgtcaaaatgagaatgagagtaggctggttctgctttggctgatgaaaggatggtgaattgaaaaaatgatcaaaagtgacattgtgggccaactaagaaatatcaaaggagaccgtactgccgatcagtcatggaattcaccatctgctagggagcagctgcacaaacatttgctgagtgattatatagaaactgtagtggttggtgggatagatgcagccataatgaacgctcactgggttctgtctgtctcttgctttgctccttgtctttccttttgccttttcccttgcccttgaccttctctttcttttcacaaagacagagctatgtcagggacattctgggagatacaaagatgcatgagacataattcctgccttcagggaagtctcaatctgatggaagcgacagaagtagaatgggcaatgtttacctgtattttttgttttgcttgaaaacagattctgataaaattgcaggaaatcaatggggttgggggaagtctagttacattaattaatgagatgtgcattttattactgtcaaagggcatccattttatctgatttcctctattttgggagtgccagttgattaaaagctttactaattatgttccaagtggatggtatctttctctttctgagaaatttaatctacattcctgtctttgcctgtcttagtcacacatatcaacttaggattctgacttacaaatctgacatgaatatggcgacatgcagtgtgttcttcgggattcatctttaatattttcaagatccacatcagttgaaggatctgagctgatgaaaagatgactttcagctttctggaggaactcaagagggactggggagtttattttgtccttggatgaaagagaaagggttttgttgtggggataaagcgaaggcactttccatggtgagctgacatcttggtgttttttttgtttttgctttattttctggctgcctcgagcaactcatcgtcagaggagccatcagtgcctttggtcttttatgtacaaaaacacaccaaccagtggaggaatatggtgtttgtgatcagtgcttatgggtagtggtgacttttgatagttttgggtttttagtgctagcaagctacctgagtgtcagtgaagagtggccccagtgatactgtggcacagacacagttcataataaatgctctctctatgcctggaaggcccttctccactttttccaaatacatacatcatcctggcctcatggactttcacctgcctagaatccattcctcctcttcctgtaccaccatcttgatattttggagagcctcttttccctcaagctgaatctgtgggaaacggtgtagtatagtgttgaactggatggtgtctagagccagagttcctgggtttgaacccagtacacacactcatcatcagtattggatatactctgttctttgtattgatctttctgtatctgtcctcaattgactgagctccttgggagctcctctagttgtcatttccatatggacaacttcagctgctagcgcagagcctggaacatgataggagctcataggattaaatgaaggaacccctgtcgtggataatgacaggacttgctgtggaacactggcatggcattttgcctattccacctgtatgtccatcaacattgatataaaaaaagttttcttctgaagttagagaacaatgtctccttccacctaaaaaataaccctatcactttccaaggtgcctttttcttgtaatttttttcaaatgtgctatgcatggtgtccagatcattgaatgagtggagtgtttaaagtagttcaatcctttggaaattgtcaatagacttgaaactttggtgatattgccttattatcactaatttaatggttttttggtgtgtgcagataaggtctttttgacaaattgaaaacatgtgaacccatatacttcatgtattttggcagatgcatttgtgatgaggacttcttgaagataatagcctaacttttataattatttctctatggtaaataatattattttaaagaagaattgttttcttcccctattaagtgctacatgtcaaagaagtaggaggatggaacaaatttgaatatgaatttctcctgcagtagaaaagttaacatgtagctcactgaaaactgtcttggtcaaataaatgaatattgactttggggaaaaaagaaaagtgaaggagaaagaaatgtagaaaaaagtataattcattcttttaacgtggcgggttatatgctttagcgtgcatctttttgttgttgtttgtaggccttgatgtattgatgtcttacatcatagatgctaaatcacctctcagtgcatttttaagtgcttaaggcagagttgttcaagtaatagagaaaaagtgctagctcatgtggtctgaatcttgatttccgggtgacaattttcttcttactcctcccatttacatttttgtacgaattgggacatgctcctaataattccttcttctctgacttcagtcactatttccttttgcatttccataggctaaatatccaagctctaagactggaagagttttagttataatataatggatagaaacatccattattataatataatggataaaaacatccattattataatataatggagagaaacatccattatattataactgagataaaatattattactgttatttaacagttgattgttagcatgcattgatcgatatttaataaattaaaaattcagagcccacccttctcatttagcttcttacagaggaaaatcatttcaggctctttagtcttggtacaactgtgctataagaaagcaatttcagtagaaaaaatggatttggatcacagtttcttgatgggttttgtagaatttgtcagttagaaaaaaaaaatggccttactgaaaatgtgtttgcttctctgcttacaccttctaactcagttctgatgctatttgaacaattgttgacatgcctctttacctttcaatagttaggagtaaaaacatttattctcaattttgttttgctcttgcgcctttaaaagttgattaaaagtcgccaggttgctcagagttctaagtgaatagacattgtcattagctctttgataatgttctctgtgttctataaaccaagtaatcaggtttcgcgtgtacttgtgtcaacgttcccagagggattgctaatgaaaacaaaaaggcaatatatgtcattatagtaaaccatcattttgcttaaaataatttcaaaatgagtattttagcccatgtactacatttctgaccttagtttccccaggttcttctctgtcattatttcagctattacaagtcagggtgaattaaccaaggttatgactacaccaacattttaattatctggctttgttgatggcttgttgaaattgctttcatgtggcagattgaaacacagcaaatttatagtagggatggttacccagcattcaaagccttcttcatgtacacttcttttcataggaagagtatttttttaacatttagaaaatatactctatttaaccttattttttaaaaaatcttgcacaacagaaacattattgtttagagaccctagaggtttatggcattataacatagactgtaaattaggattcgttaatcaaggcacaacttcagttgtcaggggctgttctgtgctttttagggtgggtagcagcatctctggtttttactcactagatgccagaagcacctttttttccaccagttgtgacaactagaaatgtctccagactttgccaaatgtcccccaggggaaattattactgggggttgagaaccacagctcttaattgttatttcatataggttttattattttgccccatttatgttaccctttggcatgtttctatgacataggtagtcaaattttagctaattttcccctaagaagctttttttcgtggatgtaaaaataaattttaatttctatggaaaatttgcctcgtatcacagcttcctatatctgatttaaattctcttgattacaggtagattatgctgattcaacttgttggaccaaatgtttctgctattaagaacaaaacaataaattatttctagaagagagagaataaagaagctttaaaaaagtccaacggcctacccaagtcaactattactcaaggccagcagcatcagtatcacctgggagcttcttagaatctctgaccctgctacggattaactgaatcaggttccctaggtgatatctattgaagctgggagggtcacagtatcagtgagtggtcccccaatttcttcttgagcatcgatgaattagcaggtaactctccaaattttacttacattatttactgttgccttatcttttatcatatgcttttaagggatctgctagttaataaacatggcttgcgtttccttttatttcttttttttctttgtttgccagaaggagcctcaaagtgtctagtgattggcagaaaaatagaagaatcaaagattttaatattctgatgattgtattctctgcctcattcttaaaaatgaactatttttcctgaataccaactctttagactcctcttctacctgcccccacaattctcaatatttagaaacctgctcccatgtcaaaaaccaaaaccaaaagtgatttctgtgtagacatgtgaaaacatcctactgaaatgctctcaggttaacgtctttttgcaggtgacccttgctccgtctctgtgggtttgacttacgggtcacaacacgcgatcgttatttcagcttatcactctcaacagaatgaatagagtccattttcacaattgttactttcaaagcaaattactcaagatgaaaatctttgcagggtcggaaagtacataaatattcttagcagggaataaaggtgggggtgatgagtgtatcatatgattgatttcggtttttttttgcaacttttctgtagagagacttggattgcaagaggaaggtttggagtcagagagaggacccaacagaggcatttgttgtgaaaatctcactatatagtattagaggctgttcatgctaatcaaggtgatataacctccttgatatttggggcctcagtttacagaataataacatttttggatcaaaaggattttaatgtaatgggtcatcctgtgttgaagagacggtacattgttaaagaccactaccaaaactgcaggtttccacaggcactcccagaatgtggcccaataaattgagggtctgcaaatcttcaagatttgcgacctctctgccgaagtccttatttaattcagagaaactttattagagatttgtgacataccagaccttatgccaggtagtaagatgaatggaaagatggtaagaaaagcctggatagggatttctgtctgcctagggagccaggtaagtgaacacttgtcattgttcactggactgtaggccagtgctagggagcaaaatgtcctgggactgcaacagggaaggtaaaaagaggaggaattgctactttttgagcatcagtggtgtagcaggcactgtgttatggaggggagactgaaaggaggacagaaatgtgagggaattgagcattgggtaggtaaataagttatgatggaaaattcccatctggaagtgaacacgtttaaggaatggctggtgacaggaggtttgccagtgaaggctggaggtgaagctgacaagagttaggtcattattctgccaacaggtggcaaccatccaaggcttaaacacagaagaaatacatcgttagatttgtgacataaaaagatagagaagcatggaggatgagttggagaggagaagctcaagaggtagaaagtccagttagaatgggactgtttgccaaggcaagaaataatgtgagccaggcagttgtgttcaagggcagcaaacatttgattgaagcaacaggacttgttaatggattcatggcagctactgagaaaggtggagggctgtctgcctttcccagcaccaacagctttgtgcacctgatggtgcagtttcttaagagagaagaagaggaaattaatgagttaccctttcctaggtgagtaatgcctgcgacagctttagtttccatccatacaaagagaataagaatatctacagtcagagaggttgtgaggattaaataaaataatatgtgaaatcaatgtgaaacaatgctcaggacacaatgccttgcaattcaagtgttgtcttctcttcagcacacacacacacacacacacacacacacacacactctcatggaaaactctatagcctattgaaatttttgaaatcgtgccccgacattaaataatattttaatgtgagaaacttacttttaaaaatccaataacattgctgttaaagagacagccaacagccaagtgactttgaatagaattctttcccagaattgtaggtgaaagttaaaggatgctatgcttttgtaaggaaatggtaatgtacactgtgtacatttcttttgccatctattgaatagcttggctatcctcctgtttgccctaaattttttattaagtacttcactgagaaccatagaatgtcagatgctgtaccaagggaattaactgacatagctgtgaaatacttttcctggtctgttagtagactgccattaaaattgaaaacatgactggtctggtgtgagcaagatttacgtgtataacatagtcatagtctgggaaaatgtcgggatccagcattcgttgttagttgaagtgtttttataatcagaaaacaaacctatagcaaaacttcgtgtgttaaaaaaatgttgtgtaaagggctagggcatctttctcaaaacaaactggatatcctcttcacagaagctagtctgggcagatctccaagaacttgcagcttcatcagagccttgtcattaccctggacaaaggcacaatgtagttattgccccttcaggtacctgatcaaggctacagtgccccaagggcatcttctgtagtttcaagcattctagggtgatccctccctccccagtagaatcctgagcctcatttggtaggtgtccaagccagttaccaccattccagcatgactttagttagccacaacacacacataatttttatatttcagtaagaatatccttcttttaaagtatacattttttaaaaaaaagttaaaaaactaacatgcagccacttgaatggaactatcttaagtggaataactcaggaacagaaaacctaaatactgcattgtcttaagtgaaataactcattatcttaagtgaagtaactcagaaacagaaagtccaaatactgcatgttctcacttataaatgtcagataaataatgtgtacacatggacacagaaagtggaataatagacatgtagacttggaagggtgccagggtggtgccggagggacgagaaattataatacttaatggatacaatgcacactattcaggtgatggctgcactcaaagcctagacttcccaacttcacagtgtatccacgtaaccaaactgcccttgtgcttcctaaatctattactttttaaaaagaaaaagtcattaccaaaagaacacatacataatttttatatttcagtaagaggatatctctcaaaaagttaaaaaagcataccactttgcagttataattttatgactcaccagggggaaaagtacttctaaaaggaaggcagaaaacaacttatccaaaattttaaattatttagtcttcagttttaaataccatctcagaagatttaatatgacatctatttttaatctttaaaatcttccttcttttcagccaggatcaatttttatatagccctgacacactacagggaaacagttcactatcccatagacttctttgaacatttacaccattgctcatatcaacagggggcttcttagaattcagcagcaatttttatgaccatacatgttttatacaatgttgcactttttcccccttctttttctgtgtaaatttttcaaaagaaggggataggagaattcctcatcctattaaaaaaatgaagatcaccttctggcctaactctattacagagaacaagttttcaggtgatatgaaagaaaggaaagagctttttttacaacttaccatggtatgagtacagacatgtattaaaaataacagcagcaacaacagaaacaaatggatttctagaaactgtttgaagaaaaaaataggagaaatatcttagtaattttgactttgtcaaagactttaaaatatgacaaaaagaacacaaaagtataaaggaagaagtcatttttgctcttctaaaagcctcggttaaaaaaatgaagtcagtgcacagaagaggagaaaacatttgcaaagcatatataaacaaataacttgtatccaggctatattaaaaaagagaacaatttttgtaactcaaaaagagaagcaacccaatgaaaatggggcaaagatttttacagacatttcacctaggaacatgaacgtgaatggaaaatgagaaaagatgctcaatgtcattagtcaccgggggagatgcacgtttaaaccacaaggagataccaacacatacccctagaaaggccaaaattaaataaagaaactgaaaataccaggtattggtgagtatgtggagcaaatggaagtctcactcactactagtgacaatacaaaatgctaccactgctttggaaaacagtttaacagttttcgaagaagttaaacttaaaatcacttattatccaaccattgtcctcctaggtatttagccaagagtaaagaaagcgtatgtccacataaaagaactgtagatgaatattcactgcagctttatttgtaatagccaaaactgggaaaaaaaatggccggcaacagatgaatggataaacaaattgtgatatagtcacacaatggaaaactgcttggcactaaagcaaactattgatgcaagcaatagcatggaggaatttcaaaatgatgctgagtgaaagaaaccagacaaaaagtaaatacgtattgtataagcccatttatatagaatctcagaaaatgcaagctaacccatagtaacatgtcatgtcagtggttgcctaggttggaaggaggtacaagtaaactcttaggtctgatggatatgttcatcatcctccttgtagaattaattaagtaattccataggtagaattaattccataggtcaaaacttctaaaactatacttgttaaatatatgcagtttcacatatgtcagttatagctcaacaaatattttaataatagcataaatgaagatgatagacatgaatactttgcagagcattttatttggggaacttacatcaaactcagcaacctggcacatctgctgttaaggactcatgtaaaacttgtgatgtttctctaggtcttcatcggccttgcacgaagctgtgacaatttaaaggcatttcaatttattatttttagatagaattcacattttcaagatggctccactttttttttttttttagttgttatggtatttttaccccctctttatagccttaatagtaactgcctgggtcagaggcaaaagcatctgacattcctgtgacagttctgccatgttcttttgaggagcgagtgaaatctcctgatacccactgctgtgagcaatacttctgttgtacaggtataatgatgacaccttttggaggacctgctagagttgtagaattgtagctttgtaacagtgcatatcattgtgatatttcgaggactgatgagcaaataaaaattgaagacatacctaacaccctgtgcaaattgggtctgttcatctccactgtacccttagccttcagcttaattttcaaagttgtttttttttttcttggtcctcttgttttatttttttatttatttttttttattatactttaagttttagggtac

SEQ ID NO: 2969 - DNA, 9623 bp, Homo sapiens
gctcactgcaacctccatctcctgagttcaagcgattctcctgcctcagcctcccaagtagctgggactacaggcgcccaccactacgcccggctactttttgtatttttagtaaagacgggggtttcaccatattggccaggctggtcttgaactcctgactttgtgatctgcccacctctgccttccaaagtactgggattacaggcgtgggccgctgcacttggcccaaactgccttttttcattgtgttggtgaatgcgtgcagagatggaggtctgctttccaatcttacaggaatttgcttttcggtgaaaaggaaggaattgatgaacacaaacagccttgtggcccctgttcagagaaagccaatggaagttggtggaagaccaaaccactcctttctgttccttagaaccacggggctgcccaccaccgggcaagtgtctggcttgtgagagtgttctgacttttctgcagagaacttcaggtctcattgtcccatagagcaactttgaccattgcccaaataaatccttggatctggctggttaacagcagctctgttgctaataaatcctttgaaatcttttgccttgtgtttttcatgacatatttgcatgtcaggatcatttgggttttggagttgcggtctcctgctgttcctaacgtcataaacggatagtaataacccaggaggggattatgttttggggttgcaagtagatgagctttaaaaacattaatcttatttgtgggcaaatatggctaatgatagactagggaaaacaaaataattcaaaatctgcaatgaatgcttggttatttccaaagggcctgctttttaatgaagtgcagtaaataatgaagaataagaggggaaaaaatgtagaaacagcatcccaggagtttcttggtggtgttgtttttgttgttttaataaaaattaaaatagacaaaccaaggcaagggagtagcattgacctccactcccaagtggggctggggctggacctcagggctggatcctatctgtgggtcactggtaaaagcaaacctccattactggggttctctgcgatgggtgactttgccccaggggacactggcaatgtctggagacatttttggtgtccctgggggtgctaaacatctaacagtgcacaggacgtcctctcttaacaaataattatccaggccatgcgtgttgctttatgcctgtaatcccacctgtctgggagacccaggagggaggaacacttgaggccaggaccagcctgggcagcatagcaagaccacctctacaaaaaaattttaaaaattaggcaggggtagttgcatgcatctgtagtcccagccacttgggaggctgaggcaggaggatcactggagcccaggagtttgaggctgcagtgagctatgattgtgcctctacgctccagcctgggtgacagagtgagaccctgtctcaaaaaaaaaaaaaaaaaaaaaataagatctatccagcccctaatgtcaatggtagggagaaactctgcttcctggctgccccctgtcctggcctcatctcccgtgtggattggctcttgccacactttcctgggagttatttcatctcaaagtgaagcctgcaaggggccttaacattatctaatactaagttttactgataggacttgcaggacttcacatagattgaatggctttccaaagttcacagtaacagaggtgggatcaatcaacaggaaaaattattaggagcatttgtaaaagaagaggctttacaggctttttacattctactcttggatgcttactttgctgatgcttacaagaactgtttgttgagtgtctgttaccatctatctgctctgctaccatctatcacccgaagaaacatgaaggctgtcttaaatgggccgtaaaataataataatagtaataataatgttgagaacatttgctgagtgtttactctgagccaggactatactaaaccttttaataaatcctggatctcattaaatcctctccacgaccctgcaagcaggcactattaatgttcccattttacaggtgataaaactgaaacgcaaggagcttaggaagcagcgggtgaggaatctgagccttgctcttctggattgcagagcgggcactcctaactgctaagctcaccccttttcctccctgatgcttagcaattcagttgttcctgtagttaggaggcattgttttcagggtgtttgaacctaaactcaaggagaagaaatgtacatacatccttctggctcacactgctcaggccatcagtggggtttttgccagtgttttggttgctgctggttttggatttttcagtcatatcaggactttagtttgacttccacaaatacttttggtgaagatttactgtgcccaggaggtagctaaacattgggggttcagcactgagcaaaatacttgtcttagtttgcgtttattttattttattttattttatgagatggagtctcgccctgtcgcccaggctggagtgcagtggcgcgatctcagctcactgcaacctccgcctcccgggttcaaacgatgctcctgcctcagcctcccgagtagctgggattacaggcacccgccaccacgcccggctaattttttaaatgtattttttagtagagacggggtttcaccatgttggtcatgctggtgtcgaattcctgacctcgtgatccgcccgcctcagcctcccaaagtgctgggattacagacgtgagccaccgcgcccggccagtttgcgtttcttttaaagcagaccttgagatgaggatttggggtaggaagtttgcttgggtacagaaatgaggaggaagagggaggtaacagaaaagggagagagctgacaaagggtgtgctcatgaggcaactgcggtgacagccagggctcaagccctctgtggatcgctaagagtctatgtggaacacatctcagaattgccccaccaagacccctggactcagggttacctatcaactcccacccttattccttcattgggtgcaggttgcttttgggggcacgattccttggtacctcccaggcctgagagcacccccagggagagaggcagaactgtccttaggtgatccaggcagggtggcttgggagctaggaccacgatgtctgctacaatccattcctactctcgaggaactctcagtcctgtgggccaggaggattcacagaagtcagtcacagtacagtcagacaatgggaagataagtgcaaggaatggagtacaaccaaaaagagatgatgatttcatcaggggcattaaggagggctttccagaggaggtgacatagaaagggtaagagcagattgaaaatagttccctgttatcaacgtcttccttattctcactgctagggcatagtgtgtgtaacgctgtgtccatggttgctggcatttgttgtctgagagctttgaaggcttcttttcctgtgcaatgtcatgtcaggacactcctgtggtcagcatcaggactgggagctggcgtgctgtgctcatagcagcggcacaacctctaagccattgtccttgaagttgtgtctcgaagagcctggtgccagtcccacggccccccacatgcactagtgcggccctccttcacattcagatcatggttgctcctgctgtgaaatcttgggcaagtggccagcctggctgagcctgagtttcctgatgactatccaaggccaggcacccgcggcctccactaatgcttctcaatgcaaaattcgagaaaccagaaagcctgcatgcagatcacatggagagctcgttcaacaccgattcctggggcccacccctgcaaaggctctgagtctgtagttatgcggtcaggtctgaagctttgcatttaaagggcttgcctctctgctgaagctgctggtctgcagtcctcacctggaggggtggagctctaggacctctcctcagttctctcctggatgttttcacctagatcaggggattctcagcattagcaattctgatgcctgaggatggataattgttgtgggagctgcccatggacagtaggaggtttagcagcatccttgacctctacccactaggtgccattagcacctcccaatagtgatgaccaaaaatgtctccagacattgccaggcataccctaggaggcaaaatcactccacctcgagaacgactgtcctagatgttctggaatactgcttctcagacttgaatgtatgtaggaatcacctgggggtcttgttaaaatgcagattccaatcggtaagtctggggaggggcctgagagtctgcatttctgttgccctcctcgccaaagctgctacagccaattggtgggtcaccctctgaggagcagcaatctacactccagtgggtggtatgctttggctggacccaaaggctcaaaggtgtacctgccagtgtgggatttggccagtccctctagttccctctgattcccccaggctaatggaatccatggctgctgcttctcttcccctgccaaccccacctccagcccagggcctcctgccccacttgtccagggagaagctagccttcctttcaaaagcgacaggaagtcagtgttccttcagggtgcataaggatctctcgggccctctcagtacccaaataacccactttggagtctagtattttttctttactcagaatttctaaagaggaaaataggaggaagggcaccttccttatggacagtgacaggcacaggtctgccaacctgaaattctaggaggtttagaggaaattgtctctgtgcagtagggtgagcaggtggttctcagagacaaagaagaagcaattatggaacatgaagggcctaaggcatatggggttggacagagcgggggctccctttacataacactgaaccccaggaattattctgataacgaaacactttgtagacttctagaaatgctgtcactttgcccattgttatttttagccattgtttccttattgggaataggaaacattcttaggagaccttttttccatggtttagtgagaaggtttgagatactacggggaaagaaaagtggctactgccctgtagagctcctgtacggaaggtactcaggtgtgaggaaaggggaaggggcagctgacctctaaaagtcagtggcagggctcccctgggacatctcaggtgggaacgtgggctcttttccagagcgacacgcttccctctgaccactggttctgtggggctgtgaggacaggcccgccctgcacaggacagttctgtactctgcacaatacagagtgagtatgtatgtgttgatgtgagggagtcttccccatttcatgtttgtatgggggaatgcactgcgagctccaaaatgccagctgttactttgggacaagtcacctgcctggacctgggatgccatgtttgataagtcctacctagaacaagaggttatggctccttggttttcccataggaagggtgtgtgtgcatgaggtgagttggggaaagattggtgtgggatagagcagatggggattagttagtgctacaaactgaatgattttgtcccccaactttatatgttggaacctcagtcatcaatgggatggtattacgagctggggactctgggaggtaattaggtctcgaagatagagccctcacaatgggattactccccttataagaagagatactaggcagggtgcagtggctcacacctgtaatcccagcactctgggaggcagaggcaggtggatcatctgaggtcaggagttcaagaccagcctggccaacatggtgaaaccttgtctctactaaaaatacaaaaattagctgggtgtggtggtgcacacctgtaatcccagctactcgggaggctgaggcaggagaatcacttgaacccgggaggcagagtttgcagtgagctgagatcacgccactgtactccagcctgggcaacagagcaagactccgtatcaaaaaaaagagaaaagagttaccagagagcttggttcctctctctcttcaccattgaggtcataaccaggaggagagccctcaacaagaactgaatctgcctgagccttgatattggacttcccagcctccagaaccatgagaaatacatttcggttgttgataagccacccagtctacagtactttgtgatagcagcccaagtggactaagccagtcaggaagatggcttagaccaacaggcttcaaatacagtctgtgaaaagacaggtaccggtcagcagtgaagtttcagtctagtgagaaatgagaaaaatcgagtcaagagagtgactaatgagtaagctaattactcactttaaagaacagagctttatgctacacttatggcctttctcctttggaggaacttgaactgtcttgtcattaatgagagtatggtgtttctcaatgatatttatttagtatctttattagccaaaaccaaaaacacttagaaatagtttggttccaaaaataatttgtaaaatgtttattggcctgtgaaagccagatgtctagaaaccgctgaattgggcaattagaacagtgaaggcgcaagatgagagcagtctggtcttgggtggtggctgtaggaggggagggaggacaagatagaattttgtggctgactggatgcctctgaatctgggcgactgagagtgatgatgggaccttttatggaaatgtgtaagttggagagggaacaagtctggggacaaatgaaacacttgggagtcataaaacatgaatggctgctctttgtggcgggtatggtactgtgagctctattttccattatttcatgtaatcaatgtgaccgcccttccaggtgggggctgttgttgcctcggtgttacaaatgagggcagagagaaggagaggcacattgtcctctgacccaggggggtggaggactcaagtgtgggactgtgggatcacgaagccccagaaggcaccagatccctgttctgtgctaaccaccctgtatgtgggaaccgggtgctgtggagtggatgggatctgaggagagaggatggaaaggatgagaacagagcttagagtaagaaaatatttggctgggggacccagaaaccctcagatcctgtctcctatcagccaatcctctaaaagatgatagataacagggtccacagagggcattggctggcaagtgggaccatttatttctgggcacttttgctctcattgtgcagctctttgcgtcagtgttggaggtaggctgaagccccaaagctggtaggctcgtgggctccttctccccgctcccacccattttccaagtctgccctgagttctggatcttacagtaggaaggaaaggctgtgctggccatgcccaccagcaggaagcaaagcttgtggaaaggcctttggtaagatggcctcagctgcccagctcagggctgctcaggccctgtctgcgttggctgccaatcctatcaaagggataataataataatagtagcaatgattttgatctaggcattgtactaagcactttgcatggaatagaaaaaatgctccaagaaagaaacaagccagaaaagcagttgttccagaataggtgccctttccactaaggccttgcactccagaatcacgtggcccaatcgatgtcttacattctatcagtccttatcagcattcttatcccttgaaggacttttttatttttttatttttagacgggctcccactctgtcacccagactggagtgcaatggagtgatcttggctcacagcaacgtccacctcctgggctcaagtgatcctccaacctcggccttgcaagtagctgggatgggactatgggcacgcaccaccatgcccagctaatttttctatttttggtagagacactgttctaccatgtggccccggctagcctcaaactcctgggctcaagcaatctgccctcttaggcctcccaaagtgttgggattacaggcgtgagccaccgtgcccagcctccttgaagaactttgaattccttacccataaaaacttagttgagcgctctatgtgttcccaattcatcacaggaaaggaaaatgcctattttatactcttaagtttatcctttgaacaaacattggactggccatgagttagccttaagcttttttcattcattcattcatttattcatgtatttatttattcatttaacaagagctcattaatcactcagtgtaaatccacagcgcagagggtgaaataaacaaaagtgtccagtatgatccctgtatttcaagcactcataggtcttaacctacttgaaaagacagaatgcacaggattcaatggacagcactcttgttctgacacatacaccgaaggcctcagaggtcagaaggagtgacaagtggacgagagggactgagagaggcagcatgcacttgaaatagacttgaaggccagagagattggggtatgatggagattgtggggagggcaggaagagacattgtaggaagatgagcagaaatataacagcaaaagaaagggacttgtagaacaatttctttgctttctcttttttttttttttttgagacagagtctcgctctgtcacccatggcatgatcttggttcactgtaacctccgcctcctgggtccaagcgattctccctccctcagcctcccgagtagctgggattacaggcatccaccaccacgccctgctaatttttgtatttttagtagagacagggttcaccatgttggccaggctggtctccagctcctgatgtcaggtgatctgcccgcctcggcctcccaaagtgctgggattacaggtgtgagctaccacggccggccctgtagaacaatttcaagtgactcgtctaaggcatacggcttccccagaggagatttttaaaaaggggggtttggctttgaggactgctttccccaaggccagagacatggcggatcctattccttcccctgccaggtgacttaactcactcccttgttgtaggcctttgtgtcccctcgatagggtcagccctatgaaaaaaggatgaatctacctaggagcaaggccctgcttggggaaaaacaaccaaaatgaaaagtggttcatggctgataagagctgaaagctttgaaagcttcagttgccaggaagggttgcattactgtcaagccgaggcggtggggaatgacagcggattattgtgtcctgccctccctagccttgcactgggtttcaggggagcttctgggacaaaaccattcgagagtgagaccctgtctctaaaaaaaatttttatttgtttaaaaaggaggtatatccatgtgatggagtactatttagtgataaaaagaaatgagctattgacacatgcaacaatgtggatgaatctcaggatcattatgctgagtgaaagaagcaagacaaaaaagagtacatacggcataaatgcacttatatataataaaattctagaaaaggcacgctgatctttaggggtagaaagcagaccaacgtttagggggtcgaatggggatggtag

SEQ ID NO: 2970 - DNA, 933 bp, Homo sapiens
ggatggcagcagcagacacacagggtggttaagaacaacaaacacaggcaaaccacttcaatagaacatggctggcggccatatggacatatttgaatccaacaattaattcagcaaagaaagctgcttgtggcaagttttgaatgtgccattccaggtagtgctttgatgataaatgaggagaagattgcaaagaaaatgacagcaacatttataaaagggtctcatgaatataacacgatgcccagcacatagaaagcatacaataagtgtttgttggataactgtggacagttcagtcgaccagcaaattcctcttaggactctagatgcacggagagtggccagattaatacagactggcaaaagaagaacttggcaaagtgatttgatcacacacttctcaccctcacatctcctgacagttcccctaatccctgccccacttccccgccatgggcttccatcaggaaactccttgatatcatcttcgagaagaaaactgaggcatagaacatttgggaatgaatctaagactacacatctagaatagcagagttacaggaatgcagatgtgattcctatggatgagggtaacctagaggctagaagaacaataggacagaagaagcctgggtccctgaacaaccttgtggagcatagacacctacgtggcctggactgccagctcacaatgggcctctctgtgagagaaggaaacttccctcttgtttaagcaactgtgcttttgagaatctcttggtctataccctaatgaataaggccatcataaatggatatcaaagtaaggaaatttgtgtaaatgatttaataaaacattacctcaggtatgaaataattctaccttgtgccttgacaacatcaggtattattcatgcccttttctctccctgtaatgtctcttatccacgg

SEQ ID NO: 2971 - DNA, 1500 bp, Homo sapiens
gccaggagagagggaggctgggaggcaatggctggatgggagtttatacccctgataattaatacatcgccctcaccacgtgcagggagctgttcttggcaggtatcgtaacagagctcctctgcaaatagagggactttcagagaggagaagcaggattcgagtttccaaaactaacactagatggagtcaggctgagtcatgaggaagtcagacccaaaagagcaagctaatgacaagcaagccactctcttgcagcaagttttgcattgtctttctggcttctaaggcttaggcaatgaacacccttttatcttgttttgcaggcgaaaccacaatttctccaaaagagatgcacaggtgattgagctgtaggtgagcagtgacgtgaagaggggttctagccccgtggaaaacagcccatggttaacatctcaggatgttctgcattcaaacacccaaggctggtaatgaactttcacatggactgaatattggaggcaaataatagaaggaatagaatatacagtgcctctgtcctgaaggaaaatatcatgcctcttctggaagaaacggactgcacagaggaaggattgagcaatttagcctgcagtggaagaaggtggacaccaaaagcttcaccctgtgttggagctgttcatgcttccatgaggccatggtgtccatgtccgtggaacctaccacagaaaatggctcatgaaaaggggaatccgacccaacacacagcttcctacacactgccatcttatcaacagttaggcactactttgtagaacgattagcttcaccctcttagctgccaggagatcccttcttaaagatggactatgtgaagattcgggagtcctgaaacatggggactccgggatggtctctagccctatcgatgatgaacactggccttctggaggggaaatggcagtctgggctggcgtggtaggaagggctttggtgttcatggaatgggcctgctgctctcagaccttcaaaggatggaaccaacgaaggaccaaatgagaaagcagatgctgtgccttgcagagggccatgaatgtcagttattatttttctccttatacaattattttgtggttattattacaatgtacatggctgttgcatagaagacatgactggtggaggctgaggaaagccatgacattctacaattgccatcaggctaaggccccgtgagcatttctctcccttgtaatattaaccctgtatttctgggatcacatcacggaatattctttgcctttccactttccaggaaatctctcggactgggctaccctccttgtgtgtgatgaaagatgagctatatttcagaacaaagtgctgtgttgtcatgatttgcctggactcccagggcgtctcttacccaacttgataacgatgctgttcattagcagcctttgttaactgataaccaagagcggtaatgtgatactcataagcaattttctgtgtgtagga

SEQ ID NO: 2972 - DNA, 1797 bp, Homo sapiens
gccgagatcccccgcgaggtgatcgagaggctggcccgcagtcagatccacagcatccgggacctccagcgactcctggagatagactccgtagggagtgaggattctttggacaccagcctgagagctcacggggtccatgccactaagcatgtgcccgagaagcggcccctgcccattcggaggaagagaagcatcgaggaagctgtccccgctgtctgcaagaccaggacggtcatttacgagattcctcggagtcaggtcgaccccacgtccgccaacttcctgatctggcccccgtgcgtggaggtgaaacgctgcaccggctgctgcaacacgagcagtgtcaagtgccagccctcccgcgtccaccaccgcagcgtcaaggtggccaaggtggaatacgtcaggaagaagccaaaattaaaagaagtccaggtgaggttagaggagcatttggagtgcgcctgcgcgaccacaagcctgaatccggattatcgggaagaggacacggatgtgaggtgaggatgagccgcagccctttcctgggacatggatgtacatggcgtgttacattcctgaacctactatgtacggtgctttattgccagtgtgcggtctttgttctcctccgtgaaaaactgtgtccgagaacactcgggagaacaaagagacagtgcacatttgtttaatgtgacatcaaagcaagtattgtagcactcggtgaagcagtaagaagcttccttgtcaaaaagagagagagagaaagagagagagaaaacaaaaccacaaatgacaaaaacaaaacggactcacaaaaatatctaaactcgatgagatggagggtcgccccgtgggatggaagtgcagaggtctcagcagactggatttctgtccgggtggtcacaggtgcttttttgccgaggatgcagagcctgctttgggaacgactccagaggggtgctggtgggctctgcaggggcccgcaggaagcaggaatgtcttggaaaccgccacgcgaactttagaaaccacacctcctcgctgtagtatttaagcccatacagaaaccttcctgagagccttaagtggtttttttttttgtttttgttttgttttttttttttttgtttttttttttttttttttacaccataaagtgattattaagctttcctttttactctttggctagctttttttttttttttttttttttaattatctcttggatgacatttacaccgataacacacaggctgctgtaactgtcaggacagtgcgacggtatttttcctagcaagatgcaaactaatgagatgtattaaaataaacatggtatacctacctatgcatcatttcctaaatgtttctggctttgtgtttctcccttaccctgctttatttgttaatttaagccattttgaaagaactatgcgtcaaccaatcgtacgccgtccctgcggcacctgccccagagcccgtttgtggctgagtgacaacttgttccccgcagtgcacacctagaatgctgtgttcccacgcggcacgtgagatgcattgccgcttctgtctgtgttgttggtgtgccctggtgccgtggtggcggtcactccctctgctgccagtgtttggacagaacccaaattctttatttttggtaagatattgtgctttacctgtattaacagaaatgtgtgtgtgtggtttgtttttttgtaaaggtgaagtttgtatgtttacctaatattacctgttttgtatacctgagagcctgctatgttctttttttgttga

SEQ ID NO: 2973 - DNA, 1087 bp, Homo sapiens
gtgctgtcaacctaaaggttaacaggttgaagggaccctgggctaaggaagcacaagctggagacaccaaaatggtcttcgcaactcgcctctatattttctgccctgctcctaagccagcctgttggccgactggcccttctccacagatgtcatcttgagcctcttacagagtttcagcactgacattaatgacaagatggatcacctacaggacaaccttggatcctcaaccagcctgattaagcattgacactgcatttgtcaccaccagctctgatggtttggacatgtagaaatgtattgcaggagaatatgcaaacagctgctgtaaggtgagctgatcgggacaactgccagcaggcagaagggaaggcataattaatgggcacccttcagcagagctcagagcagaccaaacgccaatgcagaaggctcaagaaagaggcaaacagactagccactgctccaggatgactgtggctctttatgagtgaagagaaagggtggagactgaagacagaactggggacagtgacaggcttggggaagaacagctgattcagcagtcccaagggtgacatcgcaaaatacatgggtgaagacaacctagtggccgtgacttggagcacccttcctcacaatgaaggcattctgggccagcctgaaaaacagcatggaaataaatcacctaagtacaagggactggcttaaaaatggtctaatgaaatgtcaaaagagttctcctgtggagcttcggagaagtttccttaccctttaaaaaaagaaaagaagaaaaggaaaaggtgatgatgatgacacacagaaggcatacacatttccatttctccctttggaaactttcatgtctgggttgagaagttaacagaaaggcaaacagcctgaggtcaaagatgacacactgaggataacaaaatggaaagacaatctgagctcttgatgatgtgtgactgaatgagccaaattaaacaactatagagctgttctacttccaatctaattatgtgagggataaatgttaatgcgctttttctttaggttttcatttagattttgtagtttctac

SEQ ID NO: 2974 - DNA, 7190 bp, Homo sapiens
ctggatggggcggctgactgctttataaaattaaaaaaaaaattaatattggctgggcatggtagctcatggcttttgtaattccagcactttgggaggctgaggagggaggatcacttgagcacaggagtttgagaccagcctgggcaacaaagcaagaccccacctctaaaaaaaaaaaaaattaggcatggtggcagtggcagtggtgtgcatctgtaatcctagctactcgggagcctgaggagggaggatcccttgagcccagaaattcaaggttgcagtgagctatgatcatgccactgcactccagcctaggtgacagaatgagactttgtctcaaaaaaaatttcatatttaatctctttcatcaaatactcttagaaaacatggtttgaagatacataagcaatctccaggcagtatagtatagtggttaggattgcaggcctccatgccagactggatttaattttcagctttatcattgaccaactgttgatcttggggagttaactaattgctgcctcgattttctcttttatttttattttttgagacagagtcttgctttgttgcccaggctggagggcagtggctcaatcttggctcactgcaacctccacctcccaggttcaagtgattctcctgcctcagcctcccaagtagctgggattacaggtgcaagctaccatgcctggctaatttttatatttttagtagagatgcggttttaccatattggccatactggtctcgaactcctgagctcaagtgatctgcccaccttggcctcccagagtgctgggatcataggtgtgagcctgtaagtgtgggcccgccagcctctttcattcaacatgtactttcatccagattcctcgggatctgaattcctgcaggctttctatcctagaagcactggcttttccagaatctaggcctgagggcaagaacttgcttgtcatagtagtggccaagtcataaaaccatattctcttccgactagggtaggctttagggttcagcttacttcccttcttggaacttaggttgcagtatcaggctttcaacagagctaggatatgctgagtctccttgagtagaggcggcagtgggaacaacgtggtttcaggagacataaattgcacgaaaccaattaggttatttaggggaaagaaatgaaaggtctgcactgaatctagggtaagacttcggtaggataggagaattaagttggtcttgaaattgaggcatgagaggggtccggcttgttggttgggagactgcctaaacaagttatagccacgccattctagacacttccatcctagaagggagggcccaggaagtctgtatataaccaactctagggcagaggctgccagctggtggcccgtgagccagacttgggccccagagatagatttgtttggtttgtggtgttgtaaataattttgaattagttgccaacatttgaaaatcaggacttgccttttctcttgaaaaatcaaaagttcaggcatcattggacccaaattcctgcccgataaaataagctggatttcagtagtcgtagcttctttaaaaaaaaaaaaaatttcttttttgtttatttaaaaggagtatccctatgttgcccaggctggtctcaaactcctggctcaagtgatgctcctgcctcagcctctccaagtgttgggattacaggcatgagcctctgtggagggctctggctccttttttttttttgagacagagtcttgctctgtcacccaggctggagtgcagtggcgcgatctcggctcactgcaagctccgcctcccaggttcacgccattctcctgcgtcagcctcctgagtgctgggacaacaggtgcctgccaccacgcctggctaattttttgtatttttagtggagatggggtttcaccatgttagccaggatggtcttgatgtcctgacctcgtgatccgcccacctcggcctcccaaagtgctgggattacaggcgtgacccacggcgcccagccggctgtggctccttttaaatggagtatggactccccagtccactgtagtcctccacttcttgtattatccccagactttcttgcctttgctcactcatattactttcctggcctctgaaggcactgcactttcagatcctggctttctggctgtaccccatccccttcccaggttatactggcaaggagatccaagcagctttttgcagatttcaggctattttattttacctactaattatcctagaacagtggttctcagccagaggggagtttatcttccaggagacatttagcaatatctggagacacttttggttgtcacaactcctggaagggggtgctttttgcttctaatggtagaggtcggggtgctgctgaacataccaccatgcacagaacagcttctcacaataaagacttacttggcctaaaatgtcaatagtgctgaggttgagaaactctgtcttaagggtgcactctgttcatatgtgttctggggttttggaatcttatgtggtgaggcagggccacaggctgctgactgaactcagtaagtttaggggctcatactcacttgtgggactaatggggagaaatgttggttcttgaggtaggtacatagggtctcctctttgcctaggtgaccagcaggattcacagtaacccaggtgcccagtattataagagtacttgatttgactgcagaagggtggtgtttctgccttgggtgttgtcagcccatttagctttgtgggctttgacctcgggatcctccctcttgtgtaggcttatacacatcaatggaaagtatttgctttgaagatttcaacatggaagtagttcattgctgacacagcggcatcaaagcccagcgcctgctcacagctgagactccattccccctgagtttgtttggcaagggtgacagtgagcaggaggaagagaaggagggagactgggaaggatgagactggagggaagaagaaacactgtatgatccctgagtatccattgtttccatgctttcctgctctcttggacccaggcctggtcagagttctcagtagaaaagatacgctcctcattttggctagttgctatggacagacaactttcttgttctgagagtgatacggggctagggaggactgggtcttgatcatagttgtttcaagactccaaccctatatatagttcgaatgctttcataatgggactaaatgtatttgtgtaattaaaaacaaagacactggccaggctcagtggctcatgcctgtaatctcagcagtttgggaggccaaggcaggaggatcacttgagcccaggagttcatgaccagcctgggcaacatagcaagaactcgtctcttaaaaaacaaaataaaacaaaaaaccacaaaaaaacaaggatactttaaaaaaagacacatacattacatatttatatacatcccaggaggtagccactgattctgggatccccatttggaagggtttacctcccctggagtgttggagagcatttcactcctgaatgtcttgtagttgtcccctccctaccctgcctttcttcctttcttccttccacatttttttttttttagatggagtctcactctgttgcccaggctggagtccagtggcgtgatcttggctcattgcaacctctgcctcccgggttcaagtgattctcctgcctcggcctgctgattagctgggactacaggcatacgccactatgcccagctaattattttgtatttttagtagagacggggtttcaccatactggccaggctagtctcaaacccttgaccttgtgatttgcccgcctcggcctcccaaagtgctggcattacaggtgtgagccactgcgcccggcctttcttccacatttttgttgttattttttgtttacggttgcactcctttgtccttgaatgcccctttataacattcagcctgtctgggaggaattggaaggtttccctccgctctctgttgcctgtgggaaaagagagttgtgactactgtcagcgtagctgggagtacagcttcagattgccaggcaatctcctcatcagaaagagagtatgaaaggcacagttctgcgagagggtgcatatgttattcactattaacttgggtttcagacaacagaaaacctttagcagcatggctcaaacatgttgatgtttgtttctctcacatgttaaaaggaggcagtgtggtttggatgacttcagttcttcagggagccaggtttattccttctgtcttcctgccatcctcagcctgtgacttctagctggtggtccaggatggttattgaagctctagctgtcatgtctgcactgtaactgacaagaaggacaaagacactgcctcccccatttaaagacactttctgaggtcttatatgaaatatttgcatacatcccgggagaaaacctggttgcacagccgtacctacctgcaggagaggctgggcaatgtcagctttattttggacagccatgccttcagctaaaatttctattacgaatgaaaaagggaagaacagatagaggaagataactagccatgtctgccacagagactttggggatttgtttctgctttggctttcagtttggatctgccatttgagtactcctttctcagcaataagctcccagagagccttgaagaccctcacgtgggtcccacgctccttggtgcaggcttgtccagcaaggaaatgagatcaggagaagagggaaggcttggatgttttaattgtggtagctgaatcttagcatctggctttaaggcccagttgttgactttgtttgaactctgatagtttatggtaagctaggggggctgggagttctgggaagcaatagaggagtaaggatcagatggtgaaattttgtttcttaattagaatcaggagaacagtcaagggacttggcttctgcttgacagactgttctaggagctctctgttctctggcagggctgatagtagggtgaggcaaacgaggtgcctggggtcagcgttgaagggcgtactcactctcaggttccggcatgtggtcccctgagagtgagtgcctccttaaattttgtgccctaggtgcctcctagcttcacactaccctggctctgccttctggtgctacattgttgctaatgaaccatttttatttttaaacaaattcttttaaaaattttcaggggccatgctaatcttctttgcgtcgttccaattttagtatatgtgctgctgaagtgagcacgaactatttttatttttatctagaaagaggcgtatgttcacggtaaaccatggtaaaccacagagtggaaaaagtctccttccctctccacagctttagtctttctccccagaggagccactctgaccaggtgcttttgtatccttccagctggtctattggaatggactctgcaggcatttccacaagcagccttctttattcattagtttagcacatagttgaatttccactgtgtgtaatatttacctgtgcacagagaggaccaaacctgtaggacatttatggcaggatagaaggaaggagaaggatcagaagtgagacccagtgccagttagtgggtctgaggagtgtatcagcttctcttccccttggagctgcaaaccagaagcacagttagcactgccaggatattgtcagacagtctctttctccatgtttatttccacctttttgtgtttctctccttttatcctcttctgtctctgcctccttgtctcttatctctcacccctctgtctcttctgtgtattttctcgtcttttttttttttttttttagagacaagttctcactctgttgccctggctggagtgcagtgactattcacagatgctattacagtgcactataggcccggactcctgggttcggcagttctcccacctcagcctcccacacagttgggactccaggtctgctgacatttgtgaactgtgcctatgtcaagtggggcacacgtgtgcaggacacgttcacttacgccaaggtcgtagcgctcattgccatcattgtcatgggccttgttaaactgtgccagggtaagtggtgggaaggggggtaccaccaacagttcctctggattccctgaggagaacatggcgactctgttagcttcactgctcggctgtttctatgtacatgctagcatgtgtcagtgagtgcaagagatgggagtagatttctttctgggctttttgggccaggctggcttggccaagtggacatgagtcagcctgtccctcagggctggtttcctttggtggaggctgggagcattgcaggaagccagccaagggcctaggagctcctgaagcttgggtcatgattgggtcataaaagtaatctgtggggatagagtggctcctgtttgtggtctgtgactgccaagctacaagtaggaagactgggccctccttgagacaggtggcagggtatatggagctggaagtggggtatggaaatgggtggttattttgcagcctttacttttcatctggacttgtattcagcaatccctccccaagtcagctctcagaaaaatattaaaatattgtgaaattggcagtgtctttcctaaatgttggctttagaaagcttttcattcctggatcagagaggactggcagtgagggtaacaggcctaccaagatctcatgagccctagagaggtcttgaggtgtctttagccacagatatctcaatcatttcacagcccagttctctaggtcatcagtccctaaatgtggctgtgtacagtcacccggggagctgagaccctaatctcaaatctgttggatcacattctggttggtgtggagtctaaaaagctgtgcttttaagaattgcccttggcccggcacggtggctcacgcctgtaatcctaacactttgggaggctgaggtgggcgaatcagcaggtcaggaattcgagaccagcctgaccaacatagagaaaccctgtctctactaaaaatacaaaaattggctgggcatggtggtgcgcgcctgtaatcccagctacttaggaggctgaggcaggagaatggcttgaaaacaggaggcggaagttgcagtaagccgagattgtgc

SEQ ID NO: 2975 - DNA, 4618 bp, Homo sapiens
cggcggcaaaactctgcctctgcctggaatgtaaaacccctacccccacttgctaggtgcttcagtctccttggccaccaccctgctgcgtcagccctggctggaacgtctccagtcatggagagctcattacctccggaagcagccttcccgttttcaggagactccacctgttatagagttcccgtttctcaccgtatagctgggggaggaggctctgggtttctgcagacctgagatgccttaatgaggaacagagcccacgtggcatgggaactgttctctgtgacatcatcctgctcaacttcctcaagggggccgaccagtacaaagccaagaagtttgaggaggtgaatgagactacgctgaaaatcgcggctttgaccaacccagtgtaccccagcgaccagaccacagcggagaagcagtccaccgattcgggggccttctccataggccactagggcctctttccagggccccacactcacaaaggctccaggcctccccacagaggaccctgcctgagcaaggggcatgggagggaagaggggctctcatttctgctgctcattccatgagcatagctgggacccaagtgtctgggcctccgactgctccagcagacaggcagtgctccctgctgagaccccaatctcaccttcactccttgcctggccccatctgcttcctaggacccctggggcaggagcacctgagccatccccttcccaaagagtagagattataatgtaggacagatggccacaagggcctaccaagtgccaggcactttcacacacgttatctcatttaatccttagaataatcctatgaggtagatattagtttcccttgttttgaagataaaccaaggctcagagagactgagtcatttgccccaggccagatagccaggatgtgagagagctgggatttgaacgtccgtctgactaactccatcgcccacaccccatgagagaagaatgaactcccagggtccatcagccctgctgcttcagccgcctccaccctgacggtgattcggttaataaagagtaagccccatgcctttcccagcaacaaagtttgcattttagggagactggttagacagtggtgagggaccccatctctgacttgggtgcatcccaaatttagaaggaaacagaaggcatggctgtcagtgaatttttcctcatcactccccatagctctctccccaaaccagggaaggggtcattcttgttcttctctgggaccccacacccacacacatctgggccccctcactctggggatttgattcccggacctgggatcctgtcgtaggctgggaccctgttccaggagttcagcagtcctcatttacaacaacagtgaaaatgctccagtaaggcctggtgccttgtgagctgctcagctgggttggccaggcctgtccccatagggtcttaataaggtgccccattttctaaggttagaagctaaaggggccttttaaaccatcttatctaaccctcttgcttacagatgagcaaactgaggccagaaagggaaaatgactggttcagtgccacagttcatggccaaaaaggaacccacatgtcctggcccttcagggaaggaggcaagaacaggaagctggatccattgacccagacatcctctatcccctttctgtcctctcctacagtgagaggcccagaaattgccccagggcagggctctggggcagaaccaggttttgtgaatcctaagcatatacaatttgggggcatctctttagaaagaatacaaaattaggtattagaaggggctcatgcaagtgaatgagcctaaagaatgtttcaatagcttcatgataaatctgcatctggcagtcagagtgggcatgatcatgaggtcttagctgcaccagctcaactgtagatggagggcggcccctcaacacacggcacaggaagtggggaagggacagcttcaggagtagttcaggaggctcaaatggtgggtacttgcaaaggccttgcccaatgaccccccgctccagggggagaaggggtaagacccaccccacataaagctcaacaccccttccctcactctgccctaacccacagccccatgcccaggatggtggggcatatctccccagggtcagccttgggaattgggcagtgcctggagatctgaccagactatgcttctccagcagagacatcagtgaaggcagcaccacattctccacctgggactcccccaggcatccctggggaattcagctcttgggaggctggggtcacagggattctctctaatggggagatggaggcagtggtgtcctgaagggaccctcccccccaacccctcccttttacccagatggaggtggtcctcctgtaggtgcctccgcccctctggagccggccagcaagtgtgtgtgagcctgaggttgtcctccgcatatctgaactaagttaccacttctgtgtgctagatgtagggttaatatcagtagtgataaaaacagctaccttgtctctgttgcattatggtttactcagcacaatcaccaacataatcacatggaccctcacaccaacgctggtgagtccgctatggtttgtcattaatcctatttgatagaaaaagaaatttacagtacgtggaaatgagatctggaacctatgcccattcctaacactacattgcctctttaatcattcaacataaaagccaacactgattacttactattggcaggcaatggaccaaatgagtgacagggattgtctaactcaacccccactttacagaagaagaaacagatgcatactaaaataaagaaactgaaatagaagaactgggatttgaacctagaacttaatgactctggagtctgagatcacgacttctatgctctatctggggaaaatccagaaacttgttagtacctttttttcctatgtgtgttcgttcaggtaatacaggttttgctgcagtgacaagtaaaatcgcaaggtttaatacagcaaagtaggtcagacagccccctccatctggtagctgtgccatctgagacacttggactcccaggtcactgtcacagggaaagtgaaaactggaggatcacagggggtaatctgaagatcaggcctggagtgggcttacttcacctccagccactttccattggcaggattcagcagcgtgctacagagcccagctttactgtaaggatactgggaaagtcctagtcctcttgggtgtctaggaagagaaaatagtgagcacggccctggctctgcttcgttatctccattttaatagcttctcttctccccctcccaccccactcccaccatttccactgacaattccacacatccttcccttctgtgttccttctcacaaaaccttgttctcagcaagctgccaatcagccttccaggggtattaatagataacattctggggaatttcttctctcaagagtatttcctttttaatcaggggttattcaagactggaaggccttaatcagccaaaggaatgaaaatataagaattgacgttgaggcctaatgctagatcgtgctggagatttgagggacatcttatctaccctggtctgcctcaagtaagcttcagtctggaggagtcttagcccctcttctttcccctccctacctctacccctggttttgactggcaggatgttgggctactggatttggctaaagttcgttctccatcagggagataagtagaggttatacaaagggcttggcattcagctgaaatcccaatccccagaccacgtgcacagaacttcctttatcgcctgtccttcccacccccacagacagacaacactgttcttctagaagcatagcatcaaaagtgggcttattctaaagcatgactctccaataggaaaaaaagaaaaagaatgggcttattcatataaaaaagaaaagctcagtatcactgatcattagagaaatgcaaatcaaaactacgacgagataccatctcaccagtcagaatggctattactaaaaagtcaaaaaataacagatgctggtgaggttgtggagaaaggggaacacgtgctcccttggtgggggcgtaaattagttcagccattgtggaaagcagcatggcgattcctcaaagagctaagaacagaactaccactggacccagcaatcccattactgggtgtatcctcagaggaacataaatcattgtaccatgaagacacaggcacgagaatgtttattgcagcattattcacaatagcaaagacatggaataagcctaaatgcccatcaatgacaaattagaaaaagaaaatgtggtacatatacactgtggaatacgatgcagtcataaaaagaacaagatcatgtcttttttgggaacatgggtggagctagagaccattatccttagcaaactaaagcagaaacagaaaaccaaatacttcatgttttcacttataagtaggagctaaaggatgagaactcatgaacacaaagaaaggaacaacagacactggggtctccttgagggtgaagggtaggcggagggggaagagcagaaaaatattg

SEQ ID NO: 2976 - DNA, 495 bp, Homo sapiens
gtagcctacaggagagcagaactcactgcaagcaaaaaggggaagaaacgctcacaaaagggaaggcagcaggaaaagtaatcgggttgagctgtggaaatgtgttcttcaacgttggaggtgggatctggtgggcagtgtttggatcatggggatggatccctcaggaatggcttggtgtccaccccacggtaatgggttcacaagagatctggttgatgaagagtctgggacctcgctcctcttccttgcttcctcactcaccatgtgatatgcctgcaccttccaccatgattggaagcttcctgaggcctcatcagaagccaagcagatgctggtgttatgctggtatagcctgcagaaccatgagccaaataaaacttttttttttctcaagatgggggtctcaccatgttgggcaggctggtctcaagcaattctcccacctcagcctcccgaagtactgggattgcagagtgagccaccacacccaac

SEQ ID NO: 2977 - DNA, 26089 bp, Homo sapiens
cccgcctcggcctcccaaagtgctgggattacaggcgtgagccaccgcgcccggcctagtgtctgcttttaactgataatttccattcagcgctagattgcaggtcccaaggaactaccaatagatcattatgttttcccaaaatgttctttcctgcttgtcacccaactgatactggatatcacatgtaaaactgtggcacaggtcatttattccacagagcaacaacaacaacaacaacaacaaattgtgggcttttgaaactagcacccagttccatgcctgggaattggcatacagttaaaaggtgtttgtagaataaacctggattcttatgaagagacatgtttcttagagaataaatttggccaaaaaagaagcactcatttatggtccattgttcagaacagtgctctaagccattgtcagtctgatcttgctgtgataattttgtattgaagtcattaagctggggacaagcatcctcagaacacgaaaaaccaaaaataagccaccatacgtttatgctagaaagttattgtcagttcttagttattgcgggatctggccagcagcccgcaatgcaacggggctctctctttgttcccaggtggatcggcaggttgagaaataatagacacacacaagatagtgaaagctgggtccggggggtcaccgccttctggtttcgcagtgtcaataatgcactggatataccagcatttattattaagtttagtgagggcaggggtaggttagtgagggatttagggtcatttgattatgaggtgagatggtcacatggggatgaagtaattctttaacataacatttgtatgtagaagtacagtgcatttgtatgtagaagtacagtatacagagattagaatttacaatatagtgtgtgtgtcagtaatttctaacagagccttaaaacggaaacacagtctttccataatctatgattagcaagatattaatcagcagtaacaattgcaacaaaagctggttacaaacaatccatggaaacaggacgtgaagctagacaaccggttagaccagaaattctcggaagggagtatgccttaaccctaaagaggcctagaaaagcagtggcaagatgagggtgtttatagccctatgttatacatatggacaggtgccccaccatgtgtccatttataggctctccacaagggttgcattccattcccagagctatgaacatctgcttttctgggataggaatcttggtgatgtgaaacctccctgactgcacgtccattcataggctctccgcagagggaagcacatcacgcgctgttggctcgttctggcggtccaacctggcattgtctttacacaatcctgcatgcaattttgtatttacaataatcaggagcatttcatcttttattcagtagcagtagtttcagggggtctccctacacttagtttcttcaagaaaaaattttggtcaccaaaaataggtaagcagctgaattctgccttcagcatgtcaatagggaaacataattaatcagaagaacaggctatttgaaatattgcaagttcacctcaacactggaaatcagtgtttctcaaagtatcttcgatgggacatttgaataagaaccaatgtatgagtccaatcgccaatgcagatttccaggccccaacagcctgtttacactcattatttgggggtattcacaaaaatctactttttcaactggttctcccagaaggtcctcaactagataaagttaagtaaccttccccatgaagtatcattaccatagttctagttgggaaaccattcagggaacaaatcaggcatcactgcagttgtgttttgtgcagaggaaagtgatgctttaaatgagacacctggaatgtttgttttagacttgcatattttctgtgtctttgggcatcttatttttagttgtagagctaattatctgatgataggatttttttaagaaaaggaagaaaggaaggaaaaaggaatacaagaagctagttttctttgtcattgcatctagtaagcaaaaaaaagggcttgatcacaatgactatgtggaggggatgcgagaggaggttagacaaacatattggataggtgagaggtatgggatgctatgtagcaagcttagaattttcaattttattctgtaggcaatggtaagttagtgaaggtggagtagaggaatcagatgatcaaagcttgtcttgaaaaagtaaagaaagaaaggcaaactatcaagtggactacagtggagagagcagtatgtttaaaactgcaagagatttttgcttgcatgcatgaaaagaaaaggcctgcgcatgcctgaattcaaccaagagcaaagggttagttgccagctagagaataaaaacaaaatacctgctgatcagaaaaacaccctgtgagcagattttaatcaaagccctaaatatgatcactgagaagtgatcatattcccaggtcactgttggaggacagcatttctcttctagatattttttgtgttgttgagtttggcatcctgcttgggattcttctgaaggtttatgtaggttgactctataacctcagaatatttgcttaggatttgatggtttttcaggcagactgcacagagattctgccttggctagacttttcctttgattatagaggggtccatttgtctggtagcctcttcatgtattcctttgaatgttagttgcaatataatgtcaccataaaaggatagatagtaaaatggtagtgactgaaatctttcctctcctaccaccattaaatcagagtcctcaataactcagaatctcattattattttgatggagagatgaagggcaattcattctttcagccctccggtaaacattgaatgccctctatgtgtcaggtactatctgagatattggcactgtgaaactatgaaacaataattttcagtcaagtgtgggggaatgggcacctacatggctaattagtggttaccatcactcttaggataaaatcacaaatccctcatctagtcttaaggcctcaggtcttctagcctctctgttgtttctaggcacattttgtttcactcttttcacattaggtgtgccacccacgtggctcttgtttctaacattaccttggtcctctccacttcagagttttcttgtttgctctttctgtatccaggaatgttctcctatttcccatttgtctggctagcctccatcattcttcagaatttattttaaactgtcacttctctgaggacactttctttatcctccaacactggttattcacctcttgctacgtattctcattgctccttctgtttttctttcatagcacttattaataagagaattgaacattttgataatttttggttaatttctatttcctgttccagactctaagcttcatgggagtatggggagtggcagaggcattcactgtggtaacttcagcatgctgaccagaccataaatggcacttggtacacatttttaaaaatatttgaatgaataaatagaagatcgtgagtgcaacagttgaatatgcatggagacagaggatgagcatatcaaattcaatttggaaggatcagggatatcaatactttaaacccagtatctactaaatacacaaaataatgccctgtatctcttcaagatcctaactcatcaaccacaaactaaactctaatgactatgtttactatgatggtaaaagttactactattttaggaaaagtttcaacaaaagtcaaaacagaatgatttctaatgtaaatcttaactataagaaaataagcacattttcaattaatggacatgtttctgtagaataaaaaatggctatttctatgtttgatcagtttatatataatcctttctgagtaaacattccactatctggtttaataacttcaatatacttcttaaagattaacacgattatttgcttcatttagtcttagtttttattagtgtacttgctgtaaattgtttctctcacttattttttatttcggacatatctgtgttgttgtataccaggtcaaataatattctaactggaatatacatttaagggttctgtattctctcaccatctaagttgataatgaccttagtcatttttgtctttaccaatttgcctgtttgctatatattcttaaggtagttcattgaggaaattataatcaaaatctatgaagtttgactaattattactctcaacataaagttaaaatccaaaagatctctgtggaatattggtcagacaatgtatgaaggcatatacatgatgtatagtaaaactaaatccatttgagctatccattatcctaggttatcacatatatgtcaattattaaccaaaattggcagtaaagtgttatattagtctgttctcacattgctgtaaagaactacctgagactggataatttataaagaaaagaggtttaattttctcgtggttccacaggctgtacaggaagcatggttagggagatcatcaggaaacttaaaatcatggtggaagcaaaagggaagcagacacatcctacatggctggattaggaggaagagagagcaggggaaggtgccacacacttttaaacaaccaggtctcatgagaactcactcactgtcatgagaatagcaagggggaagactgcccccatgatccagtcaccttcctcagactcctcttccaacactggggattacaattctacatgagatttgaggggacccaaatctaaaccatatcaaatgtaaaggctggaaagaaaaaaaaagtcaaatgtacacagttttgcacattggaaaacatttactggtggtcgtatttacaagtaacctgactagatattttgaagttagaaaatttagggttcagtccattgagcaaatatactgagctttccctgcatgaaaaccattgtactaggctcaactgaaaatagtggtggtggggagagaagatttgttctttcaagaatttgaaatttgttcagaaggataaaagcaaatagaatctaacaactgaataatgcttgaaacatgacatatgagctaataaaaatacatcaattacagtggtctttaattacaagttagaggtgccaaccccctgcacaaatgaccatcctcatataacttttgactcccccaaaacttaactattaatagcctactgttgcctggaagtcttactgataatatagataaccgattaacatattttgtataatatgtattataataaagcaagctagacaaaagaaaacattattaggaaaatcataaggaaaagaaaataaagttactatttattaagtggcagtgtatcattataaagatcttcatccttgttgacttcaagttgagcaggctgaggaggaggaggaaaaggagagtttcgtcttgttgtctcaggagtggaagaagcagaagaaactctacatataagtggatccatgaagttcaaacctgcattgttcaagggtcaactgtaattagttttgggtatagtgatagtaaataaatgatgtgagaggcactgaaggagagcttcctagagggggtgagttttgagcaaaaagttgaacatgtgagagcttatggatttgtggggacaaggcagggtcatgacttggtttcattggaatgagtaagtcctatgcaggtcccaataatagtataaaaacaattagaaactatgtcagttggtgactaaatggctgctaaaaagtagtttggttcataaaaattatcaattttaatgatgttttgaggacattatacgttaaaaagtaaattctttattagcctgatgcctaaatgcaactactgcacaactgttttcatttttatatggtgctctacaagccttcactacatatgtatattttacattgttgcaatcatagtatatacagcattttgtattttgcatctcttatttaactgtgcatcataaacattttctacctttctatatagttacaataactttaacagtataaattttatcatattgatctattgcaatttactaaatcattgccttaatattgcatatttagattgcctcctggttttattttattcttggtaatgctgcaatgaatactgctgtacatacaatatgtttttcttctgtccaattatgttagagtacaaattcacaaaaatagattcatggaatgtaagggttagaacatttttatagttcttgctgttctgccattctgatattagggtcctgcaagttttacttggccactagcaaggtatctaggagccgcttttctcgtgtgtatgccaacaataggtttaattactagaaatgtttttgttaattttataagcttgaaatgctattttaagataggtttatttagggtttcttactttcttgtgtgggtgattattttcttagtttgcttattttttgtatttccattcatataaattgtatgttactctcatttgcctttttagctaaaatgaaaactcttttcttttccaaataataagaattatttaaagggcatgagatttatgtaggaccaatggaaaatattcactcaagaacaaaccaggagaattttttgtccttcccctgtgaagtctgagcatatcttaatacataaaaaaataagtaaatgtgctgctgctgtctccggttgaaacggcaggtagggggtccactttcttaggctctttactttcctggctgctgaaacagctctgcagaatgaacattaacattgttttacagtaacagatacatatacttgacaaaatagtctatggctgagttcaaattgtaagttaaaataaagcaaagttgttttagaataatgacactataaggaaagtttcactgcagattttttaaagactcaggcatgcagaatatattttttccttattcagtttagtaaactataaaacaacatattgattgccgagaagaatactaaagtgagccaggttatgatttagaaagctttcaacgtagaagaggagataaggtacgtatacaaatagcaacaagatgtgggattatgagaacattctctaactgaagagtaaatagattttattccatacagaggagaaagagaattactttattggggtggggggccagcaggactcatttcaaagtcttgacaggagattctagtaggcagcattcagggttggaaggagggtattccaaaaagaaaggccagcaagaggcaggtcagagcaacaggtgtgcagggaggagatcgaaggaatgggcagagttcagatttggctggacatgcctcaggtaagaggggtaaggctgaaatcatcgtaggagaggagaggggtgcaggcctgagaggtgtgacttagggattttagacttcttgttttggaaatggagatactttatttatgtttttgagatagagtctcacgttggcatccaggctggagtgcagtgacaggatcatggctccctgcagcctcaacctcctgggcccaagtgatcctcccacctgagcctcctgagcagctgagaccacaggcacatgccaccatgtctggctagtttttaaatattttgtagagatggggtctccccatgctgcccagactggtcttgaacttctggcctcaagagatcctcccaccctggcctcccaacataatgggattacaagtgtgagccgccatgcttggctgggaatggagatacttacggagagtgacaggattaaaactacctttactccacttccaactttttttttgacataaactttcaagtaatgaatttttctttggcaatttccatccttacacattttttttcaagaactttctgtaaattgtttgtgtccatgagaaagagtaacatatgagaaagagtaacacatttcagaaagagaactagactgagtgtcatgaaactggattatagtcacagcatactgggttatttggggtaagtaaatctgcctctctgggactcagcttccccatgtgtcaaatgagaatgaactggatatttccactgtttcttccacttcaaacattctgaaatcccaaatatattttgagtacattaaagattcattttctaaaatctatatatcttctctataaacttgaaattccatcttgagggagtcatttctttgtattttagcttttaaatcatcagtagttctctttccaaatgagaataacccaaaggtaatatggcaaatcagtggggtgttgagaattcaacacgacttaattatattaacgatctctcacttggtgtctgggggagtagaaatgtgtcatgtgaaaagtgacgattgaaaagagggaatacttaataatggtaataataacaaaaaccacttacatagcacttaccatgtacttttatgtggattaaatcacataatcctccccacaaccttgtaaaattggtactactgtattataatcacttcacagatgagaatgctgaggtatagatatataattacttccttaagggcacacaactcattagtggcaaagccagaatttgaacccaggaagtccgactgagcatccgtgtgtttaattaccacacagcactttttctgaagggtctccggagagaaacatctgtagagctggattatgtctatagaaacacaaagatctcagtctccaggggacatgagtacaaggttttaggaagggaagatacaaatgtgccagtaacactcttgtgacctcaacattttgctcaggaatgtcatcatcagaagtatcattataactaatcaaaacaatattagcctctcccttatctgaactgtgttttaaaatgtagaattatagttatactactttggcatgcattgatttcagttagaggaattcggaggtggatagatgagattgttatttggagctcttagtatattgcaagaccagaatgtccaagcagtgtggctgtgagaatagggaaaaccagttgggttttctagtccttgggtcatgttgagggactaggactcctttatgcatttctcagctcaactctttgaaaggtcaagctttcatcaaagtcttagtattttttgctggctttctttaagaaatagttttcctatagaatcccttagaaaaactactttttgttttttctgagtttggcttctcaacccagcagacaggcagaattggaaagaaaggtcttgtcttcaatctatagaggtgatcaggtgatcaattaaaatactgtatgtactgtccgggtgcagtgactcatgtctgtaattccagcactttgggaggccaagaggggtaaattgctcgagctctggaattcgagactagcctgggcaacatggtgaaaccctgtgtctactaaaaataaaaaaataaataaatgaataaacaaacaaacaaataaataaaactagcccagtgtggtggtgtatgcctgtagttccagctacttgtgaggctgaggtgggaggatagcttgagcccaggaggtcaaggcggcagtgagctgtgattgtggctctgcacttcagcctgagtgacagagtgaaatgttgtctcaagacaaaaataataataaataaaatactgtatgtgactgcgctttgtgacttattaactgccctacagatacaagagttgtggttatatcccctgaacatttatattccaagtgaccatcaccagagaaattcctctgttgaaagcaagtatttgaacagtcaagatcacagcttttgacaccaagcagatcagggtttcaattcttaagtctctgtacttcatagaccacagagagagcatgggattgacatccacactgaccctgtaagcttgttttggggcttcgatggggtagtacatgtgaattgccaagtccagccccacagagagtactcaataaatcttaacttttattggtagtgttagtgatagtcatagaagcaccattctaaagcaagagccagaaaaagcaatagaacaactctaattacccagcatatacttgaaacctaaactgaaattaaaaggtaaattttaagaaaacaattgtgtatcccaagtcttcagaggcttattctctttgacccagttatttcacatctaggattctattctaagtaaatagtcagggattaaggtaaagacttatgtacaagaacagtcattgaagagtttttttttttccttcttgagacggagtctctttctctgttgcccaggctggagtgcagtggcccaatctccgctcactgcaaactctgcctaccaggttcaccccattctcttgcctcagcctctcaagtagctgggactacaggtgcccaccaccacgcccggctaattttttgtacttttagtagagatggggtttcaccgtgttagccaggatggtcttgatctcctgacctcgtgatccacttgccttggcctcccaaagtgctgggattacaggtgtgagctactgtgcctggcctgaagagttatttttaacagcgactgttagaacctacacgtccatccataggagagtgctttaatagagtgcaatgttgttatgagatatttattttgcagattataaaaaataattcagaaaaatatgtaatgacaaggagcaatactatttaatctttcagagaaaagtcaagattatattatggttttaatgctattaattatactaatatttataaaatatgtgaactaaatagatgtcctttgctgaaagtggagataaaaataataacgataatgcctatcttagaggatttttgtgaagactatatgatggttactacatgcctgacatataatacatgttagctttgtcattggatgttggctaaatttaacttattttctaaattttacttaaacttcatcatacactaatgagaatcttttattttacaggaactgagcaagatgctggggatacagaaatgattaagtaggtacactgagcatatgacattcacaatccagtgaggagagaggcatataaataaacaggaacagtggatttagaactatttaaattctagagtcagctcctaagacatgaaacacatattatcaaaataattaggtgcacagccattataggcaccttttcgtgagttttaaaaaggtggcccctctctttaagaatgaattatagaaaggtacctcttgcccccagctgaatcagctgcacggtagggtacaggctgggtttcagcccctactgccctctcctggtttattcctgctggatgcaggctgctcacctgttcacagaggccctgaaaatacctttgaaatgtcctgaaattgacgtgaagcacagtaaatatgatttggtgtctataaccttgaacaataattattttgcacactgaggtttgagaaatactgaactagattaaatgatggaacaaaggaaaaaatctataggcagttgtccagataatcccttgtgttgtatgggaaatgtgcagagaattctgaagtgtttcttcttaactgcagagttgtctccattatattttaatagtgtcataagttgaatacacattgatagttttgttttcttgagcattgcataatataaggaaaagcatcgagcccagggattcacatatagcaaatgtttactaaatattagttaatccaagtattaaccttgtttcatcatatccacaggcatagtgtgctttgaaaagttatagaatagtgcttgcctctcattttttgttttcctcactgaggtcctgctaaataactctgagcagttgtcactcccaaacccatggccattggattaggcagagttcttcagagacaaagaaccaatacaggatatttacatatccttgtctctgtctgtatctctctctctctccatatatacacatctctatttctatatctctatatctctatatctatctatctatctatctatctatctatctatctatctatctatctatctggctagctatctagctacctagctagctatctaaaaggagatttattatgaggaatatgttcttgtgatgacagaagctgagatattccacattctgccttctccaagctggagacccagaaaagttatggtgtaattcagtcctacagcaggacaagatgagctgtcccaggtcaaacagtgaagcagaaaaaaaaaaaaaaaaaaaggtcggggggtggtggatttctttttcctctacctttagttctattcagactctgagtggattggataatggccgcccacatttgggaggaaaatcaactatactgactctactgattcaaatgctcatttcataggaaaacacccttaagtaaacacacccccagaagtaacatttaatctgggcaccccatgacccagacaaatggacacgtaaaattaaccatcatggttatttgtcttctgcaaagttgggaatccgcccatgagctgaatggtgcatgatgtggctccgcgggaacacaatgtgcattagcatagggttctggacaaaactgtaaggtgtccccaagagaggcagaacagcttctggtgactagctgcacattcactctcttgctacaagtttaaatagtaagcagtagctataaactttggtttcaatttgttagacaaagcattgcctggctctttcttctttacagagttattatttctagtttgcttgtacctaatgctttcctccagggatttcagaactgttcagctgcaaattcatatttgatgttcttgttctaatcccagattaccgcatgaggacagctggaacagaccaaaagagagaaactcatagggggaaggaaatcattagcctgtcttgagtcaccaggacctgataaaaagtcagattaacaaggcttaagctgctatagaaagccagagaaatgccctcaaatattaatcttgaatatttccattccactaacattgcctggaagtattttaacattcaccagataggcatcccatcttgaagaaacgatatggttctgtaaaaagaataatgaattatgtgaggattgattttcagtatggactttagtcctgcatagtaatggaatgtggactggggagcaaggctgtttggattcacatcctaacatttcacttgataagttgcctcatttgtaaaatggggactgtaataacatctacctcctagggctttgtgtagaatattaacaaaacagaatcttgcaagggttaagcactcaataaatgtgagatactattattattgtcattattgtaacagataaaagttggcagatattggtggatgtattcattgtcaaatctccctttattagtctttatattattaaataattgggaaaataaattcattttattttatatgcaccataacttgttcaaattttatttcttaatattgataatgatttatcataaaatttatagtttatggagtaccttcacatgcatttcttcctccaagccccacaaggatgatgcagctgaggctctgggaaattggttatttcatccagggtgcctgattggcgagtggttaagacttgaacccatgtcttcacaccccagatgcattactgtagctgttacactgagtggaggttgtaaacatacacaggcttcgttgttgttagaatcttgatttgattgtatcgctaccacttactataggtcattttgtgagcaactgcctaatttcatggaatatcagattttatatcagtaaaaattagaggacaatgacttctctctacttgctatataaattaaaaaatatatatatcagatcacatatagagatggagctatcccagctctgggtccatggtagttaacgcaaaggcagtctcttccttcatttatcgttgataatgtaccacacatagtgccaaactatcattttttaaaatcagatcaatgttttcatcaaagaaagctgatgttagagtttgattctagtggcaccaagatctcctgtaatccatgattgcgtttgccagccattcatggtgattaacatacttttgcgaaaaagaagtgacaatgaggagaatgaaggtaataaggaggaaaaaaagaaaagcggacttcctctagacttagagaacatacaaacttcattagcagctaaatagcaaggggagagggtcccgaacaatgatttcactcctttgctgctgtgaactaggtgttctagacataaaaatagaggaaagactagaacatatgttcagtgggtaaatggccctctgcgttatatcatcctggtgaggttttctaattattcagaattatcattttgattgtgaaacaaatgcttggtttaggggaatctttggattagactgtgtgctccttgtacttcgtctccatatggttcaaggattttaaggtgaaatgctacaaaaatgtaggtgaatgataaagttgctagaagtatgtcagagaggtgtgagaattttgccttttcatactgtggggattattttgtacactgctaattttatgattagtcctggatcgaggagtgcaagcaattgatatatcttagatgtttgactttattatttgtttttttttttttgttgttgttgttgttgttgttttttgagacagggtctcactctgtcacccaagctggagtgaagtggcacaatctcggctcactgcaacctccaccttctggattcaagcaattcttgtgcctcagcctctcaagtagctgggattacaggcacctgccaccacacccaactaatttttgtatttttagtagagatgggggtttcaccatgttggccaggctggtctcgaactcctgacatcaagtgatccacccgccttggtctcccaaagtgctgggatcacaggcgtgagccaccatactcggcctagttgactttaaataacacaaaaggaagttccactgaaaaggtgaatcctattgctggtgtaaagtgcaaaccattagtaagttaagcaagtctagctctaaaataacccaaatctgcctattgctttccaaactcagggctgctatcctatgtctgtcacatgtgtttctcatgttgattacagcattgggctcccaactggtctccctgttgccactctttcaggctcataatctattttctactcagtagccagagttatcttttaaaaacataaatgagatgatcttacttccctgcttttgaatcttcctgtagtttctaattttacttactatacttacaataaattcaaatttactgtgatggtctacaagacctgatggagtctgacccttctgtctatgactgcatctctcactcttcccactgtggctccatatcatccactctccctggccatctttctgatgtcagccagactttcttctggcttacatatttgcatttggtgttccctctgtctgaatgactagagccttcttgtcgtaaaagtctcagtccaaatatcacttcttcaggtagatcttccctttctttccagtgtaaggaactttatttgaagaaccctaaatgaagttatgttactcaattattcactcgtttagctgtctctccctcaactgtagtgcagtttccatgacagcaaggatgatgttcatttcttgctgttaccattcctggtgttcagaaggcactcaagaatctttgctgaatgaatgagtaatacatcttagaatgctagtttccatgaaagggctacaaccagtctgcaggatcttcaggtcaggaactgggccttgtgctggtttccatgatactgctctatacgtgctcaggaaatatctgttgaattggattcaaccaaaacatttgaatttctgttcagtgagaagtgttccctatgtaagaagaaatttaaagctatgtttgataacactcttctgagagaaagcctgctttttagttgaccagccatcccagtttgccttggactgagggatcttctggggacatgagactaatgggtcaccctacatgccttccacagctttagagccagaaatacctaacggatcagttaggaattatatttaggtgctagtaacaaaagccagaaataacagtatttaaaccacaagagtttactgtttcatgtaaaatgagttcaggagtggggacatcagggatgtatggcagccctggtgcatccacttctgaactcatttcatgtgaaaggtcatcagtgacccaggtttcttgtatggtgtccactatccttagtgtatgactctcatctcagagtagcctcatgttccagtgtggctgctgcagctccttcagctatgacataacatatacattgcagccagtcacccaaggagtaaagagggacagaaaagcacgcttttctgtttgttttctgtttgtttttctcttaagaagactgtttcatttaaaatctgtttgtatttcacaagctttctgttaagtaaaggagagattgggtaatatgagataatctttcagccgggcacatagcctcttctctaaataattctttttttttttttttttttttttgagatggagtttcactcttgttgcccaggctggagtgcaatggtgtgatcttggcttaccacaacctccatctcccaggttcaagcaattctcctgcctcagcctcccaagtagctgggattacaggcatgcaccaccacacctggctaatttttttttttttttttgtatttttagtagaaacggggtttctccatgttggtcaggctggtctcgaactcccaacctcaggtgatccacctgcctcggcctcccaaagtgctgagattacaagagtgagccactatgcccagcctgaataattcttattaagaatttctgttactaagaaagagagatggggtgatgagtaatacacacttacttagcatcttctgccacatctagtttcactacttattgacttagtgaccttacaagggttgtttcatttctctgtgcctattttaaaatatgcattatggtgatgcaaacaaccataatagtaatagctacctatctacggggttatgctctttgtcaggcattttatgtacatgatggtcaccctcacaataatgccacaaagggtaggtaattatccttgtttagatcagaggagtgagacttagctatttgtggtaaagccagaatttaaacccagagcagtttggctcaatacccattctttccattacactttgctttctaccttattggctgtcaagattcaatgaggaaatgaacataaactgcttgacctgtaaatttttgaaataaaccaacgcaatgattctgttaagaaaatatcttggttttctctaacaacaacaacagcaacaaaatatctatggtagatgtgtgtaggaagtgatttgaggtcaccttgaagccagctgactctgaagaacaacccttcttcttcccaacttctgatgttgaaaaactctctttttcagaaaattatattactggtctgactcaaatcacttctttactttttatttttttttttatattttatttttttgagacagagtcttgctctgttgcctaggctggagtgcaatagcccgatcttggctcattgtaacctccgcctactgggttcaagtgattcccctgcctcagcctcccaagtagctgggatgacaggcatgtgccaccatgcccagctaatttttatatttttagtagagacgaggtttcaccatgttggtcaggctagtctgaaactcctaacctcaggtgatctgcccacctcggcctcccaaagtgctgggattacaggcttcaaatcacttctactattattattattattatattattctattttgtctttgcatggttcggtcctaatggagagctagatgacctggctgtgattttttatatgccacgagaaggcagttattaagtcatttctcactcttctctctaaaagtaatcaagaggtgaaaaaaagtctcccatgagttgttctaaggagacaaaaatttcctagtcctgggggcaggatgaactatacacctttcttgacatttggcaataaatattctatatagtgcagctctttgctttggcattcatgtcttcatgagcccagagcccaggaaacagttcccacattgctccatgttgaagtgagttgagttgttttgaaaactcgtgaagttttaagataccttcttttgtgaaatttgctacagccatcagcctcactaataatgccttgaaaatagctgattcctgtaagatgcactatgctcttctctcatctcaaagccttcacaagaaaatttcccccagacacaatgaactcctgtgcagagagtgatggctgtatttatttccagggaagaataaatcagaagaaagcagggagaatattcacatcttcaggcctcgaaggaggctgctgggaaacaaatgcaagacaactggtttttgtaagataactcatagcctgtttgaaaatccactttgcaggaaatagaatagaatcaagaagccaaagtagcaatttctttacgtttccattgatcattgtgttccctgttttaaacattcttggtttggaaaaagtgtagattacatgtaacctttgtgggtatagtttcatacaaaagtattagaggattgagtgagaaaaccaggaaatggaaagtctcaggttgtattaccaaccaagcatcatacaatcataattaaagtgaatgcttatcaagggcttactatatgtctgacattgtgctaagatctttaattagtgatccctcatttaattatacaaataaccaaagtaacaatatgtagtagaaaatgacatcatttctatgtcacagatgaggggatggaggcccaaagtctctcagtaacttgccccaagtcacttcattgtaggtggttaagatgtgatttggacccatttctgttttccagggaattacagtgtattagacttctaaagctgccatgacaaaataacacagattgggtggccaatacaatagaaatttattttcttactgtgttggagtctgggatttcaagataaaagtgccagcagggtgggcttctcctgaggcccctctccttgtcttgcagaatactacttttttgcagtgtccacacaaggtctttctccgtgtgtatacactcgtggtgtctcctcttcttataaagactccagttctgttggattagggacacatgcttatgacctcatgtaaccttaattacctccctaaagcctctatctccaaatgcagtcattttatggggtagggatttaacatacgaattttagggggagagtgttcaatccataacaacagccaataaattgaaccagcgtattcagctcttgctctgacagcaggactttggttaaaattataacttctctggccttgtatctctcatggatctaaaacaaagataatttgatcatttagtttttaaagacttctgttaaagactcttaaaaaccttatgattatgaaagtaatactttatagtttattaataaattgtcactatttgtataaaattaaaatgaagtcattctcatacgacctgttgtgaaggtgggaaggcatagagatttcttctgggggccacataagttcttccccctgatattaccattttccactggtattattggccctctttgttttttaaacacagatgaatgcactttttctttttgcttctttactactttttccagcaaacaattattgtttatttgatatgcaccaggcattcttcttttcaagcttaaattcattaaatgcttgttacgtgttagatgctctctgaaccccatacattcattgagtcagatttagcctttcaataagcctataaggttgtgcagatagggaaattgaacctttctctggttagataatttactcaaagtcaatcagctagaagaggtggagcttgtatatgacttcaactctctctgattccgcaacctgcatccttagtccttaagctactgagatgaactgttacttgtgctcttgcagactctgtgatatattcctccacctgctcttgcggttttgatttttgctcctgttgactgcctctccttgatatcagggtctctccctttctccgtgcctccgtctcctagttcatttcatcttgtacaatgcacacaatatgaaagggggagatttaccattgttttaagtttaattgcattgcctcttttaacctcttgctgattaaatagtgggaaacgtagaaataattgtcagatttttaggagaaaacaggttgagaagtgcacttgcttattgaaggatgctttcccttttcactgaaattacctggacttttgtatgcaattgctttgtgccttccattatttttaatttcggcttacaattagagcttgcaaattgaattgctttctctgaggagctgtgatttctctatttggcaagtgccaggcatcccccgtcacaaatccccacttgctcagctgaaattaacatggttgattttgttctcttgtactgcaatcgggtctgatcagtagaatcatgatctcacttagtaattgcttccacagagtctgtagggagagcggatatgagtggtgctctgcctgatgaggagaatggaggttctccaggggagtacaagggagctttaggcaatgatcttggggattatagagagctgtccctctttacttgcactcagaagtcttgtggtatttaccaaagccattaagggccctgatgttggaagtgtcctctttggaatcaggataaattcaaagatgtggttagctgttatcactcacagatgctgcaaaggaaagcgtattaactgtgggtattctagctcaatgccagcttagttctggttatttttattagggaaaaatcttaagatatagtcaattcttcagttcttcagtttcatgtttcatctcaaaaaagttgatttgagttccgcaaatgaaagagagattagttttgcagggtgcaaaatgagatccattgtagctttatgagtggcgagtggcaggtcactggaggtattcaggaatctagactggatgacctctaatgccctttctaatgctgagatgaatgatccactccctcacctctttctgttctccatatggtagcagcctataactctaacatttatgatctaacatttatgaactttgtggtctcttaatacctcagtatcttttgtgtctctatgtctttgtacttccttttccctaaatctgggaaacttctctctggtcttctgcatggttggctccagtctatttttcaggatacaacgcaagcattgctgcctctctgtataccaagccccatctttaggactgagttagggattctagtctgctccttatgcttacttgtcaccctgtgttataactgctggcagccttgtccttcctcctgatgtgagctcaatgataatgctacattgattgattaaatcacacattgaagatataatagacatgcaaaaaaaattgttgagtgagtgagtgaaaccaaatagtgtttgattacttttgtgtagagaattatagattttaaaaataatattttgaatagcattttaaattttaattaataagtaagtttcatggtacttagttttctcttatatgtaccttttcagccatactctttctaggaatcttgcgtacttgtcagtgagcatgtatctcagtttttaagaaagtcagggctgggcacggtggctcatgcctataatcccagcactttgggaggctgaggcggatcacgaggtcagaagttcaagaccagcccggtcaacatcgtgaaaccccgtctctactaaaaatacgaaaaaaaaaaaaaaaaagaaaaaaaattagccaggcatggtgggacgcacctgtagtcacagctgcttgggaggctgaggcaggagaatcacttgaacctgggagatggagattgcagtgagctgagatcgcaccagtacactccagcctgggtgacacagagagaatctcaaaaaaaaaaagtcagaaggtactgagatcttctaaagttcagtataaagaagtaatcactgtgcagtgcttatttctatagacaaaacattttatatttgttacattaaatataatggataggaaaatctctttaccatttggtgagtggttatgaatcacatggaagcaagtatcccttttatttgcaaattggaaaggtttttctggtagtgatgggccttcaagagacctcctttccaatagagggtgctgctactccacaagctatgagggaccccaacagatgaagacatcaaaagaattgttctaagtgcatcacagctggctacttggaattatgatttatgttcagctgtagcccagtttgaagaatttgaaaccaaggggggaaaagtctatctgttcattttgcgagctccagtcttgttacatgcagtgtttcagcacttctcagtttaatgttttcttcttcgtgacaagaaaaagtcacccagcctttccctgcatttctctcctacaccaactttgtggtgaagacatggtgccttgtggtagattatgctgattcaacttgttggaccaaatgtttctgctattaagaacaaaacaataaattatttctagaaggtaaaaatgtttgtattggacatttaataatatttgaattgagacccagaataaaactcttgtagtgtggaacttccaatattgatgtacccttatctcttaatagaagtattacatgtcatacaaatctcaccgttttaaatatagtaataatagaaattattataacagtggcagatattcaccaagcattgattgtacctggtaatgtaccaaagcttcacttaagtcgagacacttagtgcttacaagggcctcaaagcaggtactactgtcattttatagagagagaataaagaagctttaaaaaagtccaacggcctacccaagtcaactattactcaaggctcacctctgtagtgcactctggaccgacctttaactgccaacatctgaatctctgcctgagggaatttttggtgttagggactgccctgcccacattcagagcaggtcagaagttccagaaaatcagcacccccctcggcaactctactgactggtgggagttttttaaataccccaactccttcaaccctaagctgagataactctgaagctgttctacactggattgcaagattctacaccagcattgagctccttttgcccatgatgatagagaatttgtttgataatatgccctttgttaactgccttccgtttcctgtttcatttacctacccccttccagtgtttcctgaatcgcttcccaaataatctacttgtagtggaatccttacctcaaagtcagcttctggaggaatccaaactaagctggttatttttccaaaatgtgctttgatgaagaacttgcttgatatatcattgatgttgaacccatactagagttccacattgatcggctaaaaacttaaaattttatatttttatagagtggtagaccaacagttcacatattttcagctaatgtattacagtgtatttctcatgttataaaaatttaccagtttactacttggagtgaatttccgggttgagattcagagaggacaaaaacaggtggaatcaacagtcttcttgagttgaggggatggaactgggagttcagggaggtcaagtcaggagaatttgcaaagtacagggcaggagagagctgcacagagagaggataatccagagatttttagcaggtaagtacattaacacacttgtaactgtattccatatgttaaggaaacgataggaaaaattgattatactaagaaatggaaaagatcttatatatattttcccaaacttgtacagatggatattaaaatgttggaaatgaaaaatataatgaatgagattaatgacagattaaatgttgcagaagaaacttttaatgaacttgaaaaggtagcaatacaaactattcaaaatgaaacacagacaatagactgaaggaattgaaataacacacacatacatacatatacatatatacgtactctgtatatacacgcactatacattctaaagcaaccactaaaataacactaccatgagttatagttaataagccaacacaagagataaaatacagtaataaaaacattgacccaaaaaatgcagaaaaagagaaaaagaataacaaagaacagacagcacaaatggcaaacaaatagtaagatggcagatttaaactcagccatgttagtaatcacattaaatgtaaactgcctaaaaactctaaagacatagactgtcagtttggattattaaaagtaacctctaagtacatgctgcctattgaaaaccattttaaatatacagacaccgaaaggacaactgttttgaaagacactgttaagaaagtgtgaaagcaagcctcagagtgggaaaaaaattttaaatcacagatccgataaaggatctgtttatagaatatataaaaatttcttaaattttaataagaaaacaaaacacttggaatttaaaaaatgggcaaaagatttggacaaacacttcaccaaaaatatatatggaaagcaaataaggacgtaaaagcatgattaatttagttcttagagaaatgcaaaggaaaactacaatgagataccattacacatctattagaggggctaaagttaaaaagaagaaccataacaattatcggaaaggatgtggagcaacatgactctcatacattgttggtgagaagatagtgcaaccacttcgaaaacagcttggccattgtaaaagaagttaaacaggccaggtgcagtggctcacgcctgtaatcccagtactttgggagacagaggcgggtggattacttggggtccggagtttgagacaatcctggccagcatggtgaaaccccatctctacgaaaaatacaaaaaaaattagccaggcatcatggggcatgcctgtaatcccagctacttggaaggctgaggcaggagaattgcttgatcccgggaagcagagattgcagtgagcccagatggtgccactgcactatggcctgggcgacagcgcaagactccatctcataaataaataaataaatgaagttaaacatatatctgccatgtaactcagtcattcaactcctgtttaccaaaaggagatcaaaatatttgtcaatataaagagttctgtagcagcttactttgctatggacaaaattggaagcaactcaaattcccattagcagatgaatggataaacagtgtgatctatccatgaaatgaaatactaagcagcaatgaaaggagtatactactgatgtacagaacaacaaagatgaatctctaaacaattgtgctgaatgaaaggagccagacaaaataaaaagtatatatttgatgatttcatttattaaaaaataattctagaaactgcaattaatagtacctgaacacaagccactaggtcactgggaagtgggggtggggatgggtgtaagggtaagaaggcaggaaggatagattataaaggggcacaattaggggcacaaaatagattataaagggacttcttaaagtctaatttatctttctctttctttttttggttgtccttttagtgtctatatatttaaatttgttttcaatgggcagcatgtacttagatgttacttttaataatccaaatggacagtctgtatctttagagtttttagacagcttacatttaatgtgactactaacatggctgagtttaaatctaccatcttactatttgtttgccatttgtgctgtctgttctttgttattctttttctctttttctgcatttttttggttgaatgctttttattctattttatctcttgtgtag

SEQ ID NO: 2978 - DNA, 1114 bp, Homo sapiens
ggaggacaggctggcagaggagggaggagggtttctagctgagagagactgcggctgtgggcctgcagcctacccctcttcaagctctccggagccgttcctgcgaaaccagcccccacaaataaggaagctgggattcagagaaattaagggacttggtgaagcagagaatgccaagggaattgattcagtagtggacggggagtccctgaagactgttgagcagtgaagagacctgatcgcatactaaaaaagtacatgcaatggcaagaagatcaactaagaggactcaatgtacaatattccattccagcattgaatttggggtcaatggatgacattcagatgctctactcttgccatgctttctactttcatgagaattttgatttattctatgttaaaattaactaagttaattttaatcaatccctacccttgatgtaaatgtacacttccagcaaggtcctggtttggggagtttgttcatttaacaaatgtttaatgagcacctgctagtttctagcccagtgctaaatgctgagttactgaagtaaaaattgtgttccctccaggagctcccaggctggagggggcagaaaattattacatgcaagcacagatgacttgtaagaatctttgctgatttggatggaaattttctgcccttggaatttggtatctaatccctaaataaaacactttaaagaatgccaattagaaggaataggcaagactaaaatcagttgttgtgtttgtggattagggatgatttatattctaatttaaaatttcctttaatgataaaataatatttaggcaatcaattcaaatgtaaattttggataatgtcactgtgactcataaactcactatccacctgccacactggtggagacatctgaccaatgaggttagaacaggtggctgcctcagaatcccacataggagctgtggacaatgtctgccgcccctctgcggacactgaactacatggttttgggtgtttttgcatctaaaagttgccttttggcccaccgcacccccctatcctgtacccatataaaccctaaacccctggctccacaagaggatgaacagaagaacagaagag

SEQ ID NO: 2979 - DNA, 1117 bp, Homo sapiens
ccacaccgctgggccccgagccccatgccccgatccagctgtggctcctttacgggggccttgctggcctttcctaagggaggtgttttcccgagggcaggtggactgctcctcagactaggggccctcggagggccaggcctgggcttctacctcctctcgcaggctggtgtttctctgcaaatatggctcgtgtgtcctccttcctctcagactgggggcccctgaggactgggcctgagtttccctctcccccttcagaatgggggttccctgaggactgacccagggcctccccccgtcccctccatctggctgttaatctccaacactttcacctccagtcctattctgcacagcgctccccagcgctgggagctcagaggcctcttcagccttccccagggctggggctcagggagggcttcctcaggcgctggccccagagtcaggctgcacattggcttggaggacaggcctttcctctgggactgtgaggcccagagtgcccacccagaactccacctctgacctcacaaaggcctgcttcagaactcggtctccactgcactgctggccagacgagggatgttattttgggcagtgcatctggacttggttcaagtggcaccagccaaatccctgccttactgacctctcccctggaggagcaggagcagtgctcaaggccgccctgggagggctgagaggcaggctctggactggggacacagggatagctgagccccagctgggggtggaagctgagccagggacagtcacagaggaacaagatcaagatgcgctttaactgagaagcccccaaggcagaggctgagaatcagaagacatttcagcagacatctacaaatctgaaggacaaaacatggttcaagcatctgggcacaggcgaacatacatatgatagttgagaaagacacatattctgatcatgaagaaataaacacaagttaaatatgactaagcagaaagatggaaggaccaggaatggtgatgctaacttggaaccacgatgcaggctctaaactcctctacaatcatcctcccttgtgagaaaaatacgtaagtcacttttaaaataaatagaaacctgaac

SEQ ID NO: 2980 - DNA, 4833 bp, Homo sapiens
aagcgacggagatgcgcgcggggcctgttgggtgaaggagcagagcggccggaagcgcggagggagccgcgggatggaccgcaggtgaggccgatcgctcttccagggactacaggaggctggggaggaccaacggcgagagcagcacagcctaggacgggctggatacggtctggagtcgctagggctccaccgcactggaactacaattcccaacatgctccacagccgttggcctctccagccgtagccgttagcatcccgggggtcccctaagagtcttatgttcctctctgagtgggccccaaggaattattgcctctaaaggtgtccaagaaaggcttgagatctgaatttcttcattttgaaatggcccccagacacgcctgggcgttgtctttgaactttctcgcggaggcggagcccagtggatcctggggcttgtagtccatctaccctttgccttcgtgtcccccaggaatgtatgggaaatgctcggtgatataatccagccgcggttctttctttctttctttttttttaagacagagtctctcgctctgttggcccagactggagtgcagtggcacaatcttggctactgcaacctctgcccccgggttaaagcaattctcatgcctcagcctcccaggtagctgggactacaggcacctgccaccgcgcctggctaattttttatatttttagtagagacggggtttcgccatgttagtaaggctggtctcgaacacctgacctcaagtgatccacccgcctcggtgtaatcccaaagtgctgggattacaggcgtgagccaccacgcccggcgagccgcgattcttaacctgaactccacttcgcaatcacctgggacgctgcggaaaagacacggaggcccagccccactaatagatattctgattctgttggtctggaatgggaaccgcgcgcctgtaacgttgaaaagcccctcctagactggatccagggttgagaaccaccggctgtcagttcctgagttgctccctgttaagactgctccaggggcgggctcccaggactcacccttccactgtcgatatcctgaatgtgcaacggtgcttcatggaaatgacagtccgtctcctccaggaatctatgggaattgtctggttctgccctcctctaatgtccccctccccagggctgcggcgaaaccacgtgctgcctgaaccccactttcctcttgcagcctgccagttttctccattcaagatagtccctttggagatgcgcccctgggtcgaagccactactggccatcccagagccagacctggtgtcccaagaccctgagcccatccaggtctcagagatccaggctcccacaagctcccaaggctctagccacaggtcccaactcccctgagctgtttgaggagtcctggccatccagttcagggaccccctccctgcccagcaccactgagggacagatgtgggcctccccagcacccaccctgattgacagcggggactccgtggtggccaagtatataaacaggttccgccaggctcagcccaccagtcgagaggagcgccagcctgcaggcccaaccccagctgacttttggtggctgcagtctgactctccagaccccagcagtcaaagtgcagcaggagccaacaaaccagaaggaagaccccatacagctgtccctactgcggtcaacgtgaccagtgcatcccatgctgtggctccccttcaggaaataaagcaggtgacatccccattcactccctcccttgggtgcctgaactgacaacaccagccctaggacagaattagaagatcaggagcagtggctcacacctgtaatcccagcactttgggaggccaagaacctccacacatggaactcatccctgctggacctggagacgctgagcctacagagcagagctgccaggctgctcaaacgcagcaaagcctccatctcctcctcctcctccctcagccccagcgatgccagcacttcctcattccccaccagctctgatggcctctctcccttctcggagaccttcatccctgactccagcaagggccttggccccagggcacccgcatccccggcaccagcccaggcccagacccccacccctgctccagccccagcctcctcccaagcaccccttcggccagaggatgacattctgtaccagtggcggcagcggcggaagcttgaacaggctcagggaagcaagggtgacagagcttgggtgccgcctctgacccctgccctccgcacgttgacctctcctgctccagtggagaccctcagttctctggggacccagcctaaccatgtcccactgtggagcagtgtggcccagcctggtccaccagaggccttctatgtggagaggcctccttttccctcagtgtcctctccacacatcttttgggcccccagctcccacgggttcttctgggccccacagtctgggccttgggtatcccttggggctgttcctcccacgcagcaggcctccaccctagcacatctgggctctaccctcgcgcccccggcttccctggcctccaccctcgaacccccggcctccaccccagctcccctggcctccacccttgcacccccagcctccaccccggctcccctggcctgtacccctgcacctccagcctccaccctcgcatccccagctgtcccccagggcctgcccatccctgacccaagcagctgtgcccagcctaagagcctggggcccaagtctcggaggagcagagcccctcgcccagaggctgccgagcaagtccctgcagctggccagggacctggccctcagctcaggggtgtcctgggccaggtagtggcagctcggctgttccctgacagcctggaggacacgcctcctcacttcgagggcccccctccacccaaggctggatctccgaaagtccaggccacacaaccccaaaccaaggtcactccccctccatctgaatcccagtgtcgggccaaggccgagtctctgaaagccaaggccttgccgcccgcagcggggtcagtgatacggaagagcgaagccactccttcccctggagcctgcctgcagcccgaggtcccactctctccagctgagcaggcaaccacagtcaaggcctcgccgccagccttccaggtggggtctccggaggccctggccccgcccccgcccgctgctgaccacgccccctcggaggccctgcttgcccagggccgccctgctgctgcaggctgcagaagactccgacggcagcgagttccaggacgatcccgtgctgcaggtgctaagagcccatagggcagagctgagtcggcagaaaagggaagcggatgcccgattatcgttcctgttggaccaggctgaagacctgggatcttggtcccctccagccgggtcgccccctaggtccccaaggaggctgctaagaagggaaggagattccctggaggccagaagactttgaattgtacagattctattttacccagtgaggctctttttttttttttcatacagttactggttatctgtgagaaaggggttgtttggaaaggccaaggggtcatgccaatttaaggaaatgccccccatcctccgctgccccatggctctgccctgccccccaccccttcctgaccacggaaacaagatctcctttctggttatatcttccttggggcagagggagtttcagacaagacttctggcaagactgggacccaccttatctggcttcactcaggagccctggctcaaatggaccaaaggactgccctccacggaggaagctactagggtcatcagagtgttggatgatggtcaggctatagcccacacatgcttgagcagcagcagcatctggtgcagctgacccctccctccttgaagcactttctctccctgcttccagcccttctctctgcacctctctggtcaggcctagtcactagcccagcatgtcaactttggcatgacccagggccatggcgttgacatctctatctgcacccacccataggtgctcttgtctagcttaatgactctaaaccccgtctctattctgataatcctcaaatttctgtctgtaacctagacctggccacgaaaccttgggctcctacctcattaccatttctacccaagggtttaaaagacatctcaaattccataggtcctaaatggagtttccaatctttccccctaggcgtgcctctccccagcttctttttttttttttttttggatggagtctagctctgtcacccaggctggagtgccatagtgtgatctcggctcactgcaagcttcgcctcccgggttcacgccattctcctgcctcagcctcccgagtagctgggactacaggtgcccgccaccacggtcggctaattttttttgtatttttagtagagacggggtttcactgtgttagccaggatggtcttggtctcctgacctcgtgatccacccgcctcggcctcccaaagtgctgggattgcaggcgtgagccaccgtgctgggccccccctccccaactttcttcggctctgtcctttgccgctcagaccaaaaaccttagagttgtctttgacttctgtctttcccttccacccacagttaaccaggaaatcctgccatctccgcctttattttattttattttttgagatggagtttcacccttgttgcccaggctgtagtacaatggcatgatctcggctcacggcaacctccacctcccgggttcaagcgattctcctgcctcagccttctgagtagctg

SEQ ID NO: 2981 - DNA, 3581 bp, Homo sapiens
ggaaaatgacctgcaggattttacatggagcttcctgtgtgcatgctggtgactgttggcaacaaggtgtcaggaagaaagacattgctttccaaactccttttcccaaatgatcctttcttacccagtctgccttacctgcttctgtactgttcaacagaggagggggaacagggaaaagcaggggcagttgtgaaaaatagaagggaaacttgagtgtgcctttttcttctccttctctttctccaccctcagtcatcattaacagaaaaatatttttaaaagatcccttgatggcatccccaaatgttaagtctgacattttcttagctgatggcctcctttgtgaaggtactttgtgtccgcccagcatgcctgctggatccctggtttgccgcagttgctgaggtaaatactctttccattaagcaccacagcccaagagtggcctaaagctcaaataaatgaccaagaagcaacttaaacattccctggggcgattttaacctatgcaatggctttttgaaaaaattgcctattttttcatgttttggccgggggggtgtctcttattcccttcttttttattttcctttcagctgagtacaccttctctttcatttattcatgcactgcatgaaggatggaagcaggatgaataaatcacagagcattgcccctctccccactcagggtctgtgaagagagctggagcagaatacagtccaggcattatgtcaactttcaggggacctggggcaggtggccgattctcacagagaccccacttccctttcctgtgaaaaataccacagcccaacagccactggagaacagtgttcttctggaagcttcctctgggcaggaggagtcaaagatcctggtcctcagggacacttgagatgggtgtgcccaaagctgtgcaggatggtttggtttgttttgtttttctttgcctcaggaagaatgtgttcacaaacctcaggacaaatcgtttaaaaaagtgtcctgacagttgtcatgcttcatcacttgatttagaggcaataggacagccttattttcttctaatctctggtggttgaggagtctggttggcctggcagaaggctgagattggctgagggagtcatgagcgagcaggggcctctggtgcctgaagcgcccctcaggaagagcgggtctcaccggaaggccacactcatctccttcctggttacccagtgtggggatttgctactttgctgagtgtgttttgtctacattcatggtgctccagaactgtgtctgtgtttctcacattctctttcgtgtctgccagagcaacattctcagcaaaccatctgaatgcaactcctgtgatcacaaaagtcaatcactgatggaaatgaagaccacgaccctgattcctcaggcacaggttttcatctgtcactatgtgctaaaagcaaaccagcaagtgagggtgtcactgtcaactgctccttgtcgtgagattcccacctttccctcaagacatctcagatatcatatgtaaccttgaccctgtgtcccacagcaacagcggtcattgagtgtaaagccttttccttgaggattgtggtagacagaatgccccccaaaggtgactatgcttgaatccatggaaactgaacatgtcaccttctatggcaaaagggactttgcagacgtgattaaggttaaagaccttaaattagagggagtaccctggactatccaggtgtctaatctaatcccatgagacttcaaatgcagagagctttctctggctggagtcaaagagatgtgacaaaagaggtcgtcggagagattggaagtgtgagaaagacccgacctactgtttctggggagcccacctggaaagcacgagaagggacacaggcaacctttgggaacaaagactgccagccacaaggaaaagacagcagtcctctagccacaagaaaccgaattcagccagcaacctggacaagctagaagagcattcttccccagaacctttaggaggaagtgaggccttgcagataccctgattttggcttttgagacactaaacagaggatccaactgagttcaactggcccagaaactgagatatgtttggactgttttaagttgctacgtttgtggtaatttattttggtggcaactgaaaatgaatgtaattgtatattagaaaaattgaaggtagaagctctaatactttctccccacaccccagtggttcatcatgtgcagcactcagggtgtggaaattccattttgaagacaccgtcttccaggattctaacccccacctgggaaaggtcctggagagaacttctagcatgtatttctgagccattcacatttaacccagagagagaaggtgtcctgcccaaacgcaaagcagcatggcggtagttctggacataaccttaacaattgccaggaactctctggatgtccatccatcagccctatctagtctttttgtctgcatggcattgtgggggatgtggcgatgagggccaggatcgcagaagtcagagtacccgtggctggagcttccattttaaatgaagtgttcttgcttatggcttgatggtatcctttcagattttgcatctggctgtactccagatgtttatatagaaacttcacagtagacatgatggtggcgtaggtttgcaggaaggatcctttcctacttacagagtgacccaatgtggccgatcccttcaatatttacaacagctgggtgagtggaggcatgatcaactccatttacccgtcaaataaatgaaatttcagagcggttacacaatctgcttgaggtaacaaggccagcaagccacagagccaacatacccctggtgcctggctccacaggagtctgggaagagggagaggaagatggggacaggatgtatcaccaggatgctaggggaagagagaatattgacgtgtggggcagcctgcatccccaaatcaggagcactgggtgctgctgtgttacagtgagtgtaggagcatgccgttctgggcttcactctgcccaaatatgtcttgctcattttcaccgccatatggctgctcgtcccggtctgtttgaggttccttcctgttccctctctgcctctaagtccttcaaaaagccaactggaagtgcctcttccaggctttccttagcctttctttattcccttgaacttctattatgttaattgttcaaaagattagttctgacacttaccctatgctgctttgtattactattggaaaacaacagtagctctctcaacccattgggtggatggtacatgccatgctttatacattcccgtggccctgctgtacctggcacacacaaaaggggattaataaatatgcatatgttgaatgaaagaatggagagatgctgttgattttctttgttcttctttctttttctctgatttcatgtcaaacatagttttctcccttaataacaataattgtttgtcttatgtgtacagtgggaaatgtgagcctccacagccttagctgaatgactaatagtatatccacttctgcctgag

SEQ ID NO: 2982 - DNA, 26892 bp, Homo sapiens
cccaaagtgctgggattacaggcgtgagccaccgcgcccggcctagtgtctgcttttaactgataatttccattcagcgctagattgcaggtcccaaggaactaccaatagatcattatgttttcccaaaatgttctttcctgcttgtcacccaactgatactggatatcacatgtaaaactgtggcacaggtcatttattccacagagcaacaacaacaacaacaacaacaaattgtgggcttttgaaactagcacccagttccatgcctgggaattggcatacagttaaaaggtgtttgtagaataaacctggattcttatgaagagacatgtttcttagagaataaatttggccaaaaaagaagcactcatttatggtccattgttcagaacagtgctctaagccattgtcagtctgatcttgctgtgataattttgtattgaagtcattaagctggggacaagcatcctcagaacacgaaaaaccaaaaataagccaccatacgtttatgctagaaagttattgtcagttcttagttattgcgggatctggccagcagcccgcaatgcaacggggctctctctttgttcccaggtggatcggcaggttgagaaataatagacacacacaagatagtgaaagctgggtccggggggtcaccgccttctggtttcgcagtgtcaataatgcactggatataccagcatttattattaagtttagtgagggcaggggtaggttagtgagggatttagggtcatttgattatgaggtgagatggtcacatggggatgaagtaattctttaacataacatttgtatgtagaagtacagtgcatttgtatgtagaagtacagtatacagagattagaatttacaatatagtgtgtgtgtcagtaatttctaacagagccttaaaacggaaacacagtctttccataatctatgattagcaagatattaatcagcagtaacaattgcaacaaaagctggttacaaacaatccatggaaacaggacgtgaagctagacaaccggttagaccagaaattctcggaagggagtatgccttaaccctaaagaggcctagaaaagcagtggcaagatgagggtgtttatagccctatgttatacatatggacaggtgccccaccatgtgtccatttataggctctccacaagggttgcattccattcccagagctatgaacatctgcttttctgggataggaatcttggtgatgtgaaacctccctgactgcacgtccattcataggctctccgcagagggaagcacatcacgcgctgttggctcgttctggcggtccaacctggcattgtctttacacaatcctgcatgcaattttgtatttacaataatcaggagcatttcatcttttattcagtagcagtagtttcagggggtctccctacacttagtttcttcaagaaaaaattttggtcaccaaaaataggtaagcagctgaattctgccttcagcatgtcaatagggaaacataattaatcagaagaacaggctatttgaaatattgcaagttcacctcaacactggaaatcagtgtttctcaaagtatcttcgatgggacatttgaataagaaccaatgtatgagtccaatcgccaatgcagatttccaggccccaacagcctgtttacactcattatttgggggtattcacaaaaatctactttttcaactggttctcccagaaggtcctcaactagataaagttaagtaaccttccccatgaagtatcattaccatagttctagttgggaaaccattcagggaacaaatcaggcatcactgcagttgtgttttgtgcagaggaaagtgatgctttaaatgagacacctggaatgtttgttttagacttgcatattttctgtgtctttgggcatcttatttttagttgtagagctaattatctgatgataggatttttttaagaaaaggaagaaaggaaggaaaaaggaatacaagaagctagttttctttgtcattgcatctagtaagcaaaaaaaagggcttgatcacaatgactatgtggaggggatgcgagaggaggttagacaaacatattggataggtgagaggtatgggatgctatgtagcaagcttagaattttcaattttattctgtaggcaatggtaagttagtgaaggtggagtagaggaatcagatgatcaaagcttgtcttgaaaaagtaaagaaagaaaggcaaactatcaagtggactacagtggagagagcagtatgtttaaaactgcaagagatttttgcttgcatgcatgaaaagaaaaggcctgcgcatgcctgaattcaaccaagagcaaagggttagttgccagctagagaataaaaacaaaatacctgctgatcagaaaaacaccctgtgagcagattttaatcaaagccctaaatatgatcactgagaagtgatcatattcccaggtcactgttggaggacagcatttctcttctagatattttttgtgttgttgagtttggcatcctgcttgggattcttctgaaggtttatgtaggttgactctataacctcagaatatttgcttaggatttgatggtttttcaggcagactgcacagagattctgccttggctagacttttcctttgattatagaggggtccatttgtctggtagcctcttcatgtattcctttgaatgttagttgcaatataatgtcaccataaaaggatagatagtaaaatggtagtgactgaaatctttcctctcctaccaccattaaatcagagtcctcaataactcagaatctcattattattttgatggagagatgaagggcaattcattctttcagccctccggtaaacattgaatgccctctatgtgtcaggtactatctgagatattggcactgtgaaactatgaaacaataattttcagtcaagtgtgggggaatgggcacctacatggctaattagtggttaccatcactcttaggataaaatcacaaatccctcatctagtcttaaggcctcaggtcttctagcctctctgttgtttctaggcacattttgtttcactcttttcacattaggtgtgccacccacgtggctcttgtttctaacattaccttggtcctctccacttcagagttttcttgtttgctctttctgtatccaggaatgttctcctatttcccatttgtctggctagcctccatcattcttcagaatttattttaaactgtcacttctctgaggacactttctttatcctccaacactggttattcacctcttgctacgtattctcattgctccttctgtttttctttcatagcacttattaataagagaattgaacattttgataatttttggttaatttctatttcctgttccagactctaagcttcatgggagtatggggagtggcagaggcattcactgtggtaacttcagcatgctgaccagaccataaatggcacttggtacacatttttaaaaatatttgaatgaataaatagaagatcgtgagtgcaacagttgaatatgcatggagacagaggatgagcatatcaaattcaatttggaaggatcagggatatcaatactttaaacccagtatctactaaatacacaaaataatgccctgtatctcttcaagatcctaactcatcaaccacaaactaaactctaatgactatgtttactatgatggtaaaagttactactattttaggaaaagtttcaacaaaagtcaaaacagaatgatttctaatgtaaatcttaactataagaaaataagcacattttcaattaatggacatgtttctgtagaataaaaaatggctatttctatgtttgatcagtttatatataatcctttctgagtaaacattccactatctggtttaataacttcaatatacttcttaaagattaacacgattatttgcttcatttagtcttagtttttattagtgtacttgctgtaaattgtttctctcacttattttttatttcggacatatctgtgttgttgtataccaggtcaaataatattctaactggaatatacatttaagggttctgtattctctcaccatctaagttgataatgaccttagtcatttttgtctttaccaatttgcctgtttgctatatattcttaaggtagttcattgaggaaattataatcaaaatctatgaagtttgactaattattactctcaacataaagttaaaatccaaaagatctctgtggaatattggtcagacaatgtatgaaggcatatacatgatgtatagtaaaactaaatccatttgagctatccattatcctaggttatcacatatatgtcaattattaaccaaaattggcagtaaagtgttatattagtctgttctcacattgctgtaaagaactacctgagactggataatttataaagaaaagaggtttaattttctcgtggttccacaggctgtacaggaagcatggttagggagatcatcaggaaacttaaaatcatggtggaagcaaaagggaagcagacacatcctacatggctggattaggaggaagagagagcaggggaaggtgccacacacttttaaacaaccaggtctcatgagaactcactcactgtcatgagaatagcaagggggaagactgcccccatgatccagtcaccttcctcagactcctcttccaacactggggattacaattctacatgagatttgaggggacccaaatctaaaccatatcaaatgtaaaggctggaaagaaaaaaaaagtcaaatgtacacagttttgcacattggaaaacatttactggtggtcgtatttacaagtaacctgactagatattttgaagttagaaaatttagggttcagtccattgagcaaatatactgagctttccctgcatgaaaaccattgtactaggctcaactgaaaatagtggtggtggggagagaagatttgttctttcaagaatttgaaatttgttcagaaggataaaagcaaatagaatctaacaactgaataatgcttgaaacatgacatatgagctaataaaaatacatcaattacagtggtctttaattacaagttagaggtgccaaccccctgcacaaatgaccatcctcatataacttttgactcccccaaaacttaactattaatagcctactgttgcctggaagtcttactgataatatagataaccgattaacatattttgtataatatgtattataataaagcaagctagacaaaagaaaacattattaggaaaatcataaggaaaagaaaataaagttactatttattaagtggcagtgtatcattataaagatcttcatccttgttgacttcaagttgagcaggctgaggaggaggaggaaaaggagagtttcgtcttgttgtctcaggagtggaagaagcagaagaaactctacatataagtggatccatgaagttcaaacctgcattgttcaagggtcaactgtaattagttttgggtatagtgatagtaaataaatgatgtgagaggcactgaaggagagcttcctagagggggtgagttttgagcaaaaagttgaacatgtgagagcttatggatttgtggggacaaggcagggtcatgacttggtttcattggaatgagtaagtcctatgcaggtcccaataatagtataaaaacaattagaaactatgtcagttggtgactaaatggctgctaaaaagtagtttggttcataaaaattatcaattttaatgatgttttgaggacattatacgttaaaaagtaaattctttattagcctgatgcctaaatgcaactactgcacaactgttttcatttttatatggtgctctacaagccttcactacatatgtatattttacattgttgcaatcatagtatatacagcattttgtattttgcatctcttatttaactgtgcatcataaacattttctacctttctatatagttacaataactttaacagtataaattttatcatattgatctattgcaatttactaaatcattgccttaatattgcatatttagattgcctcctggttttattttattcttggtaatgctgcaatgaatactgctgtacatacaatatgtttttcttctgtccaattatgttagagtacaaattcacaaaaatagattcatggaatgtaagggttagaacatttttatagttcttgctgttctgccattctgatattagggtcctgcaagttttacttggccactagcaaggtatctaggagccgcttttctcgtgtgtatgccaacaataggtttaattactagaaatgtttttgttaattttataagcttgaaatgctattttaagataggtttatttagggtttcttactttcttgtgtgggtgattattttcttagtttgcttattttttgtatttccattcatataaattgtatgttactctcatttgcctttttagctaaaatgaaaactcttttcttttccaaataataagaattatttaaagggcatgagatttatgtaggaccaatggaaaatattcactcaagaacaaaccaggagaattttttgtccttcccctgtgaagtctgagcatatcttaatacataaaaaaataagtaaatgtgctgctgctgtctccggttgaaacggcaggtagggggtccactttcttaggctctttactttcctggctgctgaaacagctctgcagaatgaacattaacattgttttacagtaacagatacatatacttgacaaaatagtctatggctgagttcaaattgtaagttaaaataaagcaaagttgttttagaataatgacactataaggaaagtttcactgcagattttttaaagactcaggcatgcagaatatattttttccttattcagtttagtaaactataaaacaacatattgattgccgagaagaatactaaagtgagccaggttatgatttagaaagctttcaacgtagaagaggagataaggtacgtatacaaatagcaacaagatgtgggattatgagaacattctctaactgaagagtaaatagattttattccatacagaggagaaagagaattactttattggggtggggggccagcaggactcatttcaaagtcttgacaggagattctagtaggcagcattcagggttggaaggagggtattccaaaaagaaaggccagcaagaggcaggtcagagcaacaggtgtgcagggaggagatcgaaggaatgggcagagttcagatttggctggacatgcctcaggtaagaggggtaaggctgaaatcatcgtaggagaggagaggggtgcaggcctgagaggtgtgacttagggattttagacttcttgttttggaaatggagatactttatttatgtttttgagatagagtctcacgttggcatccaggctggagtgcagtgacaggatcatggctccctgcagcctcaacctcctgggcccaagtgatcctcccacctgagcctcctgagcagctgagaccacaggcacatgccaccatgtctggctagtttttaaatattttgtagagatggggtctccccatgctgcccagactggtcttgaacttctggcctcaagagatcctcccaccctggcctcccaacataatgggattacaagtgtgagccgccatgcttggctgggaatggagatacttacggagagtgacaggattaaaactacctttactccacttccaactttttttttgacataaactttcaagtaatgaatttttctttggcaatttccatccttacacattttttttcaagaactttctgtaaattgtttgtgtccatgagaaagagtaacatatgagaaagagtaacacatttcagaaagagaactagactgagtgtcatgaaactggattatagtcacagcatactgggttatttggggtaagtaaatctgcctctctgggactcagcttccccatgtgtcaaatgagaatgaactggatatttccactgtttcttccacttcaaacattctgaaatcccaaatatattttgagtacattaaagattcattttctaaaatctatatatcttctctataaacttgaaattccatcttgagggagtcatttctttgtattttagcttttaaatcatcagtagttctctttccaaatgagaataacccaaaggtaatatggcaaatcagtggggtgttgagaattcaacacgacttaattatattaacgatctctcacttggtgtctgggggagtagaaatgtgtcatgtgaaaagtgacgattgaaaagagggaatacttaataatggtaataataacaaaaaccacttacatagcacttaccatgtacttttatgtggattaaatcacataatcctccccacaaccttgtaaaattggtactactgtattataatcacttcacagatgagaatgctgaggtatagatatataattacttccttaagggcacacaactcattagtggcaaagccagaatttgaacccaggaagtccgactgagcatccgtgtgtttaattaccacacagcactttttctgaagggtctccggagagaaacatctgtagagctggattatgtctatagaaacacaaagatctcagtctccaggggacatgagtacaaggttttaggaagggaagatacaaatgtgccagtaacactcttgtgacctcaacattttgctcaggaatgtcatcatcagaagtatcattataactaatcaaaacaatattagcctctcccttatctgaactgtgttttaaaatgtagaattatagttatactactttggcatgcattgatttcagttagaggaattcggaggtggatagatgagattgttatttggagctcttagtatattgcaagaccagaatgtccaagcagtgtggctgtgagaatagggaaaaccagttgggttttctagtccttgggtcatgttgagggactaggactcctttatgcatttctcagctcaactctttgaaaggtcaagctttcatcaaagtcttagtattttttgctggctttctttaagaaatagttttcctatagaatcccttagaaaaactactttttgttttttctgagtttggcttctcaacccagcagacaggcagaattggaaagaaaggtcttgtcttcaatctatagaggtgatcaggtgatcaattaaaatactgtatgtactgtccgggtgcagtgactcatgtctgtaattccagcactttgggaggccaagaggggtaaattgctcgagctctggaattcgagactagcctgggcaacatggtgaaaccctgtgtctactaaaaataaaaaaataaataaatgaataaacaaacaaacaaataaataaaactagcccagtgtggtggtgtatgcctgtagttccagctacttgtgaggctgaggtgggaggatagcttgagcccaggaggtcaaggcggcagtgagctgtgattgtggctctgcacttcagcctgagtgacagagtgaaatgttgtctcaagacaaaaataataataaataaaatactgtatgtgactgcgctttgtgacttattaactgccctacagatacaagagttgtggttatatcccctgaacatttatattccaagtgaccatcaccagagaaattcctctgttgaaagcaagtatttgaacagtcaagatcacagcttttgacaccaagcagatcagggtttcaattcttaagtctctgtacttcatagaccacagagagagcatgggattgacatccacactgaccctgtaagcttgttttggggcttcgatggggtagtacatgtgaattgccaagtccagccccacagagagtactcaataaatcttaacttttattggtagtgttagtgatagtcatagaagcaccattctaaagcaagagccagaaaaagcaatagaacaactctaattacccagcatatacttgaaacctaaactgaaattaaaaggtaaattttaagaaaacaattgtgtatcccaagtcttcagaggcttattctctttgacccagttatttcacatctaggattctattctaagtaaatagtcagggattaaggtaaagacttatgtacaagaacagtcattgaagagtttttttttttccttcttgagacggagtctctttctctgttgcccaggctggagtgcagtggcccaatctccgctcactgcaaactctgcctaccaggttcaccccattctcttgcctcagcctctcaagtagctgggactacaggtgcccaccaccacgcccggctaattttttgtacttttagtagagatggggtttcaccgtgttagccaggatggtcttgatctcctgacctcgtgatccacttgccttggcctcccaaagtgctgggattacaggtgtgagctactgtgcctggcctgaagagttatttttaacagcgactgttagaacctacacgtccatccataggagagtgctttaatagagtgcaatgttgttatgagatatttattttgcagattataaaaaataattcagaaaaatatgtaatgacaaggagcaatactatttaatctttcagagaaaagtcaagattatattatggttttaatgctattaattatactaatatttataaaatatgtgaactaaatagatgtcctttgctgaaagtggagataaaaataataacgataatgcctatcttagaggatttttgtgaagactatatgatggttactacatgcctgacatataatacatgttagctttgtcattggatgttggctaaatttaacttattttctaaattttacttaaacttcatcatacactaatgagaatcttttattttacaggaactgagcaagatgctggggatacagaaatgattaagtaggtacactgagcatatgacattcacaatccagtgaggagagaggcatataaataaacaggaacagtggatttagaactatttaaattctagagtcagctcctaagacatgaaacacatattatcaaaataattaggtgcacagccattataggcaccttttcgtgagttttaaaaaggtggcccctctctttaagaatgaattatagaaaggtacctcttgcccccagctgaatcagctgcacggtagggtacaggctgggtttcagcccctactgccctctcctggtttattcctgctggatgcaggctgctcacctgttcacagaggccctgaaaatacctttgaaatgtcctgaaattgacgtgaagcacagtaaatatgatttggtgtctataaccttgaacaataattattttgcacactgaggtttgagaaatactgaactagattaaatgatggaacaaaggaaaaaatctataggcagttgtccagataatcccttgtgttgtatgggaaatgtgcagagaattctgaagtgtttcttcttaactgcagagttgtctccattatattttaatagtgtcataagttgaatacacattgatagttttgttttcttgagcattgcataatataaggaaaagcatcgagcccagggattcacatatagcaaatgtttactaaatattagttaatccaagtattaaccttgtttcatcatatccacaggcatagtgtgctttgaaaagttatagaatagtgcttgcctctcattttttgttttcctcactgaggtcctgctaaataactctgagcagttgtcactcccaaacccatggccattggattaggcagagttcttcagagacaaagaaccaatacaggatatttacatatccttgtctctgtctgtatctctctctctctccatatatacacatctctatttctatatctctatatctctatatctatctatctatctatctatctatctatctatctatctatctatctatctggctagctatctagctacctagctagctatctaaaaggagatttattatgaggaatatgttcttgtgatgacagaagctgagatattccacattctgccttctccaagctggagacccagaaaagttatggtgtaattcagtcctacagcaggacaagatgagctgtcccaggtcaaacagtgaagcagaaaaaaaaaaaaaaaaaaaggtcggggggtggtggatttctttttcctctacctttagttctattcagactctgagtggattggataatggccgcccacatttgggaggaaaatcaactatactgactctactgattcaaatgctcatttcataggaaaacacccttaagtaaacacacccccagaagtaacatttaatctgggcaccccatgacccagacaaatggacacgtaaaattaaccatcatggttatttgtcttctgcaaagttgggaatccgcccatgagctgaatggtgcatgatgtggctccgcgggaacacaatgtgcattagcatagggttctggacaaaactgtaaggtgtccccaagagaggcagaacagcttctggtgactagctgcacattcactctcttgctacaagtttaaatagtaagcagtagctataaactttggtttcaatttgttagacaaagcattgcctggctctttcttctttacagagttattatttctagtttgcttgtacctaatgctttcctccagggatttcagaactgttcagctgcaaattcatatttgatgttcttgttctaatcccagattaccgcatgaggacagctggaacagaccaaaagagagaaactcatagggggaaggaaatcattagcctgtcttgagtcaccaggacctgataaaaagtcagattaacaaggcttaagctgctatagaaagccagagaaatgccctcaaatattaatcttgaatatttccattccactaacattgcctggaagtattttaacattcaccagataggcatcccatcttgaagaaacgatatggttctgtaaaaagaataatgaattatgtgaggattgattttcagtatggactttagtcctgcatagtaatggaatgtggactggggagcaaggctgtttggattcacatcctaacatttcacttgataagttgcctcatttgtaaaatggggactgtaataacatctacctcctagggctttgtgtagaatattaacaaaacagaatcttgcaagggttaagcactcaataaatgtgagatactattattattgtcattattgtaacagataaaagttggcagatattggtggatgtattcattgtcaaatctccctttattagtctttatattattaaataattgggaaaataaattcattttattttatatgcaccataacttgttcaaattttatttcttaatattgataatgatttatcataaaatttatagtttatggagtaccttcacatgcatttcttcctccaagccccacaaggatgatgcagctgaggctctgggaaattggttatttcatccagggtgcctgattggcgagtggttaagacttgaacccatgtcttcacaccccagatgcattactgtagctgttacactgagtggaggttgtaaacatacacaggcttcgttgttgttagaatcttgatttgattgtatcgctaccacttactataggtcattttgtgagcaactgcctaatttcatggaatatcagattttatatcagtaaaaattagaggacaatgacttctctctacttgctatataaattaaaaaatatatatatcagatcacatatagagatggagctatcccagctctgggtccatggtagttaacgcaaaggcagtctcttccttcatttatcgttgataatgtaccacacatagtgccaaactatcattttttaaaatcagatcaatgttttcatcaaagaaagctgatgttagagtttgattctagtggcaccaagatctcctgtaatccatgattgcgtttgccagccattcatggtgattaacatacttttgcgaaaaagaagtgacaatgaggagaatgaaggtaataaggaggaaaaaaagaaaagcggacttcctctagacttagagaacatacaaacttcattagcagctaaatagcaaggggagagggtcccgaacaatgatttcactcctttgctgctgtgaactaggtgttctagacataaaaatagaggaaagactagaacatatgttcagtgggtaaatggccctctgcgttatatcatcctggtgaggttttctaattattcagaattatcattttgattgtgaaacaaatgcttggtttaggggaatctttggattagactgtgtgctccttgtacttcgtctccatatggttcaaggattttaaggtgaaatgctacaaaaatgtaggtgaatgataaagttgctagaagtatgtcagagaggtgtgagaattttgccttttcatactgtggggattattttgtacactgctaattttatgattagtcctggatcgaggagtgcaagcaattgatatatcttagatgtttgactttattatttgtttttttttttttgttgttgttgttgttgttgttttttgagacagggtctcactctgtcacccaagctggagtgaagtggcacaatctcggctcactgcaacctccaccttctggattcaagcaattcttgtgcctcagcctctcaagtagctgggattacaggcacctgccaccacacccaactaatttttgtatttttagtagagatgggggtttcaccatgttggccaggctggtctcgaactcctgacatcaagtgatccacccgccttggtctcccaaagtgctgggatcacaggcgtgagccaccatactcggcctagttgactttaaataacacaaaaggaagttccactgaaaaggtgaatcctattgctggtgtaaagtgcaaaccattagtaagttaagcaagtctagctctaaaataacccaaatctgcctattgctttccaaactcagggctgctatcctatgtctgtcacatgtgtttctcatgttgattacagcattgggctcccaactggtctccctgttgccactctttcaggctcataatctattttctactcagtagccagagttatcttttaaaaacataaatgagatgatcttacttccctgcttttgaatcttcctgtagtttctaattttacttactatacttacaataaattcaaatttactgtgatggtctacaagacctgatggagtctgacccttctgtctatgactgcatctctcactcttcccactgtggctccatatcatccactctccctggccatctttctgatgtcagccagactttcttctggcttacatatttgcatttggtgttccctctgtctgaatgactagagccttcttgtcgtaaaagtctcagtccaaatatcacttcttcaggtagatcttccctttctttccagtgtaaggaactttatttgaagaaccctaaatgaagttatgttactcaattattcactcgtttagctgtctctccctcaactgtagtgcagtttccatgacagcaaggatgatgttcatttcttgctgttaccattcctggtgttcagaaggcactcaagaatctttgctgaatgaatgagtaatacatcttagaatgctagtttccatgaaagggctacaaccagtctgcaggatcttcaggtcaggaactgggccttgtgctggtttccatgatactgctctatacgtgctcaggaaatatctgttgaattggattcaaccaaaacatttgaatttctgttcagtgagaagtgttccctatgtaagaagaaatttaaagctatgtttgataacactcttctgagagaaagcctgctttttagttgaccagccatcccagtttgccttggactgagggatcttctggggacatgagactaatgggtcaccctacatgccttccacagctttagagccagaaatacctaacggatcagttaggaattatatttaggtgctagtaacaaaagccagaaataacagtatttaaaccacaagagtttactgtttcatgtaaaatgagttcaggagtggggacatcagggatgtatggcagccctggtgcatccacttctgaactcatttcatgtgaaaggtcatcagtgacccaggtttcttgtatggtgtccactatccttagtgtatgactctcatctcagagtagcctcatgttccagtgtggctgctgcagctccttcagctatgacataacatatacattgcagccagtcacccaaggagtaaagagggacagaaaagcacgcttttctgtttgttttctgtttgtttttctcttaagaagactgtttcatttaaaatctgtttgtatttcacaagctttctgttaagtaaaggagagattgggtaatatgagataatctttcagccgggcacatagcctcttctctaaataattctttttttttttttttttttttttgagatggagtttcactcttgttgcccaggctggagtgcaatggtgtgatcttggcttaccacaacctccatctcccaggttcaagcaattctcctgcctcagcctcccaagtagctgggattacaggcatgcaccaccacacctggctaatttttttttttttttttgtatttttagtagaaacggggtttctccatgttggtcaggctggtctcgaactcccaacctcaggtgatccacctgcctcggcctcccaaagtgctgagattacaagagtgagccactatgcccagcctgaataattcttattaagaatttctgttactaagaaagagagatggggtgatgagtaatacacacttacttagcatcttctgccacatctagtttcactacttattgacttagtgaccttacaagggttgtttcatttctctgtgcctattttaaaatatgcattatggtgatgcaaacaaccataatagtaatagctacctatctacggggttatgctctttgtcaggcattttatgtacatgatggtcaccctcacaataatgccacaaagggtaggtaattatccttgtttagatcagaggagtgagacttagctatttgtggtaaagccagaatttaaacccagagcagtttggctcaatacccattctttccattacactttgctttctaccttattggctgtcaagattcaatgaggaaatgaacataaactgcttgacctgtaaatttttgaaataaaccaacgcaatgattctgttaagaaaatatcttggttttctctaacaacaacaacagcaacaaaatatctatggtagatgtgtgtaggaagtgatttgaggtcaccttgaagccagctgactctgaagaacaacccttcttcttcccaacttctgatgttgaaaaactctctttttcagaaaattatattactggtctgactcaaatcacttctttactttttatttttttttttatattttatttttttgagacagagtcttgctctgttgcctaggctggagtgcaatagcccgatcttggctcattgtaacctccgcctactgggttcaagtgattcccctgcctcagcctcccaagtagctgggatgacaggcatgtgccaccatgcccagctaatttttatatttttagtagagacgaggtttcaccatgttggtcaggctagtctgaaactcctaacctcaggtgatctgcccacctcggcctcccaaagtgctgggattacaggcttcaaatcacttctactattattattattattatattattctattttgtctttgcatggttcggtcctaatggagagctagatgacctggctgtgattttttatatgccacgagaaggcagttattaagtcatttctcactcttctctctaaaagtaatcaagaggtgaaaaaaagtctcccatgagttgttctaaggagacaaaaatttcctagtcctgggggcaggatgaactatacacctttcttgacatttggcaataaatattctatatagtgcagctctttgctttggcattcatgtcttcatgagcccagagcccaggaaacagttcccacattgctccatgttgaagtgagttgagttgttttgaaaactcgtgaagttttaagataccttcttttgtgaaatttgctacagccatcagcctcactaataatgccttgaaaatagctgattcctgtaagatgcactatgctcttctctcatctcaaagccttcacaagaaaatttcccccagacacaatgaactcctgtgcagagagtgatggctgtatttatttccagggaagaataaatcagaagaaagcagggagaatattcacatcttcaggcctcgaaggaggctgctgggaaacaaatgcaagacaactggtttttgtaagataactcatagcctgtttgaaaatccactttgcaggaaatagaatagaatcaagaagccaaagtagcaatttctttacgtttccattgatcattgtgttccctgttttaaacattcttggtttggaaaaagtgtagattacatgtaacctttgtgggtatagtttcatacaaaagtattagaggattgagtgagaaaaccaggaaatggaaagtctcaggttgtattaccaaccaagcatcatacaatcataattaaagtgaatgcttatcaagggcttactatatgtctgacattgtgctaagatctttaattagtgatccctcatttaattatacaaataaccaaagtaacaatatgtagtagaaaatgacatcatttctatgtcacagatgaggggatggaggcccaaagtctctcagtaacttgccccaagtcacttcattgtaggtggttaagatgtgatttggacccatttctgttttccagggaattacagtgtattagacttctaaagctgccatgacaaaataacacagattgggtggccaatacaatagaaatttattttcttactgtgttggagtctgggatttcaagataaaagtgccagcagggtgggcttctcctgaggcccctctccttgtcttgcagaatactacttttttgcagtgtccacacaaggtctttctccgtgtgtatacactcgtggtgtctcctcttcttataaagactccagttctgttggattagggacacatgcttatgacctcatgtaaccttaattacctccctaaagcctctatctccaaatgcagtcattttatggggtagggatttaacatacgaattttagggggagagtgttcaatccataacaacagccaataaattgaaccagcgtattcagctcttgctctgacagcaggactttggttaaaattataacttctctggccttgtatctctcatggatctaaaacaaagataatttgatcatttagtttttaaagacttctgttaaagactcttaaaaaccttatgattatgaaagtaatactttatagtttattaataaattgtcactatttgtataaaattaaaatgaagtcattctcatacgacctgttgtgaaggtgggaaggcatagagatttcttctgggggccacataagttcttccccctgatattaccattttccactggtattattggccctctttgttttttaaacacagatgaatgcactttttctttttgcttctttactactttttccagcaaacaattattgtttatttgatatgcaccaggcattcttcttttcaagcttaaattcattaaatgcttgttacgtgttagatgctctctgaaccccatacattcattgagtcagatttagcctttcaataagcctataaggttgtgcagatagggaaattgaacctttctctggttagataatttactcaaagtcaatcagctagaagaggtggagcttgtatatgacttcaactctctctgattccgcaacctgcatccttagtccttaagctactgagatgaactgttacttgtgctcttgcagactctgtgatatattcctccacctgctcttgcggttttgatttttgctcctgttgactgcctctccttgatatcagggtctctccctttctccgtgcctccgtctcctagttcatttcatcttgtacaatgcacacaatatgaaagggggagatttaccattgttttaagtttaattgcattgcctcttttaacctcttgctgattaaatagtgggaaacgtagaaataattgtcagatttttaggagaaaacaggttgagaagtgcacttgcttattgaaggatgctttcccttttcactgaaattacctggacttttgtatgcaattgctttgtgccttccattatttttaatttcggcttacaattagagcttgcaaattgaattgctttctctgaggagctgtgatttctctatttggcaagtgccaggcatcccccgtcacaaatccccacttgctcagctgaaattaacatggttgattttgttctcttgtactgcaatcgggtctgatcagtagaatcatgatctcacttagtaattgcttccacagagtctgtagggagagcggatatgagtggtgctctgcctgatgaggagaatggaggttctccaggggagtacaagggagctttaggcaatgatcttggggattatagagagctgtccctctttacttgcactcagaagtcttgtggtatttaccaaagccattaagggccctgatgttggaagtgtcctctttggaatcaggataaattcaaagatgtggttagctgttatcactcacagatgctgcaaaggaaagcgtattaactgtgggtattctagctcaatgccagcttagttctggttatttttattagggaaaaatcttaagatatagtcaattcttcagttcttcagtttcatgtttcatctcaaaaaagttgatttgagttccgcaaatgaaagagagattagttttgcagggtgcaaaatgagatccattgtagctttatgagtggcgagtggcaggtcactggaggtattcaggaatctagactggatgacctctaatgccctttctaatgctgagatgaatgatccactccctcacctctttctgttctccatatggtagcagcctataactctaacatttatgatctaacatttatgaactttgtggtctcttaatacctcagtatcttttgtgtctctatgtctttgtacttccttttccctaaatctgggaaacttctctctggtcttctgcatggttggctccagtctatttttcaggatacaacgcaagcattgctgcctctctgtataccaagccccatctttaggactgagttagggattctagtctgctccttatgcttacttgtcaccctgtgttataactgctggcagccttgtccttcctcctgatgtgagctcaatgataatgctacattgattgattaaatcacacattgaagatataatagacatgcaaaaaaaattgttgagtgagtgagtgaaaccaaatagtgtttgattacttttgtgtagagaattatagattttaaaaataatattttgaatagcattttaaattttaattaataagtaagtttcatggtacttagttttctcttatatgtaccttttcagccatactctttctaggaatcttgcgtacttgtcagtgagcatgtatctcagtttttaagaaagtcagggctgggcacggtggctcatgcctataatcccagcactttgggaggctgaggcggatcacgaggtcagaagttcaagaccagcccggtcaacatcgtgaaaccccgtctctactaaaaatacgaaaaaaaaaaaaaaaaagaaaaaaaattagccaggcatggtgggacgcacctgtagtcacagctgcttgggaggctgaggcaggagaatcacttgaacctgggagatggagattgcagtgagctgagatcgcaccagtacactccagcctgggtgacacagagagaatctcaaaaaaaaaaagtcagaaggtactgagatcttctaaagttcagtataaagaagtaatcactgtgcagtgcttatttctatagacaaaacattttatatttgttacattaaatataatggataggaaaatctctttaccatttggtgagtggttatgaatcacatggaagcaagtatcccttttatttgcaaattggaaaggtttttctggtagtgatgggccttcaagagacctcctttccaatagagggtgctgctactccacaagctatgagggaccccaacagatgaagacatcaaaagaattgttctaagtgcatcacagctggctacttggaattatgatttatgttcagctgtagcccagtttgaagaatttgaaaccaaggggggaaaagtctatctgttcattttgcgagctccagtcttgttacatgcagtgtttcagcacttctcaggtgagcagcggaaagtgtagttcatctagcagagctgtgcttttagagacccccctcatgttgcccctgcatgatgtatgagtacctgtgcttctcaaggaacccacatttgctgagtgcatttctatttcactgtctctttctaataattttagatcaggtcaacctatttggcctctggctacatgagaacagtgaatacagaatgcaaaatgattaacagatacagtgaaaggcctagataacttgttttcttagagaccctacactgagttgtggaaggacatcagtcttcctttcacacctgcttagttttgctcatggtgtggctatggcccttgctgtttctctgccttttaaatccttaccatcctttaaaggccggcccaaatgcccatgcagagttaaatactcattcccacatactatcctgctctggttattattaatgtcacttgctttattttgtcttgtgtaattattagttgcttacctatgtgcccctcctttaagactaaatactccaaggcaggaactgtgtcctgatcctccttgcacccctcagtaccaagagcctgcacataaaaagtgcccaataaaccttgattgatttgaaatgagtatttctgagaacggtactgcatgtaaatattgaactcagaataactaaagcacagctttatgagttctttagaagtgcagttggctatatatgttcataacaattgaaaggataaaaagtaaatggtaggtgaaatatgactcattttgtggtgggcataggggtggtgctccaattcaggagatggtgttttgtaaccttatcgtgtgattctactcaaaggttttacttataattaataatatgttttccatttttgagaaaaattagtgtttgggtgagttttacacaagtggtgcttgccacgtttcacacactatattatggcttgtgtcatgtacgtttgacaattctttcgtgcttttcacagtttaatgttttcttcttcgtgacaagaaaaagtcacccagcctttccctgcatttctctcctacaccaactttgtggtgaagacatggtgccttgtggtagattatgctgattcaacttgttggaccaaatgtttctgctattaagaacaaaacaataaattatttctagaagagagagaataaagaagctttaaaaaagtccaacggcctacccaagtcaactattactcaaggtgggtgccatgacttgaaccaagggtttctgattcttaaagatgccgctttcaactcctgtgggattcttcccaccactttcggttcttctctgttgcatctcctcaggctcacctctgtagtgcactctggaccgacctttaactgccaacatctgaatctctgcctgagggaatttttggtgttagggactgccctgcccacattcagagcaggtcagaagttccagaaaatcagcacccccctcggcaactctactgactggtgggagttttttaaataccccaactccttcaaccctaagctgagataactctgaagctgttctacactggattgcaagattctacaccagcattgagctccttttgcccatgatgatagagaatttgtttgataatatgccctttgttaactgccttccgtttcctgtttcatttacctacccccttccagtgtttcctgaatcgcttcccaaataatctacttgtagtggaatccttacctcaaagtcagcttctggaggaatccaaactaagctggttatttttccaaaatgtgctttgatgaagaacttgcttgatatatcattgatgttgaacccatactagagttccacattgatcggctaaaaacttaaaattttatatttttatagagtggtagaccaacagttcacatattttcagctaatgtattacagtgtatttctcatgttataaaaatttaccagtttactacttggagtgaatttccgggttgagattcagagaggacaaaaacaggtggaatcaacagtcttcttgagttgaggggatggaactgggagttcagggaggtcaagtcaggagaatttgcaaagtacagggcaggagagagctgcacagagagaggataatccagagatttttagcaggtaagtacattaacacacttgtaactgtattccatatgttaaggaaacgataggaaaaattgattatactaagaaatggaaaagatcttatatatattttcccaaacttgtacagatggatattaaaatgttggaaatgaaaaatataatgaatgagattaatgacagattaaatgttgcagaagaaacttttaatgaacttgaaaaggtagcaatacaaactattcaaaatgaaacacagacaatagactgaaggaattgaaataacacacacatacatacatatacatatatacgtactctgtatatacacgcactatacattctaaagcaaccactaaaataacactaccatgagttatagttaataagccaacacaagagataaaatacagtaataaaaacattgacccaaaaaatgcagaaaaagagaaaaagaataacaaagaacagacagcacaaatggcaaacaaatagtaagatggcagatttaaactcagccatgttagtaatcacattaaatgtaaactgcctaaaaactctaaagacatagactgtcagtttggattattaaaagtaacctctaagtacatgctgcctattgaaaaccattttaaatatacagacaccgaaaggacaactgttttgaaagacactgttaagaaagtgtgaaagcaagcctcagagtgggaaaaaaattttaaatcacagatccgataaaggatctgtttatagaatatataaaaatttcttaaattttaataagaaaacaaaacacttggaatttaaaaaatgggcaaaagatttggacaaacacttcaccaaaaatatatatggaaagcaaataaggacgtaaaagcatgattaatttagttcttagagaaatgcaaaggaaaactacaatgagataccattacacatctattagaggggctaaagttaaaaagaagaaccataacaattatcggaaaggatgtggagcaacatgactctcatacattgttggtgagaagatagtgcaaccacttcgaaaacagcttggccattgtaaaagaagttaaacaggccaggtgcagtggctcacgcctgtaatcccagtactttgggagacagaggcgggtggattacttggggtccggagtttgagacaatcctggccagcatggtgaaaccccatctctacgaaaaatacaaaaaaaattagccaggcatcatggggcatgcctgtaatcccagctacttggaaggctgaggcaggagaattgcttgatcccgggaagcagagattgcagtgagcccagatggtgccactgcactatggcctgggcgacagcgcaagactccatctcataaataaataaataaatgaagttaaacatatatctgccatgtaactcagtcattcaactcctgtttaccaaaaggagatcaaaatatttgtcaatataaagagttctgtagcagcttactttgctatggacaaaattggaagcaactcaaattcccattagcagatgaatggataaacagtgtgatctatccatgaaatgaaatactaagcagcaatgaaaggagtatactactgatgtacagaacaacaaagatgaatctctaaacaattgtgctgaatgaaaggagccagacaaaataaaaagtatatatttgatgatttcatttattaaaaaataattctagaaactgcaattaatagtacctgaacacaagccactaggtcactgggaagtgggggtggggatgggtgtaagggtaagaaggcaggaaggatagattataaaggggcacaattaggggcacaaaatagattataaagggacttcttaaagtctaatttatctttctctttctttttttggttgtccttttagtgtctatatatttaaatttgttttcaatgggcagcatgtacttagatgttacttttaataatccaaatggacagtctgtatctttagagtttttagacagcttacatttaatgtgactactaacatggctgagtttaaatctaccatcttactatttgtttgccatttgtgctgtctgttctttgttattctttttctctttttctgcatttttttggttgaatgctttttattctattttatctcttgtgtag

SEQ ID NO: 2983 - DNA, 9266 bp, Homo sapiens
ggaaacagttttccccatcctcacggctctggaaaagaggaacaaaacactaccagttaaataaaaagcttcaaaaggcatcgtaaattcccgtagcaggatatttaaagaatggttttaacaatcagactaaataaggcgacctgactccatgcctggaaaactcaccaggctcaggagagctttgtcattattacctcatctgagagccacttaacccaggcaggccctggacgtgccttgctggctgatctcacgcaggagagatcggtgcagtgcaggcaggtggcagactggccgtgcctccacacgggccctccctggccaccactgttcgggattcagttcttgtttctgttgttactcagagggcatagaggagaccggcatacccagcggccaaaggcagggcccaggcgggggtgagcacaggctgggactctattccctggggtgatggaagactggctcttgagctgcatccttggtagcttttccttcttcatctcattgccagtgaggacactgaggaggagaaggaggtgaggaggaggaaaaagatgaggaaaaggagaaaaccaaccacgatccactgtcaccaaatgagcatgccaggttgccatgctgcacagctccaagaagcaccactgtccatgtggtcaacatggatggatccctgaggaggtgtccagcagcagcctgcatgccatgcgtggctctgaagtcaataatcctggaaaaagggtcattccttcccaataaacgacagtgggctatctcccgcagacacccacgaaatttccctccttttccttccatggaggactggtgaaaacgtcatcatggacctgacctgcatctggagaccatccctcagaggtgctgcagagctcctttctgcccaggcatttacggtgggtgagaacttggagaggcgagctcacgagggagttggggttttgacttggccatgactactcagctcaggatgaaagctgatactttctgagtgcattctttgattaacccttcaatcctcacaatcaccccatgtcaccaggaggaaactgaggcaaagtccacacaactggcaaatctggtatgactctctttctgtcacagcagtttgctggcaacagacctacagccagatgctcaggtgagttagttccagtggctgcttttttgtggcacccagacctccattctctcccttcatcactgacctgttgctggtgccttcttgggactctcccaaggccttgctgcttttctctcctcctgggctttgaccaaggcttacccatgtggccacacagtttcagcaacttgggggaaaatgataggaggttgaatccctttcccttaggaagggactgaggcttctcatgctccatctagcaattgtgtctttctcaaaatgtacaacattatgttccacgagagactcaacacacaggtgcacaggtgacatataggtggctttttgcctatggagaaagtggagcatcggaggagccacagagagggaagtgagggctagcaggtgagggcggtgtgatgtttcttctcctctcagccaagctctgtcgctccttgctccaagggacagactgtgctcctgtgggaagcctctgacctcactccagtgagaacagcaaagtgagtggaggtgacccagccgcccttctgcccaccacagctgcttagctggaggatgaaatacacttattagccaaacccaatgacaggccttcgtttctgctttttaatccctcagtagtttataaatgttcctttctcttttgcagctttgaactacacccctttctttaaggaatgtcaaattaaacttgaatacaaaagaatatttctcaccatcataccatataagtttttatgtgtaattttatggctacgctttccgactagatattagtattataatattccaaagcgaaaagcaaaaaagagttattgccattgagatgtaaatatgaataaacaccgtttttagaatccagtgatttttgtcaggcttttgggagtgcttgcttgtcattttataattgcaatgaaactgaaaaatagacctgaaattatataaaaatacatcaaggagtgccctgcatctatgttctcctagtctttgaaggcaaattctctatgaatagaacttatagagattctaattggtcttacaattgagtttccggtaattgaacataccttttagtcttctttacttcatatcatcatttcacatcttcttcatttcaattactggtgctagaaaataaaacgcaatacactgtgattcgtgtgtagaatgctggttagttcagctccaaagagcaagtaagatgttctatgctcagctctctcctgggtctgctcataataggtattcagtaaatagttgttgaatgattaaataaatgaatgagcaaatggatacaaggatgctgctatgtagcattatgtaacttgcttagattgtatgtattttttactgtctgtctcccctcaatgggatgacggcctctcgagggcagacgttttcgtatgatttgttcacaggtgtatcccaggcacgtagtaggatgactgacacataaggtacttggcaaatatttcttgaacaattaacgagtctggggctgtagccacagattgcactttctcatctcagccagatggttcttaaatgtatatcttcagtcataaagggaattgggagaaatattttagatgtgttaaagaatgaaagcagattgctcgctgttcctggtctctttacacaaatgagtctgcccacaagagccctcacggggaatgtgtgaaaggcgactgtcgaccccagcgtttctttcttaggaattccttcagaccacctttaatttgtctgctgtgtagtttctcactttttggctcctcactatactcacttctcatgaaaacagggactcaagtggatgcgtacacccatgttcgttgtgtgctcttcacagtagccaaaaggtagaagcaacccacagtgggtgaatagataaacaaaatgtggtacgtgcatgcaatggagtattattcaaactttattttattttacttttcaagtctaagtgtttaattattattcacctatttcacagaaaaaagaggaatgtagcaaatgggtcggggttgtagaaaaaaaaatcccggactttacgtgtcattctgttttcatccgagagcagggcagtcccgacatcaggcacagcagctgcacttttccgaagcccctttgcggatgcagccctgggcacacttggcacagcccagggggcaacaggagcagcagctcttcttgcaggaggtgcatttgcactttttgcacttgcaggagccggcgcaggcgtaggagcctccagcggcgcaggagcagttggggtccattgcaagccgaggtgagaccggcgttcccaagcgagaagagaagaggcagtggaacacgtggagggcgtcgtggattgattcaaactttaaacaggaaggagattctgacacctgctacaacatggatggactttgaagacattatgctgagtgaaataggccagtcacaaaaaggcaaatacaggccaggcatggtggctcacacctgtaatcccagcactttgggaggccaaggcaggtgggtcacttgaggtcaggagttcgagaccagcctggccaacacggcgaaaccctgtctctactaaaaaatacaaaaattagctgggcgtggtggcacatacctgtagtcccagctactcgggaggctgaggcaggagaatcacttgaaccagggaggcagaggatgcagttagctgagattgcaacactgcactccagcctgggcaacagagcaagattccatctcaaaaaaaaaaaaaaaaaaaaaaaggacaaatacaattccgcttatgtgagtttcctcgaggagtcagattcatggagacaaaaaactggatggtgggggaagaggagattggggtgttattgttgaataggtacagcgtttcagtttgtgaagatgaaaaagtcctgaagacattgttaatgataaaacaacactgtcaatatacttaatgccatgaaactgtactctggttaaaatgataaaatttatgtcatgtataattttactatgataattaataatcttttaaaaagacccatccataaccacccatttgggctctatggttccactcatgcctttggctttgccttgaggtcctatttctggagaaatcttcaggtatgaatcttggcctgcctcgaggacttagctgtgttccttgactcaggtttgagtggcaccttctcgtgttccatttgttcatcatcttgaacctaaagcaaagaatccactcttaattgttgtcttggtttaagtcaggggccagcacgagagggttctttattacggttttcagttaaccattcagccttatgcaggtcccttggaggagaagttgaagagattaatggaagccgaaatggctgggaactatagattgtgattattgtactactaagatggtgttgcagctaggaaggaagtaaataattcaatacaatacatatgtatatacacacatcaacttctgagtccatatataaatgagtaggtgacttgggcacttgcttatttatgtattatcctagagcatatatgttatgaaaggagggattttttgttttgctcattattccattcccactgtgcctgttatgaattaggtggccaatcaacattagttaagtggatgaatgagtacattttacacacacacacacacacacacagacacacacacggagattgagagagagggagggtcattgctgcttctggcttagtgccaaaaagagttacatgtaaagaaactcaaatctattatagcagttagcttgtgataggctttctttcctgccaaaccataattgtgtgctgttgtaaatgacatctcctcccatgctttggaaacttgtcttcatttcgaaactggtttattgtccaagttaattctcctcccgcgttttcttttcttttctttttttttttttttttttttttttttgagatggagtttcactcttattgcccaggctggagtgcaatagcacgatcttggctcactgcaacctccgcctcccgggttcaagtgattctcctgcctcagctttcagagtagctgggattacaggcacccaccaccatgcctggctagtttttgtatttttagtagagacagggtttcactatgttggtcaggctggtcttgaactagtgaccttaggcgatccacccgcctcagcctcccaaagtgctgggattaccggtgtgagccagtttgcctggccaactctccctttctatactgttttgcatattttcattttatgagcaggttggaagatgaattttaagggtgtttggaatacagaaaggatgaaacctctgaaattttctttgtacaatttttaatgctgtaaagtctcatggcaattaaacaattattatttaagcaggatataaaaagttatgcagagcgtggatctatttaagacacatgtaatataataattattggtgttattaataccagttagtacatagcacccaatatttgttaatcattgtgtaattaattttgttagtttactttgggtgattcctctaaggaatatatgtgactacatattattattcctcataacattcttgggagctaaatattgtagttcagaggtaacaacatctcagatgttaactgatttgccatacaagaaagggactaaacattcaggaacaatggaagattatatggtacatatattttctatttcaaattgctctgaaaaatttatgcctagtccgttttatcaagcaaatgtgcagcattttttttttctataagtctagcttttctttcaacacaagactgagctggagtattttgcctcgcagacagtgagtctcagggcacctttttggtggggacagccatactcaggtctccactccacggagacctgagacttctgaataccaagagaaaagagagagattgaaaggaagggttcagtccttgaattcctgtttaaactccatgatgccaaaggggttagatacattgccaaaagcttaagcaactgagcaaaaaataaagctgaattggaaatgatacagggagagaaaaagagttgggtcagcaggtaggagttagtggcttcaccccatctctttagcttccctaaggcctcttggaggatatcttttccactccttactccacgtctgcatcacctgcctctgtccaggctccgtggcggcatcagcaaaggcaaggcagccagggagggccgctgagaactgaggttccaaaatagggaaagtagaaggggagggcttggctctcaaactacttcagttcttcctcctcctctctccctctctctcctccctttactggctcatttcattttcccatgctgccattctttataagtgcaaccacaaagactctttaatatagcattaaaaatccagttaccgaaaatcaatttgtctatacaaaataaggatgcaagataaacaggatgctcgttctgtaactgtctgaggactctccacaggaaagggagaaatgccgtggggagacattgacgtcctgcattcatcatgtgattatccttgtcccgctcgtcagcggcggaatgagacagaacaacttgacctcgcccatcaggactggagaggtcgttgttgggattagaaacccagaaggtagagagataatattgcaaataggaagtgcttcacacacagtaactgcatccatggcccagagaacaattgtagcacacaaggagcagggctgtggctaaagtgttggcatctggagctaatagttctaaaaatgatataaggtagaggtagaaaaacaactatctatgtccgaaatgaaggatgaagagctgaagtcactatcgaaagggcagaggcctactaaccagcatacaaagtaaaacattttctaatcctatgttggatatacatttaaaatgatttaaaaacaaattctcacagaatctcacaacaatcctctaatgtaggcaggaaactactaccaccctcaggtgacaaggagatgggctaagtgtcttgcctaggtcacctggcgatcacgtctatctctggcgccacagtctctcactcaccctgcttggaaacctgcccgtttctgaatcatgtgaattttgtgtcccccatgcctgggcagtacctcccacttctttcaaggcaacagttttctcctctccattcccaccatgtcctcagcagcccaggtccctgtggcatcacttttggttacctgtccagagtcgcccagctaaggtttatctcttctcattaggctcctccaatcccaatgctatagagcacaattttcattcttcctggtgacattgtcatccccagatgtccttgcagtgcccagcacacggtaggtgttgactaaacgtttgataatggaagtccttccacgttaaggctctgctcccctgtctgcccctccaagttcttcgtctacccccgttttctctggtctcactgagcaaagacagacagccttccaccttcacacctaaacttgctcttcatctggaaggtagtgtgctcttgaaactacctttgcaaatttatgacaataagagaaatatgacatagttgactccgtctttcttctaacctccaagctgtccttggtcatccctgggtataggccaagttaactttggtagaaattcagtttatagtttaaccttaaagcaaggatgatcatagcccttcccccagactaaactgactttgtaacactaatgaaaggctgcagggttaggaagatgagagggcctgaattctcagatgtaggcataaatgataagcagccattgttttgaaggtcacaagatttaaaactttcccaattactcctggagataacgtcactattgtagaacctaaaattagtcttttgaggtgatttttgactcctgtattcctgataactggctgactccacctagacctgcccattttcctgcatccctatgatttcatccccaaccaatcaacattccccactccacagccccctgccccccatactatcctggaaaagttacaacctccaggcctttggggagactgatttgagtgataactccagctgatccagtgtgagctggcctggcgtcaattaaactctttctctttttgcagtgctgtggtctcagaggatcgattttgtccatgaagtggcaggaagaatctgttgggtgattatgctctcctccttcctgtaaatgaaaagtaaaattctaaggccctcaactgactgagtggacccttctctaggccaaggggacccaaagaaacctgaaaaactaggtcaggccatatgggaagtgggggttggacatgcctccttatactttcctccctttagtgttcaggcacaactgaccaaacttaacattaaaacagagatcttaacactgacaacacagactctttgtagcaataagataccaaattccaacctgactctagtatagcatcacatgacaaataaagaaggaaatcaaaacatttcaccccaaaatatgtttctttgtcatattttgaaatgacccagcaaagccatcttttgtgggggaaaatatccagctgtaaagaatgtctattaacataaccaagtctttccctttccaggccctcccaatcctgaggaaattaactgagagtctagcaccttttaaaagtctgaataggaaacatttgccatctattgtctcgaagggtggccacctacatgatttcatctacataataagaaccttggtctccacaaacccttttcttgacccagatgctcctttctattcatcccaggtcttcagataataacttagctgtttcgacaaatttccgattggtaaatcttgaaatccacatatgacctagaagcgtccacttcaagatgtcctgcctttctgggatgaaccaatgtatacctcacatgtattgatttatgtctctgtgtgtaacttctgtccccttataaggtgtaaaaccaagcttaacccagtcacctggggcatatgttcccaggacctcctgaaactgtgtcatgggtcatagtccttacagttggctcagaataaac

SEQ ID NO: 2984 - DNA, 22564 bp, Homo sapiens
tgatcactgttggaaggcagctgcttgaggtccaaggcagtcagtgtcccctctcttttgcctcgggacagctggtatttatcagactcctaagaagttttccttgctccctagtagaagagagagattatgcagcgggcttttgattgatccaatgggaattacattgatctggtgtctggccttggttcttatcaagtggatcacctctaagaggcgtggagctatttcctatgacagttctgatcagactgcattatacattcgatttgaatcagaaagaagaggttctcacccatatattgattttcgtattttccactctcaatctgaaattgaagtgtctgtctctgcaaggaatatcagaaggctactaagtttccagcgatatcttagatcttcacgcttttttcgtggtactgcggtttcaaattccctaaacattttagatgatgattataatggacaagccaaggtgtgtatagtttttttaagaaaacattaattttttgataagtttactgaaggcctttattccccatacagtaatgatttatagagtctttttctctgtctatgaaaagcagttgagcctattttccaggtttttttctttagagcagctgtttgttttataattagccattacagagcaagggaaatttctgaaataactaaagtagtgacaatgttttcatttattattataacattacgtaacaaggagatcaataaaacattaaactataagatctcacagaattgtaatgctgggaagacttagagattacctgatctaatcatgtccgtattccatcaataaagaaactgagtccaagagagcacgagggacttgtttgcgcccacccagctggttagaggtaaacccagcacagaaagttaggtctctctctcttttttgtgtgtgtgtgtgtattaataacatcttttcacaaaggtctcgtgactttcagtcaaatgagtcttgatagtctcttgcattgagagagatttttgagggtttagatgtatcatagttaaacttgttgattgtgagcattatttacttcctctttatataatttaaaagaaatgtcttactgaacatcagggttaaatgagcttgtttttaaccaaatgaggattttaaataatattaaatttccaatgtattttaagttatatttgacttaatatttacagaccagattcttgagtttgtgtagataagtttttaagttgtgtaggtaaagctggggtgtcttctttacaattacatgaaagtgaagaaaattacttccctgtttagtaaaagaaatcagtggaaagcgttcatgcctgctttaaatgttaaaatgtttacaagttctgccttttagaatgagaatattgatctctatgtcatttgttgttattagtactgttataattaatgatttctactagtagtatcttagtgttgctcatgtcagtgtattcataaatgtatacaacagtgaacttttggatataaaatataagtttttttctagaaaaagtccacaaaaggttcaggttaagaatgtatggtataaaaatatttggtttttagggcctttgtgggatttatttgcttggctgaagtacacattatcctaaaagttaatgtagtaaattgtgttattttataagcatatttagataatataaatacatatccataagttagaagtgtttttttaaaaactgaataacaaataatttaagcatggtgtggtatcagtgtcagatgcctaggttctagaaacagactacctaatttaagatcccagctctatcactttatagctgagcaagttagttattttttgcttgtttctacgtccctaaaatgagaattgaaaacaatgcctgggctgggtgcagtggctcatgcctgtaatcctagcacgttcggaggccaaggtgggagaatcacttgagtccaggagtttgaaaccagccctgggcagcatggtgagaccttgtctctacaaaaaaaaaaaaaaaattagccaggtatggtaacacatgcttgtagtcccagcttctcgggaggctgagacaggaggattgctcgagcccaggaggtcatggctgcagtgagccgtcttgtttgtgccactgcattccagccttggtgacagtgagtgtgagaccctgtctcaaagaaaaaagaaaacaacatctgatagtgttgttcttagtaataaaagagtgagtaacttataacagtacctggaatacagtaaatactcagtagtgtcacttatttttattagattgtttgcaatttagtttctaaaccatacaacatttgaaccacacttctgtgatgttaagtgatactagaattcttaaaggtttgcaagactgtagcaataagctgggaaacataaccttcctgtgcattcattaattgaaaaacaaaataatgtttcatttttcaaatggagtttatccctttggcatttttttggagccagttgaaaaagtcatgattaaaagaaaaatgatacttgtattttttaaagtaaatcaatcactttacattttctttaacttctctatggaatatctccaaaagacaatgttattgaaattaaattacagtagaaatgtttggttttcatttcagtgtatgctggaaaaagttggaaattggaattttgatatctttctatttgatagactaacaaatggtaagtgaagaatttgacttgctcaagttaatgtagtctagattactgcattgatggtgcagccgctggtgcgttgctttcatttactgtactaaggttgttagccctctgctggaagagagtgtattagtccattttcacactgctgataaagacatacccgagactgggtaattgagaaaaagaggtttaatggactcatagttccatgtggctggggaggcctcacaatcatggtggaaggtgaaaggcacatcttacatgttggcaggcaagagagaaatgagagccaagcaaaaggggaaaccccttatgaaatcatcagatctcgttagacttatccactaccacaagaacagtgtgggggaaagcacctccatgattcaattgtctcccaccgggtccctcccacaacacatgggaattatgggaactacaattcaaggtgagatttggctggggacacagccaaaccatatcagggagcatcatttttttctctttttaagtgacttttctaaaagcctacagaatcaatctcataattttatgttttgattattgtccttaaaagtaatcaaatcatcattagtatcatcatcatcatgacttggcagattggttggcaattgccgctgctattattaataacccaaagtaaacattattatctcatgttttttatttttattttttggtttcttttagattgtggccatttataatcacatctgatgttgtatgcctgtttcctgaccaaagcagtggttccttgctttcagatagggaatggggaagagctgtagcttctttaagagcgcttatcagaatctacagagtatgggtggtttgggggaaaatgcccacaggtgattctaatcactcctgagtttagtttggttctggatggaggggtcatgttttcttattctctttgcggacagaaacatgttctgtaggaaaaggaacagggaatcactcttatttaggataaaattgtgggcataattattggtggtacaattgaggaccactaaaccttaggcagttctaccttttagtatatttttatttgggtagcttttctagaaatacaatttcctttatcaagaaagtgttcatttccatttccatttttaaaaaagttccttcatgcctgtttttttttgttgttttgttttgttttgttttgttttgtaacacaactaagcatctcttatttgaaatattttgttgatttgtgttcttattcactggtaaaagcagttcagctaggctgggcgtggtggctcatgcctgtaatccccgcactttggcaggccaaggctggtggatcacatgaggtcaggagtttaagaccagcctggccaacatggcaaaaccccatctctactaaaaatacaaacattggctgggtgtggtggttcatgtctctaatcctagctacatgggaggctgaggcaggagaattgcttgaatctgggaagcaaaggttgcagtgagctgagatcgcgccattgcactccagcctgggcaatagagcgagactgtctcaaaaaaaaaaaaagcaattcagctaatgttttgccccagagctgaaagtacactgagaggaagtcagtgctgactttagaataatgaaatcactgctgtactttgaaatcacctgctttttcttattgctttggaatgaagctcctttgataaggatgccaaatatgtaaaatgaacaaataaattacctttatttttcttgagaatcaatgtgggtcttttagtatcactccattattctctgtaagctgtatggcaatgcctagtggaaatacctttgtctataccttctgtttgcttatgcagtgttgacagaaaataaactggactgatcctaggcaaaattgtgaagacagtgaagtttgtctttatcagcagagccaccctcctgcctccctgcctttttattcctccccttcgctatctctcttctacttttcctttgcccttggtgattaagtgttctgttcttctccctgcccccaccttggcccgtacacacaggaaaggctctgatatcatttacacagttagccttcccttggcccttctcctttttgaaaatacaggtagtgaaatatcaagtggcccaccttcttcttgctcagggaaattcccctttcctaacttaacacaaatattattttaggtattatctcaaggcaaatatagatgaaacaatgccactcttaacattttcaaggtttagccttacataaactctcacagctcatagcctattattagtctactgggacacttgtcactcattgaaatagttgattgttcttctccaaattttatttttaaaaagtacatactctgctagttgggggcatggtgatgaaagcggcgtgagctcagcagtgcactggatgggcagaagaaatagccagcagtccacagtagttaactaagcacttcgctttccttttgatcacctcactctttgaatgggatttgtggacagggtggctaactagtttccccttagggttcattccagatcattagggtttagtagaaaccactcatggttagctacccacctttgattttagaggtggagatttatacattcagttaactacagctattcaaaagctcaggaattttctacttaaagagatgttattggggaacaaatgggcagaaaaaaattcctttagcttatattatataatgagaatggctttccttttaaaactgcttcacctgaagtgaattctggataacatacattcatggtatccaagtgtatagttttcccttcttgcttattgatccagtgctttcttgtgtttcttatgctggtaatttcccagttgatattgggggaagaacagcaaggcagaggaggaagcaaaatgcagtgattcgtgccaagacaaatcgttcccagcttgtctgctacaaggagggaagtagttattgtctggtaggatgcatttggagttccttttgtaggattgagggagttaagtgatgcgacatagcaaaagcttgtcactcctaaagccacctggttcatgaggacactagctgccaggcctgcgttgtcagggtggcctactccttccaaccagatcccatctgggatcaccttctaaaaatgattgaggaccactctttcataggcagttctatcttttgatatatttttatgtgggtagcttttctaaaaatacaattttctttttcaagaaagtgtttccatttccattttttaaaaagttcttctgtgcctggtttttgtttaacacaactgagcatctcttgttttgaaatattttgttgacttgtgttcttactcactggtattataatcctcagttggtatcttgcatgcagcttttcaattacatatgggtagtacactttaagagactgattcttgtcagattcctttggtggggacattacatgtgtttcttcactgcactttgcctgaattccaaaagagggtattttcccattagattgtagctttcttaaaacttattctacatcctagaaatgggtaatttgttttgttacatttgaaaaacaatttggagaaccttatgataatctaaatatacagagaatgaataaacattctaaaatatttatatactcgaagatggttgttacagcaatagcaacagacacgttgttcacttcttcagaaatggctccacaccacatggactcgtgtttgtaccaatagagcatatcaggacctgaacacattttaacatttaatttatttaaaatgtaagatttgaaatgcttttttctttccacatgaaggtgatacgtcaggtagtttttaaaaatagtctcttttggcctgccacatcttttctgtcattgcttatgcaaataatgctccaattaatgtactttttcatcagctgtggtcttttgttggcagttggttaggcagttttagataacaaggttaaccaaacagtcctttattatccttcataaatattattattataaattttcaatttgggactagtatgtcttttatacatttttgtaagagtcatcatagacgagagaatactagaatcgtgtattttattgcattatctgaatgttggcagtaatttatgagtctatgtgaaggatgtagtctacttaaaatagactttttaatatgtagcctatttaaaacgtggtctatttaattgttaaaataatatagtatatgtgtcctatggaagtttacaaaactgagaagtataataggaggtataaaaaatggagagttacaccatggaagggaaaacgaaacatcataaaaatggtagtttttccaaatttaatttctattcttggtgtgactccacttgttagtgacaaaggagtggacgttgaggacgaaaacagtccccattgcgtgtagcagctctttccaaaaactcggctctgtagggggatggagcaggtgaaactggagggggccaggagaggctgtgattctttattgtttcagagatgagagaatctagaacatgtctgaatgctgatgcttgttgagacaatatagaaaagagagagagattggtggggtggggtggggatagttgtacctgatagaacaaggaatatctctgaggaggtgtggatggattggcttttgaaagaaagggaaacttggccaggcgtggtagctcacgcctgtaaatcccagcactttgggaggccgaggcgggcggatcacaaggtcaggagttcgagaccagcctggccaacaaagtgaaaccctgtctctactaaaaatacaaaaaattagccgggcttggtggcgggtgcctgtactccctgctactcgggaggctgaggcaggagaatcgcttgaactcaggaggtggaggttgcagtgagccaagatcgcaccattgtactccagcccaggtgacagtgctggactccatctcaaaaaagaaagaaaaggaaacttgagggcttgtattatttctgtgacatatgaggctgtggagaatgagggggtggatgggaactaagtatgttgaaagtttaagaagagcataaaaggcttgaaaataggcattttaaaacgtgaaagagccatttcactggaaagacaatatgattgctgggcagtgttgactacgagtttgtagcgatattctgcctagttttgtgattccccctccccacccccccaagcaactctcagattttctgcagctactctggaaaagcaagtggctgagttcagagtttttaatcctgatgatcttgaggtcattgatgcctcctcctaaccctgtatggatgagaatagacacattctccacctaacaaggctgcagccaaggaagtgtgctctggggcagtcagtttcagtgaaagcaagatggcagaggcaatgtcaggagggaggtcaggtgcagccacactgagttaggttactatgtgggacaatttttaaagttttctattgtctattctcattattttggtgtctttaaaaaattaatctatttgaaaatgtctagttttcagttctttggttgtggaaaagtaaaacaacaaaaattaaatttttcttataatgaaacaagatgtgacatataaagttcataactggtaagaagatgcatatttttgatagacaaaaagtgggaattattactctttccatgttttatattcaaaatctgtatttcaaagcataatataattgtgttgacttgtatttcctactaatgtaatgtctcttctttctttttaggaaatagtctagtaagcttaacctttcatttatttagtcttcatggattaattgagtacttccatttagatatgatgaaacttcgtagatttttaggtaagtgattctaacccattaacagtaacaagatttacatttatacaagaacctgtttaagttttatctcagttatatcggttagctattgctctataacaaaccagccaaaattagtggcttaaaacaacacacagttatttagctcttgcatctgtggggctgttaaatgcttcttttggtctggtctgggtgagctcatttgtgcacctgcagacagcaacaggtgggctgcatgttggttttgtagagacctcagctaggataccaggcctgacccatctcggctctacatagtcttctgttaaatttaaaagaagcagaggagtttggcaccataatagatttacattaaaaacaaaaaagaattatttattttacaattagccgagctggttcaaacagtagtggcaggtttccgagagagctgatatccccaggccgctggagccctgggctcagaatcggcccaccttcacttctgcatgcagcaagtggccacagcaagtcagaccagggatgcactacacctgttggtgcaaaggctgcaaagtcacagagccacagatacaggaaattgtggatacttgatttcattttgcaatgttccttacattggccacagattgctgacaaagatgacacaatttctgtacttttctaaatttttgaaggctaaaactttaaaagagcaggtatattgcagttaggtttcttctttttctgacccctagaatctctttgacggtaggctttaaagattatttggggccaggtgtggtggctcacacctgtaatcccagcactttgggaggctgaggcgggtggatcacgtgaggccacgagttggagaccagcttggccaacatggcaaataccccatctctactaaaaatacaaaaaaattacccaggcatggtggcgcacgcctgtaatcccagctgctcgggaggctgaggcacaagatatcaactctagtcttccttcttgtaataggcaccagtttctcctagttggttctacctgaggaaggaattcatgattcctggtaaagtctttgtccgtcctttaggtggataggagaacttctgagaaagtcctctcctgcatttgctgctctgagtttgaagtccaaagcagcatattttggggtctcattttctgaccctcattgtgatatttcatatagtgcccagatcaagagatagcttaatttgtaatttatttggttatatacaattttgcttatatacagcaaaaagattacaacttaatgaaggttcacataatgattagcattttatagcaataaagtcttttaaattaaggtgtatacatcgtttttttttaaagacataatgctattgtacacttaatagactatagtgtaaacatagcttttgtatgcactgggaaacccaaaattttgacttgctatattgcaatattcactttattttagtagtctggaacttaacactaaatatctcactggtatgtctatacttaatagtgagagaccatcacattgatttgatatcctttttaaaatctttcaattttaagtagagagaaattacaaattattcaggaagtaatttattactgtaggaaaatggtaaaactgtggaactataaaataagttaagatgttgctggtggggacatttaatatttcatacatgctgggcatggtggctcacgcctgtaatcccagcactttgggaggctgaggcaggtggatcacttgaggccaggagttcaaaaccatcctggccaacatggtgaaaccccgtctctactaaaaatacaaaaattagtcgggtgtggaggcatgtgcctgtaatcctacctactcgggaggctgaggcaggagaattacttgaacccaggaggcagaggtgagattgagagagagagagtgagccgagatcgcgccactgtactccagcctgggcaacagaatgagactctgtctcaaaaataataataataattaatataaccatttttgctaatctgcaactgctttatctaggtaaacagaagcctgtgtgactctacagatacaattttgcagtaaattctcaagtttataattaatatagtgtgagtagccccagtagctatactggcaattataaagatgcatatccccactttgcacattgttcatatgaatacttggctgtttatcccttcatcctgttgccgctaatgtggaagccactagaacaggtttatgagagaattaagccttaaagccataaggaatccattggcttcaatggattatcttttgtgcagcatatctggaatggctttggctctatactgtccttgggagaattgagaaaataataactcaggtgtttttagttagtttgtttgtttgagacagggtctcactatattgctaaggctggaatgcagtggcatgatcatggctcactgcaacctcaacttcccaagctccagccagcctcccacctcatccaggctgaggcaggagaatcacttgaacctgggaggtggaggttgcagtgagccaagatcacgctactgcactccagcctgggcagcagggcgagactccatctcaaaaaaaaaaaagcctcaataccaagaatgtacagccaaatgaagagctagaaatattaactcagacttcagacttctacttagaactctggcaaaaaaaaaaaaaaaaacagataaatttattacatagggcttttgagaagctttttcttttggagagtcttgctctgtcacctaggcttgagtgcagtggcgtgatcatggctcactgcaccctcaacctctcggctcatgcgatcctcccacctcagcctcccgagtagctaggaatataggtgtgcaccaccacaccagactacatttttatttttagtagggacaaggtcttgctaatggcctaggctggtctcaaactcctggcctcaagcaatcctccagcctcagcctcccaaagtgctggaattacaggtgtgaggcagtgcacctggccttgagaaactttttaatgtgtattaattataagtagtatgcctgaaatactgtacagtagtccgcctttatctctggttttgctttctgtggtttcagttacccatggtcaactgtagtctgaaaatattaaatggaaaattccagaagtaaacaattcataagttttgaattgcacaccattgtgagcagcgtgatgaaatctcattgcatcctgaaccgtgttggttatcagatcagccatgttggtatcacagtgcttgtgttcgtcacccttattttacttcataatggccccaaagcacaagagttgtgatgctggcttattgttataatcgttctattttattttaattattgttaatttcttactgtgactaacttataaattgcgcattatcgtaggtgtgtttgtataggaaaaacatagtataaatagggtttggtactatctgtggtttcaggcatccactgggggtcttggaacatatcccccaagaatatgaggggactactatactaaaaatataaattataaaacacatacggccgggcatggtggctcatacctgtaatcccagcattttgggaggccgaggtgggtggatcacctgaggtcaggagttaaagaccagcctggccaacatggtgaaaccccattgtgacaaaaatacaaaaattagccgagcatgatggcaggtgcctgtaatcccagctactcgggtggctgaggcgggaggatcacttgaactcaggaggtgggcgttgcacagttagctgagatcatgctgttgcactccagcctgagtgacagagcgagactccatctcaaaaataaccacatacaaaaatagcttattaggtggggcatagtggctcacacctgtaatgctagcactttgggaggccaaggcaggtggactccttgagcccaggggtttgaaaccagcctgggcaacatggcaagatcctgtctttataaaaaatacaaaaaaatgagccagacatggtggcatgcacctgtggttccaactacttgggaggctgaggtggcaggattacttgagcccaggaggtcagggctgcaatgagccatgatcatgtcactgcactccagcctgggcaacgaagtgagatcctgtctcaaaaaaacactattaaccaagggtactgaaaggctattttaaaggatgggacggaagcaagtgcagaattctgatggtctgtcccgctcactcggcgattgtgtttccccatcacaggtaggctcgctttcctttgagaccactggatttgtgtgttatgctgctagggctgtcaagtaggttgatggcagggggcacagctccaccccgaagcctagtctgttcgtccatgatagcatagagagtcaaattgatattgattcttttggtatacatgtgagttgtgaggtgattatcatctgcccgaatcggcacgattttagccgatagctacatgaaaagtatgagtgggtaactcataattatcacaatttttgtccttgtatatgttgctcatatacaataaaatcgggatctctttctttgatgcagttatgattcaagaagattaccacagtcaaaatccttaccataacgcagtccacgctgcggatgttactcaggccatgcactgttacttaaaggaacctaaggtaagaggttgacattgatttcaggtgaaaatcataagaaaattccttttgatttactttcacatacttctcctgaagttactgctttgactgaaaatcacagacttccttcacaagaatgagatctagctggatcaagtttctgaatctggctgtgtttcagagtgcaacagctagagaattgggtggttgttgagagagaggctggagaagcccaagcaagggccaggtcacttgaaacctcgactgctggcatttacactgagctccacatgggctccatgtgggcagggacagccttggtctgactcagtgaatgaatgaggagctacagagaggaggcaggagactttagaaaattatcctggctgtgatgtgaagataaatcgtatcaagaccaaaagcctgaacacctgccaggagttacttcagtgctccatggaagagagcagagtggccttggtgaagtagggatgtggatagtttgcaagttctcttgggaattagaatgaacaggatgtggtggtgaatgcatttcggggaaagaaacagaagtcagtgaagactggtttgggcagttgagtagaaggtggaagtcttccatgagaggaggaatgtagagcagaacaagttttgggggtaaggcttgtagagacagtgagcaccattttggatccgtggtattaaatgtatttgacatcctaatatagaggtctagtatagagttacataaaagagtctgaagtatagaagagaaatcagacttaatgtatggatttgggaatcattgtctgcaggtgttaatgaaagccatgtttgcccctggacatttcctatccctggcagttctgcaattatgtctgcctatcccatctctacttcaaaactgctctctccctagatcttagttctggctaaggtgttaggcgggaaacaggatgaccaaactggcttgtgcccattgatgccaacttaagaacacagctagtcttctgattatttaagagatcatagaatatgtgaaaatgcccgttttttagtatatatatcatgacttttaaaaaatcaactttattgtggtagaacttacatgcagtaatacagtgcatacattttatgtgtacggttttgacaaatgtatactcccaaccacccaactgtttttttttctctaagagacagggtttcacagtgttgccaggctggagtgcagtggcgtgatcatggctcactgcagcctcgacatcctgggctcaagctggaggccagctaattttttaaattttttgtagagacagggtctcactctattgcccaccccaatttttaaattaaacttcaaaaaaatctctgggccaagactgcatcctctgtttgagaatgttgtgggagagattgatgagtaatcaccatacaatctggtaagtggaaagatggtaataagttctctgcagcacacaaaagggttaacctggtcagcgaaggcttctgcactcccatctccctctgggcacacccaacccaagccaggggcagggaaatctgggtgatgccaggtgagcagggtggggatgcatgtggacaaaaattaataaaaacatgattttgaacactttttgcctgtggagttctgataatacttaaacacttttcatccttaacatactcagtgaacactttacccaaggcttcaattaaggatatagataaaatcacaaagccctacaatgcaggcatttcccttctcccttatcatagtgaacattttaaaatggagtcacccaggactgggcacggtgactcatgcctgtagttctgcactttgggaggctgaggcggatggcttgcttgagcccaggagtttgagaccagcctggtcaacatagcaagacctcatctcttttattcaaaaaaagatagaaagaaaaaaaaacagagtcactcaaagttttaaaaatgacttctgaaaaatttgaagtaggtccaagtgcggtggctcatgcctgtaatctcaatactttgggaggccagggcaagaggatcacttgaagccaggagtttgagaacaacctgggcaatatagcaagatcccatctctacaaaaaataaaaagttagatgggcatggtggtgtgtacctgtggtcccagctacttaggaggctgactcaaaaggatcacttgagcctgggaggtccagcagagagtagtgatagtgccactgcactgcagcctgggtgacaacctatctttagatagatagatagattagatagatgcctgaagattgtatctcttttactcctgagcctttgcacagcatcacgttttatactctttgagcatctgccacatgccaggctctatcctggtgcaaggaatgtggtggtgagcagggcaggaatgatccctgtcttcatgaagtgtacatcctagtgggggaggcagtcattaaacaaatagataaatagaattttgatcaaaataatatgttagtggctgggcatggtggctcacgcctgtaatcccagcattttgggaggccgaggctggtgaatcacctgaggtcaggagtttgtgaccagcctggccaacatggtgaaaccccgtctctactaaaaatacaaaaattagctgggcatggtggcgggtgcctgtaatcccagctacctgggaggctgagacatgagaatcccttgaacctgggaggcagaggttccagtgaaccgagatcatgccactgcgttccagcctgggcgacagagtgaaactcagtctaaaataacaacaacaacaacaacaacaacaataataataataataataatatagagaatgaccaggtggatggcaagagttttacaactttagatagggtgatcacaagtcacttaagtggacagtacataactaaggagtcagccataagaaagtccaagtacagagggaatagtaaatagacttaagtatatatattttgtgagaaatttgttttcagtttttataccttataatttatatggaagagctaattcttggactcttgtctatgtggaaaaaaaaatatttcaagccaaagaaattactggaaattttggagacaaactcatctctctatatatgcattgtcactaacttgagtatttattttttatgtcctcaaggctgaactcatgtggattataaagcattttgttcaagttgagcccaaagtctccttgattgattgacactggtaacattcatagttgtcagctgaagagattgtgattttccctttgtttcctattttaatgtttagtttcatgtttctataatgagtttaaattagctattttacttaataactatacttaaactaagtctggataagaattacgcttacatgtcccagagataaacccactctagcactgaacctttaaaccttgctctacttgtccctggcagttgacaaaagagcctggccctgcacgtccctccctggcccccgcatccttccctttgatgtcagcaagactgatggttgagttgcctttcttgcagatgtacacttattcatgctctgagtagatgctaattgctagtgacaaaaatatgagtaagataggaattttggcccccagaatcttacttgtaaaacatatgggaacctgacatggaaaccacaggaatgtcaggcctccagggcaggaatttttgtctgtctattccctaatatttacctgtcccctaaaacagcaccagcacatggtaggtacttggtcaatatgagctgttaatgaatgatattgtatatgggctttatcattggctgggtttactctaactgttctctgtttttatgtttttattttgttctgttttgtttttcagatggagtctcactctgtcgcccaggctggagtgcagtggcacaatcttagctcactgcaacctccacctcctgggttcaagcgattctcttgtctcagcctcccaagtagctgataggcatgtgccaccatgcccaactaatttttgtgtttttagtagagatggggttttgccatgatggccaggctagtctcgaactcctgacttcaagtgatctgcctgccttggccctgcaaagtgctggaattacaggcatgagccaccatgcccagcctagttctctgtttttagacctctagagcagtggccgccaacctttttggcatcagggaccagtttcacggaagacaatatttccttggatggggagggggatggtttcaggatgaaactgttacacttcagatcatcaggcattagattcttataagaagtgtgctggctgggcttggtggctcacacctgtaatcccagcactttgggaggctgaggcaggtggatcacctgaggttgggagttcgagaccagcctgaccaacatggagaaaccctgtctctactaaaaatacaaaattagctggttgtggtggcgcatgcctgtaataccagctacttgggaggctgaggcagaagaatcacttaaacccgggaggtggaggtttcggtgagccgtgattgcgccattactctgcagcctgggcaacaagagcgaaactccatctcaaaaaaaaaaaaaaaaaaaaaaaaaagaagtgcgcaacctggatccctcacatgcacagtttacaatagggtttgtgctcctatgagaagctactgcttccaaggcagagctcaggcaataatgctcactggctggcagctcacctcctgctgtgcacctggttcctctcaggttcctaacaggccatggaccagtaccggtccatggcctggggattgaggagccctgcgaggaccgccttgtccttttgccttctgtgtgtgggaggttcatttctttcagtaatttctcaggatggacataatgtgtcaagaatctgtcttcactaggcagggcatggtggcttatgcctgtgattccagcactttgggaggccaaggcaggcggatcacctgagattaggaattcgagaccagcctggccaacatggtgaaaccccatctctataaaagtaccaaaaaaaaaaaaaagtcaggcatggtggtaggcgcctataatcccagctgctcaggagcctgagtaagagaatcgattgaacctgggaggcagaggctgcagtgagccgagatcgcaccactgcactccaggctgggcatcagcaagactctgtcacaaaaaaatagaatctgttttcagaggtagcatcattaggaaaaataaaaatacaatactgattcaggacattttatgtcactaaactgctctcctccatgatagtgccacctcctctttaccctcagcaagccaccagtatctcaggtaccttctttctgctatttctactatatttttgatttgccaatttagccaaaaaaaaaaaaaaaaaaaaaaagctaccaccaacgaaactcactgtgataaccattacaatgggaaatgataagggctggcaggcagtgaaaacagtaagcttttcactgaacacagcaaaactcaccacttaatagttttctattttattgaaaaagaaccctaatgatggctttgcagatacaagtaaaagctgaccttcacatatgttaaataatctgtagtttcttttttgacatttctttgttgtcagctcttaacagatgtaatcacagaatggaaataacatctgtcttttaatccaccttaaaaagttaagttattgaagtccttgtctttgttataatattgaaaattttgtttctgatgaaaggtttttttttacaagcagaaatgttacatttttatatcaaatatttttttgcatgtgtgatttgtttttaaagttactttctcttcacagaatttttgagaattcagttgcttattgtcatgttcctatttttaatggttaactctttaatatacctgagaatgttttgatgtcatgtgcagtcatacattaattttttaaatcagtctaattttggattattgtattctcccaggatgtctattcttctgccaataagaatgtaacccctttgcatactgcctaataaattacatgttcataagacatagacacccatgcccattcatgtatatgtcaaggaggggagattgctttatatgcagtatgctttatatcctatgcattctgttcatcttgattagtaagcagcgctttagaatgctttattttttcaatgcttttgtatatcctaaagaggaaataattttcttcatcttctcctattcattgaccttctccgtgtactaattatatgcgatacaaaaataaataatatgcatctctgcttccaggtagcttacagttttccaggagattcaagccctcagacagtgatttctctgactgagatgaacttaacacagggagtagaaagagatgattgattcgttctagcagagaaagaaaacaatagaatttgaatctaaaattatttttatctcatttttaaaattttcagtttttatctttgttgtataacatataaatgttagttcagtataataatccataagtacatatacttaatataagtggtgtatgctcaaaaattttcactgttagagcacaggatcattacagtttagtcagcactgtcctaacgtaaacctaaataataccatgctctgatgagtggtattgtggcaggtcatgaggtgctgtgggaacacaaatctggccaagtttgccagaaaatgagaggcatttcatgaaaagcagatgatatagtcaaggtgatcttttttatcattgaacatttgtcagctaatcataaacttttatttattgtgattattaaataagtttggtaatgattattgagagtaaagttacaatttctggtgtgcaagattgctttccctgacatgaatacattgtatcattgttatgaatgtagccatccgttaggggaggattttatcacagacttgacatagacttccacttaacatgattactcagtagcctccttaaacatcaggactaaaggaataaccttacatcttagattacattattgaaatccaataaccaatttgttgataaataaacacccttaaaattttagatcttttgttcagtaatggctacagtaataaaaatgtgccaaactatgtttgtcattttaaagccattatttctcaaaaagaacggtttatgttttagctgccattttaattaagcttgttaaaaatgaaatggcctaaggatgaactctgtaaactccacatgggcagggccactgttgtatcatggctttgccagtgtggtgatgagatcaggacctggcagatgtgcttggtgaacctaatgaacaaccacctgaggaatgacgtgaagggggaggagattaccaccactaccattggctgctaattcaaaactactgtgatggcgtagagcttattttagatatatctgtgattcattattcttttgtcacacttcagcttgccaattctgtaactccttgggatatcttgctgagcttaattgcagctgccactcatgatctggatcatccaggtgttaatcaacctttccttattaaaactaaccattacttggcaactttatacaaggttagtgcaattttatcatcaagatttattatttttgcattctagaaaatctttcatattttgaagaaatgaaagtaatgaaaataaattctcaatgaatgttagaattttaaccagattaatattgctaacagtattgttagtaatgatatgtccagaaagagacgtatcattaagtaactcagaaacgtcctttgttgtagaatacctcagtactggaaaatcaccactggagatctgcagtgggcttattgagagaatcaggcttattctcacatctgccattagaaagcaggtaggttggattaagacaaatttaatttgttactggttatagaagttaagttggcaaagtaattttataaagttttaaaaattgttatgttcaggtgttccacagttttcagtgtttgtcaaatttaataaattatatacaattttagtaatttagagctatcctactatatagtcggtaacattttaatggatagttatttttatcaaagactattccatgggtttgaatactataaaatttactcaaatacacaattgctcagccatagtttactacttatttacataaatagatattacacatttccatactcagctgaataaaaccttaaggtctaggtataaaggtaaattggatggaatgtaaacattctattacattaaatagattcattaaaatctgttcccagaagttttcaaaactgacaagaaagtaaagagagtgccttatgtcctcaatagcataatcctggagtcacacttctagagctataggatataataatgaatggaaaaaaccctaatattttaggaaaaaaaaataaatgggctattttagaacctaataaaaaacattaatgtgaataaggctaacacgatggtgatggtttataaaatctcacgtcattgccatagtgtggtccacacacaagctttttagtaatgttgcactgagggaaaatgcacgtcagcaaaccatgaaagtggattgaaaccatccacttcaagaaaagtggtgaggtataaaaatatgtttgagtattaaaatttaagttccacttgctgttctctggtttccctttcataatttaaaacaactgtataaaaaactgttttgtgtaatgaccatgagaaaaaagctggactttattttttatttttttaaatctttattcacggataccatttggagtatgacaatacttctggtaagtaaaatcattttttgctgtagtacaaatacgaaaattgcttaaacacactgtatatgtaaattatgggttcttaaaattaagacagattaaaatgtttgcttcattattccctttttaaaaatcatgtttttcatttgatgattaaccctgttgagttctcagatttaataaaaatggaaataaggaatactacctaatagcattatttaatgttttcttcatttagggtttgttttaacattcaatattgtgagtctttttatctatttgacagctctttactgatcattatacagagatagtatttgctatggcccattaaaacaaaaggcaagaattttttttaagtatgtttatcttgttaattgatctgag

SEQ ID NO: 2985 - DNA, 1055 bp, Homo sapiens
ctggcggcccgtcccaccggccccctcgggcgcactgcccacagtcttcaggggctggcttgggctgttctctaagaaatccccccgtccttgtttctagctaataggctgcataattggacgccaagggaccaaaatcaatgaaattcgacagatgtctggagctcagatcaaaatcgccaacgccacggaagggtcctcagagcgtcagatcaccatcacggggaccccggccaacatcagccttgcccagtatctcatcaacgccaggctgacgtccgaggtcaccgggatgggcacgctgtaatcctacccagcacccttcccccgcgtcacccacctgccagagcctaaggcccccggctctcgcactctgtacagcccaccttccctgcctcacagataccaatagagaggttttcttaattaacaaaaggacgtatgccatggagaaacacacccgcgcacacagctgctctctacagaggctgcaggctccgccgagtcccccctcagtgttattttatttatgacttacgctcccgtctgcccatgcaccggcatgcagtggtaattattttagaaatattgttccttggtgtcagcgtagctgtctgtcttaggagctgggtcggcgttccgacagcacttcctgtccgcccttctcctctgccatccagaaccgtccagaactgttgcctgagacccctcctctctcacacagccctgccatgctgactcggtttcccctcagagccattgttgtctgggctcgagtttctgccccaggttgtgtgctggaatcggggggtggctctcctgccacccatggggagcgccaggagaggagggtcatggaggatgttggggctctgaccccaggagtggggtggagggcggagcctgctgggggccctgccttcacagagatgccgcgtgctgggaaggctcttggggtcccctgagcgtcttccagggtggctggagagcacagacgcgccagggagccccctctgtgctcctcagagttcaataaatgtcgtggcccctcctca

SEQ ID NO: 2986 - DNA, 1283 bp, Homo sapiens
gcgtttgcgtggcacgtggtcgggccgcctggccctgggaaagcgtcccacggtgggggcgcgccggtctcccggagcgggaccgggtcggaggatggacgagaatcacgagcgatgtggccctggcgttgagtttgtggctgtggtcgcttcggggccccggtggcgggaccaggggctcgtgagaaatactaggctttagaatttcaccatatgaattttgggagagaggagcacagttcagcccataactaacacacgcaagacaaatctctcctctgccttctccttatcagactactcaacatgaaggcaataagaatgaagacctctatgtataataattgacttccacttaataaataaggttacttggtacactggtcgacaaaaccttgaaatgttgatgtttaagggctgttgattgctggcagcaaagaagtccaactgtgctggtacccgagatagcgtctccacattttcttccaggatcatcacctttgttctaaatagctcccacatagtgtgaacagaagtcatatgttttagattttctgccttggcacccaggaaaccagtatgattgagtaaacatattaaacttcctctgcatttccagcctgaacagatgttgagtacaagctgatccacctacgttcaacctgagagagtccacatccacagactgtttcatttccctttttcaatttacatagaagcatagattcttgctggcatatacaaatgcgccatttaaggcaatcaaaaatggttccacatctcatctgatttccacaattgttgctgtaacgatggactactgaggagagagacaatttctctggcacatcttcccacattttagcaacatgttcatggagagccaatattcagtaattacagcccaattcctcacaatttcacaattcgctaacaatatgcattttcacaatgtaaagctgattttcctttaaccaaatcaaacatgaaaagatagctgcatgcaatgggcaatctagatcattagaagattgatgtaaaattagaggacactgagactggaatagattgcaaacttcagggagctcagaaaacttgtaaactctacattttgaggaaatatgttgtcgatgcttttgcaactctatgcagtaacttaacaaataaagccttaaagtaacttatctacgagttactttgtcattatttgcaactatttcacatcatacagcttctctaggaagtcctcagcttattcaccaaaataaaatttctagttataa

SEQ ID NO: 2987 - DNA, 3826 bp, Homo sapiens
gtgaaatcatggctcactgcagcctcaacctcctgggctcaagcaatccttccacctccgcacccccaagcagctgggactacaggcaagggccaccatgcccaactaatttatttttgtttttcatagagatgaggtctcactatgttgcccaggctgctctcaaactcctgggccaagtgatccttctgcctcagcctttcaaagtgctgggattacagacatgagccacctcacccaaacttttctttttttttgagagattcttaaactagattgtacttacgataaatgttgactgattcattaccttcaacagtgctttcagcctctgatggttcagagaaatgattgtgtatactttatatttcacctgaatcaggtttcggttgagacaataattttctgagtatgtctccacttcacaaaattaatttattttcaacttttctctagttttaccactgttttgataaataatcttacagtggaggaagacttattgaaacaatttcatcacttttttttctcttgtttgcctcagagtatggttgattcattctctccctaggttggagccattgcagaatcaatattttacttttaactgactccaaaatatatacattctagctaagtactttcagcactatgagttgtccttcttttaaagagaaatttttttaaaatgatatcattaaaaacaagccattccatgatttattgtataagagaagataagtacggagttgtaaacctgcaatagaataataccctggatatccaccttcactgatgagtttaactgactcattcttacctgttaaccaaatgcttttgagagtcaaaggcagggtctgagaggaattatcaatgaatatttgtaatgaatcattgaggtcgcttgtgaatagttgaaacttccaatattaaggctgtgtaggccaagaatctagttatcctttcagaaatttttttttctgaccacctactctgtgccttaagcaaaagtacctgcccttctttctttcttttttttttttttttttgagagcatggtgtggtctcggctcactgcaacattcgcctcccgggttcaagcgattcacttgcctcagcctcctgagtagctgggattacaggcgcctgccaccaagctgggctaatttttgtatttttagtagagacaaggtttcaccatgttggccagactggtcttgaactcttgacctcatgatctgcatgcctgagcctcccaaagtgctgggattacaagcgtgagccaccatgcccggtcagtacctgcccttctctaaaggcacttgcttgcagtctttggaggagataagctttgatcaactcatcaacctaatggcaagtatcatttgacttgagaaaagataagaaacagggttctcaatagtgtgatctacaagatagacagcagtcagtagacgcttgcttctctgaggaagtgactcttggaagaattagtaagagctaggtgggcaaattcgggtaagacagaaggttgagaaagatgttttcagagaaggctccacaggaacatagttcctctcctgctgtattatggagagaacatggagccttcagagatataaaaatgtcattgtggctggaatgcaaagatgaagggaaagagtttgaattgaggaagggatcagagcatgcaaggatttaaagattactttaagaatttggtgcattatactcattaaatgatgtttgccacttgggtcaacaaacattctgtaaaggcttagatagtaagtattataaatattgcaggtgatatggtctctgttgcaattactcaactctgctgttgtaagggagaagcagatataaacaatatgtatgtgtgagtagatgtttccataaagctttatttacagaaacaagccatgacagtatctggcatatctcctgatcagataaatcctcatgttgctgccttatttcccaatgtctccgtttgaactagtgcagggatattttggagactttagcaatgcctagtcagcaagcatcagtgtactttagacattgaaaatcgggttaggaaaaaaaaaatatggactgctttgattttcctttgaagtaatgtcacaagaagaaaacagcaagctggttcatttgccaaggaaggaagagcatgaaagacaaaatgaaatgccagtaactaggtactagaggaaaggagtgctaagaaaatgttcaaaagggatcttgaaaagcaaagatcacttggtagatgaacttgttcaaagtgttcgctaactcacctcttgcaagaacaaactatcttgcaaggctctactgcaacatgtctgatacacagcacctgcagtcaacagactctgtagttgcaaagtattgagttttgtgctcaagctatagaagttaatggactgtcataacattgttcagatgaaacccagcaaagcttaacagactaaggtggattttgcctccccttttaatccagtgctaatttctttgagtaatctcagaaaacttttttatgctaaagtgattcatttataaagttcttgtcaaaacaaccagtgtatttaaaatattttggaattataatacaggacacaaatgaaagaagatatttatactaggcagatgggctaggttatgctgcaataatgaacaaccccaaaatcttagtggttgcaaacaacaaacttttttctcccactcacaatacaggttcatcatagtcagcagggggctccaggaatcataattgctgatatagccacctgacagatcagtaacctcagtgtagctggtggccatgagaaaaggcgataatcatctttcatatcaaatattagaacaatgcaagagaaatatgagaaagaaaatgagataaaactaacctgcatttctatcctacttttctgcctgtcttagaggcaaacaccaacacagtgatagaaatgtactgatggtccctgacatgggtaacagctgctttagagctgaatttcaagaatcagcttgtgaacaatgctttggagattaagacagtaggaaggagaagatttgaagcagtaaagtgatttagaaaactatttcaatggaccagacaagaaatggtaatggcctgaaatgagtggagggagtggaaatgaagtcacatggctgcagttgccatttattggagaaactgaatttcagggatttggatcaggtcaaggtatgttatgcacataaaccaaatattaatgatatttatttagtgtgcaccagtgatatttgttttttccttcgctaaactgaagattaaggcaatcagaacctagtaaacattgctgaattcaccattgtatcccccagtgctaatacacaaaaagtatacaatgaattctactacctacctttcgcagtgtggctatccttgcaaatttcaccctttcccttcctttcagtcattcttgtttccccatgctccatagatcatttagccaccacatctttttgtgttattttgttttctgcaatgatgctggtataattcagaactactagcaaaatctcatctctagcttcatgtgatattttcctgcttataaactacccatattcttgctgtgctatagtcaatatgtgtaactcttctgaggcctcctcattcattgcagatgtttgcaaacttacctctcttcttaagggcccattcgtatgtacttaaataggaagatcatcagagacaagtatccacatgtgaactcccttagctactgttcttttctctaaatttctctttttctctgttcaaaaaatttcc

SEQ ID NO: 2988 - DNA, 5351 bp, Homo sapiens
gatctttgtgttatttaacttatttatcattttcattattttaatctcttcatggaaattgtggctaaggatttctaatatgagctctaaaattttagtattatattctagctatttgaatacagtgaatcaatattgtaggcctttggaaacgtttttaaagtaaatattacctgaaaaaaactagtttgttgtaggattaaactctgtgttctgttcttataacttcatatatggcatttcttgaaatgactgaaggaattcttggatttaaaggtcatctcgatttccctaggaagtcatttagacattataaatgatggtttattcagaagaaggaagatgagagatggagatttcctgtcagtgcaaggatattggaggacagacttcaacatattatttatatatattagtatcttatccagttcagctcaaggcagataataggtgatgttttggtgctgtgtgtataggttctagtagattaacaagttattcagccttatggctgtgttttcagatttgaatcagttaatatttgtagaacatccgtgagataaaaagatcaagatgaaggcaaaaaaatgacacaagagctctgaattcttacctttgaggggcggcatacaatttattcaggaaaatgacaagtcaaagattctacaagtttgacaattagctactaaaataaatattttacacacacatgctaagtgtgtgtaattgaagaggggtaaggagggaagaatatagagtatttctcttaagtagactaggaagaaagataggacatttgagttagactttggaagtaggagaaacgagataattggcatagaaatgttggccatgaagtggtgaaagccattgccatggaaaaagaaggcataaaggagcctggcaagaaaagaaaagattcactggtgtggagggagagggaatgaggacgtggtcagccttttcttgggaatttgaattcgtattccaggtaaaagaatgccaatgcagtgcttctcagtagtttttaagcccatgcctcctttagataaacatatatctttaccactccatcctaaaactctgattacctttcctccccataatatgtaggtgattatatttcctacgtatctccagccaagatgattttgttaagcttcactctctatagtatatattgtagagaaaggattccccccaaatgtaaattagatgagaatgttgagttaagttaataactacatacatcctggggacattctaacatgcctgtgtgtgtatgtacttcttcatttcttctccatcctttgaaaatcaccaaggctaagtgccatagccaaaagaataaatgagaagggtgaggtttcctctccagtgcacttgatactaattgaaattagggtccacagactaggaaatttagtgaaatgggtgtattaaaagaacgagggtctggtcgaacagtctactctgagaggaagaggggtataaaatacaatatgaggaaaaaaatctgaaagtactgttcggaactacgctactaaaataggctgtatatacactttttccaggttttttggactttgtatagaaaatgaagtgttttgttttagccatttgaaggattatgtgtctgcatgacatttggtggaagtatttgataagtacaggaaataaaagatgagctaataagagaaaacaatcaggactggcaaattagatttggagatgattcatatagagatcattataatcgcaaaggcaaattatgtttaggaggctctgtatagagaacaactagccaaaccctgagggaatgttaatggtagtacgagagaagcaaatattaggtttctgtctgagtattcagatgaccagaaggcaaatcaccaggaaaatatattttaaaagttaaaattaggaatctttttggggaggaatttatttagatttaaaaacacatttattgaggacctactgtggtaagtgctggggttgtaagtataaataggatagagtcccctaaacctcaagaagctgacaaatatggtaaggaataaagaactgaagacaattggggtgtaatgtgatgggtgagtgcccagtaatttacaaaataattattttcaaacttaatttcacccaggcaagaaaaagtagtgcaaatatttagggtaggagggtgagaaagcaacgaagtcgcacaaatattgtggttttatagtaaatgttgtcaaggtggagacatatatggatgatagatcctcagggatgttttatgggtttaatatatacaatggaaattctttagaaaagtatttgaggagttgtgcagctgtattgctgatatgagacttgtggtttcttttccacattttataactatgaagtagtaggctgggtccttgaataagtgtgtgttctttggtttgcatgaatggtatgtactttgaattctcaaaacagaactccagtttattttctcagtagtcccagtgagaaaagctgtatttcttaaatatggtcagaaagcacttgacggaggagtgtttactgtagaaacctgtgattgtctgcaggtaccagcataaacatgttcccattcctcatcccgggggggtaatctcattattaaacctatgcaaccttcaagttagcttatttttaatgtttgtttcatattttaaaagcaagaagtgaacacggaaaaaagtttaacaatatgaaagaacatataataaatggtcagccccagatcctcagtgccccagatcctcagcaccccagaggcaaatactgttaacagtttctagtgggtctttcatacaatagatgtttttattttcatagagagaatggcttttatttgacctctggaatacaaaaaggtaactgtagtttccttgcaatgcagttggcaaattatttttaccttctttttccaagcagactctgaaacatgagttttgaggagcaggattaaatactctgacctaagagacccagatatttggatttttatgtggacatgtactcactgaaactgaaatttggaggaactggaattaataacattttccctcatgtaattcatggaatttattgctttggctctaattatgcatttatgttatattctgaataatgcaaaggagaatattgaaacattttaggccgtcagaacacttttcccgctctcaagctgtctccctattgtatttgtgctgaaatgcagcttcaaacacctttgtggtttgggttatattttgacagttgctaggtagcttgagtcagagagtgcagctgtgcaatttaagatgtgttttcctatcctttcctctaaagagagctaaaaaaataaaactataatcagatttctaaagtgttaaacgggataaaactatttagaacccatactatagaatgaagtagatgaattctgataaagcacatatatactaaagtataccagtgaatttatttcagatgaaactaggtaggctcattgtaaacagatgagcttctgaaatttctgaactgtttcattgaaaggtaaaacaatgggtttgggagcacccacacttcttggcacaggtgagtggttggcactcattaaccaccgaattctgacacgaacatgctgtttatgaagaaaaatcagggaaggagactaagatttctgataagaaagagtagaagaaaaggtagaaattcaacttacttggtaaaacgggagtacgtcaggattagaaatgggctcttacacaacgagaaataaagatagctttttcataggcttcctattctgagagtttttcttgttgatttgtagagtgtaaatgtacttcttcctgaagacaaggactaggccgaggtagtttgatgtaaatgtggggactcatttgttatgaacccatagtagactgctgtgggaaaacattgtgaacaaaagaaggagtcaaaaaataaacaaaacattttgtggcaagttatctaagacagatcctggagaagggctgattgagaaggtaaactagaacaaacggctttaaaaataatagacaaggtcaaaatatttctgggcaagaaggacaatcaaaccacttgcaggtgttgtgttgctgcctagagactggtttggcctgacccaagtgatggtgtctggagccaaaccttttatcaggagaaatataggaccacagagatgagacaagtactaccagtcctggggaagtaaagagacggaaaattcctttctttaactagagggaatggaccctgcagtcaacctgtgtacttgcagagctatatgtctttggtattctgatatacttcacaaagtatattttatgccctaggtgctaagtgaattgacaatgaagacttggtattgagggaattaaagggcaggtggggttctgttcccaaggctacagtccatagaatattggcaaggtggagacaaacatgacataccatcttccctgccttctttaatccctgggtggatggtagcaggcaagagagtaataaatgcaaggaacagtaggtttgcagtacccttggtattctgtcatatgtgtaattgaaagccacaacaaaatagcaatagaaaagaaaatattagtgaggcggctcatgcctgtaatctcagcactttgggaggctgaggtgggaggattgcttgaggccaggagtttgagaccagcctgggcaacgtagagagaccccatctctacaaaataacaaaaaattagcaaaagaaaaaaggcttttttgtgtgtgcgtgcatgtgtgtgtttgtgggaagtcttaatttttgccttgaattttaaaggaagatttaaatgattaaagtaatgattaaagtaattgtgagatgtgcagatgacatagaataatggaaattaaaaaataaatatttattgccttttctcccctgcttacaaaagcagtacagcttaatgcaagaaatttggagaaatgtaaaaggagaatggcatttaaaaataaccttaaaatgttttttttcttgaaatattcaatggtggtggtgggtagagagtgagaggaagaagctcctcatagactttgagaaaatcaagaggttttaaagagcaataaaaggaactgagcacatctcctttaggatctgtagaactggccttaaatcaatacagaaatgtctagcaagaggcaatctctctggggagattattaaagtgagagtagattatcatttgagtgactggttcaggttctctgaggtgctcttgaagtaccactgactgttgaagcatgtatctgaaatttccttttaacacaagttttcagtgattctcttagag

SEQ ID NO: 2989 - DNA, 3221 bp, Homo sapiens
agatcactcatgtgttcagtgattcaggttctgttgaagataccaaagatattcggttggtcaaaatgacgggcatataaaggcttctcaggtttctgagtgcaaaagatatgaaacatcggctaggtttcctgctgcaaaaatctgattcctgtgaacacaattcttcccacaacaagaaggacaaagtggttatttgccagaggtaagagaaaaggccttggtgaagatgtacttagtattaactatctgatgatggggatgttctgtgagaaggaacttgtgctcctagttaagccagatttggatcaagatagcctccattttcatggagatcataactacatttgaaatttctatacatttagtgaaaaactgccctcatcaataacatattttgtcataacgatggaaaataaaatctttgccttcattcaggatcttagatttcttgccccaatttttttaccatggcattccaattattctgtttctctctattttttctagagtgagccaagaggaagtcaagaaatgggctgaatcactggaaaacctgattagtcatgaatgtgggctggcagctttcaaagctttcttgaagtctgaatatagtgaggagaatattgacttctggatcagctgtgaagagtacaagaaaatcaaatcaccatctaaactaagtcccaaggccaaaaagatctataatgaattcatctcagtccaggcaaccaaagaggtgaacctggattcttgcaccagggaagagacaagccggaacatgctagagcctacaataacctgctttgatgaggcccagaagaagattttcaacctgatggagaaggattcctaccgccgcttcctcaagtctcgattctatcttgatttggtcaacccgtccagctgtggggcagaaaagcagaaaggagccaagagttcagcagactgtgcttccctggtccctcagtgtgcctaattctcacctgaaggcagagggatgaaatgccaagactctatgctctggaaaacctgaggccaaatattgatctgtattaagctccagtgctttatccacattgtagcctaatattcatgctgcctgccatgtgtgagtcacttctacgcataaactagatatagcttttggtgtttgagtgttcatcagggtgggaccccattccagtccaattttcctaagtttctttgagggttccatgggagcaaatatctaaataatggcctggtaggtctggattttcaaagattgttggcagtttcctcctcccaacagttttacctcgggatggttggttagtgcatgtcacatgacatccacatgcacatgtattctgttggccagcacgttctccagactctagatgtttagatgaggttgagctatgatatgtgcttgtgtgtatgtctatgtgtatatattatatatacattagacacacatatacattatttctgtatatagatgtctgtgtatacatatgtatgtgtgagtgtatgtatacacacacacacacacacacacacacacttttgcaagagtgatgggaaagaccctaggtgctcataactagagtatgtgtatgtacttacatgggtgttttgatctctgttctttcatactacatttgaacagggcaaaatgaactaactgccatgtaggctaagaaagaaatgctaacctgtggaaagttggttttgtaaaattccatggatcttgctggagaagcatccaaggaacttcatgcttgatttgaccactgacagcctccaccttgagcactattctaaggagcaaataccttagctcccttgagctggttttctctgatggcacttttgagctcctaagctgccagccttcccttcttttcctgggtgctcagggcatgcttattagcagctgggttggtatggagttggcagacaggatgttcaacttaatgaagaaatacagctaaggccttgccagcaacacctgccgtaagttactggctgagtgagggcatagaagttaaaggttactgtttttatcctctatccttttttcctttcctgatcaaggtgctcttctcattttttcctgagaaccttagccatcagatgaggctccttagtttattgtggttggttgttttttctttataatggctctgggctatatgcctatatttataaaccagcagcaggggaaagattatattttataagagggaacaaattttcacaatttgaaaagcccacataagttttctcttttaaggtagaatcttgttaatttcattccaaacatcggggctaacagagactggaggcatttctttttaggctctgagactaaatgagaggaaaagaaaagaaaaaaaaaatgattgtctaaccaattgtgagaattactgtttgaaacttttcaaggcacattgaaatacttgaaaacttctcatttatgttatttatgatgttattttgtacgtgttattattattatattgttttataaatggaggtacaggatatcacctgaattattaatgaatgcccaggaagtaattttcttctcattcttctaaaactactgcctttcaaagtgcacacacacgcgtccacatacactgcattcgttgctccagtataaattacatgcatgagcacctttctggcttttaagccaatataatgggctgcaaaatgaagacaccagagtgtatgcatacaaatctcactgtattaaagatgcaggttttctaattgtacccttcttgtctctctggcaatcttgcccttaatatccctggagttcctcatcagtgtcattttctgttatacacagttccacaattttgtctctagttgacttcaaatgtgtaactttattggtcttgccctattataattgtcatgactttcagattgtatctgaactcacagactgctgtcttactaataggtctggaaggtcacgctgaatgagaagtaaattattttatgtaatacatttttgagtgtgtttttcagttgtatttccctgttatttcatcactatttccaatggtgagcttgcctgctcatgctccctggacagaatactccttccttttgcatgcctgtttctatcatgtgcttgataggcctcaaagctaatgcttccagtgaaacacacgcatcttaataataagggtaaataaacgctccatatgaaacta

SEQ ID NO: 2990 - DNA, 1264 bp, Homo sapiens
tgttgttacatagattgcctgtgatttaaggaaacacgatagccactatttactatttaccctgtgtcaagaatgtgatcctcccagcaacgcaatgagtcatattgcatgaccctcatcttatgaatgaagaaacagaagctcccagaggtgccactcgcccgtggtcacagagctggtgggagaatcactgagtgagtctgaggacagagaatgacacactgtggtttccaagagagaacatcaatgtttttgaccaactcgtaatttcaaagactggaaaaaccatgcttatatgcgcagcctcttttctgaggaacagactagaggatgtttgtttatgccagcagaaagcaaagccacttctagatcagatcacctgctgctgacagtcagatcaaatcaacagcactgaatgagctcctcccagggacagtgcagctgcctggaatttgaatgtggtatctggagcttcagtagtcatccaggactgtaagtgtgaaagccatgcactgagagtggtggaacagaagccctgttttctttagacgctgactcctgctgtctgccagatcctcgtggtacaatgactggtgtagactggcttgttgaagtcactctctggatctgagcaacgctggctgagccgtgatgaagtattcctatccatccactatgcttcacagtgggaatctctcactgttcatcaccgctgccctagcagccgcagggattcttcacccatggttgcttaggtttataagcaaggaagctgaatgaagtccctttcctctctggatgagcccctgggtttctggaagagtcttaaaatcacccctaaatggcttccaagcactgaagcccgagatgttagctggcctgtgtgaggccttgagacagaatgccacagccacaccccaaggatgctgaaggggatttccctcctctgtggtttttctcctttcttcccgcagcactcctcctacgtgctaacatcttctagtcaaacaactctccttttcaaagggaccaggcacagtttctgcttatccctgagtagcagtgttcagtttcctgccagcctgtggagtttttcaaacaagccaatcacctcctcctgtgggaactgagaagcaccccaccctctcgatactacaaagcccctgcttgttccctagtgcaactcccatgtggtcctgtggagcatatggtatcttcctcttctgggcagtgagcatatgtgactaataaactatctatctca

SEQ ID NO: 2991 - DNA, 9067 bp, Homo sapiens
cagggtgtcactgagaggatgcactctgtgtgtctccaggtggtcatccccatgggctccacagatgaggacaccggccctcagctctgccccctctcagaagccttcctcacctgggggttctgggtgaagggagctccccgccagagactcatgtgggatcgtgtgtggaccgtagagccacagagcgtcatcttttagatccaggctttaacttcagtttcctgtgtgacctttgagaagccatccctccaagtgcttcctttgaagggtgagccctgggtgcctctctctgagggaggcccttgctccatctgggcttgactgtgccacgggggatcagaagcaacatacattctgtcagcagctgccggaaatgctggagcagcagtcctggaggcggggtgaagcagtccctggcttttggaggaggcgtgagaagaaattcatggggggctttaattcttttcagattcccaaccattttcttctagctgctactgcctgcatttgtgtaacttagtttgcaacacaggtgacaagctttctctcgttggatgctcattgcagcactgtggggcgatgcagccaggcaggtgctattgcctccatttcactgattgagagactgagactcagagcagctgggagctctcctgagataacacagctagttagaagtcaagccaggtccccagggtagagctttcagtagtgtgtgaggacagcataaaatgaagtctgtagactgtttttttctctgagaagttcaagtcttctgccttgctgcttcttccctccaagacaataagttggttcggtgccctctccggtgacaaacttaggaaacatctcttcagtatgaggtagcagcctcctttagctattgtcacagccaattcacagaggtctaaggcccccagcttaattgatggttaaggaccaattccaccctattcctccacctccatcaaaaaaagcaggcaaacaccacttcatgcctactagaatggctattaaaaacaaacaaacaaaaacagaaaataacaagtgttagttagaatgtagagaagatggagaccgcatgcattgctggtgggaatgtcaaatggtggaatcactgtggaaaacagtttggcagtttctcaaaaagttgcacacttaccatacgatcctgaaattccactcccaggtgtatagccaaaagaatggaaatcagggatttaagcagatttctatacactcacgttcatagcagtattagtcacaataaacgcaaagtagaaacaacccaagcatccataaaaagatgaatgaggcccggcgtggccgctcatgcctgtaatcccaagcacttcaggaggccgaggcgggcagatcacttgacaccaggagttcaagaccagcctggccaacatggtgaaaccccgtctctactaaaaatataaaaattagccgggcgtggcggtgcatgcctgtaattccagctactcaggaggctgaggcacgagaatcacttaagcccgggaggcggaggttgcagtgagctgagatcataccattgcactccagcctgggtgacagagggaaaatctgtctcaggaaaaaaaaaaaaaaaaaagaaaagaagagatgaatggataaacaaaatgtgagctatacacacagtggaataatattcagccataaaaataaatgaaattttgacatatgctacaacatggatggacctcacatacattgtgctaaatgagatatgccagatataaaaggagcaatattatatgattccacttccatgaggtacctatactgggtaaattcatagagacagaaaatggaatagagattactaagggattaatgaggggatggggaaggggagctactgtttaacgggtagggaatttatgctggggatgatgaaaaagtgttggaggtagacggtgggatgaggacacagcattgtgaacgtacttaatgccactgaagtgtatactcacaaatgattaaaatggtaaatggtacattatatatatatattaacacaattaaaacagactgttaaaagaaagcaaacaggccaggcgcagtgactcatgcctgtaatctcagcactttgggaggccaaggtcacttgaggacaggagttcaagaccagcctggccaacatggtgaaaccctatctctactgaaaataccaaaattaactgggacgtggcagcacatgcctgtaatcccagctacttgggaggctgaggcacgagaatcgcttgaacctgggaggcggaggttgcagtgagccgagattgcactactgcagtccagcctgggtgacaagagtgagactctgtctcaagaaaaaaaaaaaaaaaaaaaaaaggaagcaaacaaacccaaatagaaaacaacaaccgaacaaacaaaagcaaaaaaggaggcaaaggaagaagagagggcccaagggtaaaggacaggggctggtgtggaagacacaacagtacatcatgaaaaggaacaaggtgtctctgggagaggtccaggtggtgctctgcccaaggggtcgcataccttagtgctgggaagagaggcattctctggggcctgagactcctgcagggaaactgtcccagtatcagccagagaagagatggctttcttttactgcatggcagcagccctggagccccggggcaggatcatatccctagggtgggagaagtgcccatttccaatttatttatgtgttttatccccagagtgggataaatgactatgaaactgacctaatatttatgtctattttaaggccgggggttgatatgagtgctttcttgatgaactgcgcccttagagctatttactttagtggaaggtttcttttgaggaggagattgggaaaagtcatcaaattccgtggttgctgcttcctctaattatattctcacttttgaataatttttaagcctttcggaagtagaagaaataggggcttttaaaatgatgggagcattcccaacaaaggtaaaatgctccctaccttggggcccagctctttactgtgagtttgtgacatctacttttatcattctaaaagtttcatgttgtccatactgcctgttaggaaacatggaaaagctggctttcaaacttggacttggagccaggcatggtagcatgtgattgtaatcttagctacttgcttgagctgaagactttgaggctgcagtgagctatgattgattgtgccactatgctccagcttggatgacagagcgagacctcagtctcaaaaaaaaaaaaaaaaaaaaaaagggactaaggctggcagagacaagaagactaaactttgtattaatttgttgtatggtcattccttgttttttcagaatggactcctctcttttttccctttaagcaacaagatagtggagttacaacccagcccctgccggtagatttctctgttcggtcccgaaggttaaagtccttagatgaaaaaggctggaatgcaaggtgtgaacactgagataaagcagagcatgggcacatgttttgtttgttgccatgaggctctgttttattttatttttaagacagggtcttgctctgtcacccaggctggaatgcagtcgtatgatcgtggctcactgcagcctcatcctcctgggctcaagcaatcctcccacctcagcctccccagtagctggggatagccaccacacccggctaattttttgtagagatgggggtctcagtatgttgcccaggctggcctcgaactcttgggctcaagggatcctcatgcctcagcctcccaaactgtaggagtacaggtgtgaaccactgggctaaagtgtcatcaggctttagaaccagaagctcaagaactggcctcaaaagtaaagggacttcagaaatgaaattacattctgaaaccagtgcagaggagccaagtattcagcactgatttgctctcaggtagcactgagcatatatttgctggtgacagaggcagatgactggaatttattttttaccaaacggttttgtttcctgagtcctgagagatgacctggtcgaaacttcccctttaatcttattaaggaaaatcgatgggcacaagctgggattaactacaagggaatttgagcagcaagagaagctcattcttccaaggtgcttggtaaatttggggaattctctgaaaattctgagtaaatatctgggtggagggcaaggaagtgactatattattactagtaatgcaaggagatagtcatagctttgacaaatacttttaagtttgaagagtttttattttctcattttgtctctatgccacccaggtattgctattgccctaatttctcagagaagtaaactgaggctgagagcagtccgggggtttgttggaggccacagaaccggttagaagaggcgtggattaggatgcagggagtgaaacttccgtgcatggcagagcctcatgacagaaggagcctggctccttgaaagaccgggtggagagagctgctcacaggttggagcactgcccaagatgttacatgagcaagaaataaacttccgtggtgtttagtcactgcatttgggtctatttgttactgcaccttagcctatgctaacaattatagagtctgcctttgctaactcacacctaaaaggtcagatgtctattttgttgccaacactaaagactgtgcttgctcagctttgaggctgaacaaccatatttgagatggtgatgtctcaagtgatgtgtgtgtatgtggagcagggggagtgtgaggtgctggcttgatccgcattcccgtggcttgcagtaagattcccagatggcagctgccctctgcacttttacccttcctttccactcaccacccatcacttcccccactgttcccttcatccccctgtgtcccatcgatgaggaagcctccccatgaaaagctggaggagctctgccttggggtttctgctaagtcaccaggttgagaacttgccgcaactccttggacagtacgaatgcccattgcttctcttttggtggtctggggcttaacactccaggctatcactgcatcatctggtccaattgactgcatctaaatagtagaattctttctgtgctcctgaaaacaagagggctgcttggcgtgtgtgtgtgtgtgtgtatgcgtgcacacacgtgtgcatgctgtaggcctgatattagatacagacaagtaaaatgttatgcttttttttttttttttttttttttttagatagagtttcactcttgtctcccaggctggagtgcaatggcgtaatcttggctcactgcaacctctgcctgctgggttcaaatgattctcctgcctcagcctcccaagtagctggaattacaggtacgtgctacaacatctgactaatttttgtatttttagtagagatggggtttcaccatgtcagccaggctggtctcgaactcctgacctcaggtgatctgccagcctcagcctcccaaagtgttggaattacaggcgtgagccactgaatccggccaatgttatgcatttaagtgtggggagcagaagactggatatgcaagagcatacatctggataccttttacctcttggcttgtggggaaaatgacctgcaggattttacatggagcttcctgtgtgcatgctggtgactgttggcaacaaggtgtcaggaagaaagacattgctttccaaactccttttcccaaatgatcctttcttacccagtctgccttacctgcttctgtactgttcaacagaggagggggaacagggaaaagcaggggcagttgtgaaaaatagaagggaaacttgagtgtgcctttttcttctccttctctttctccaccctcagtcatcattaacagaaaaatatttttaaaagatcccttgatggcatccccaaatgttaagtctgacattttcttagctgatggcctcctttgtgaaggtactttgtgtccgcccagcatgcctgctggatccctggtttgccgcagttgctgaggtaaatactctttccattaagcaccacagcccaagagtggcctaaagctcaaataaatgaccaagaagcaacttaaacattccctggggcgattttaacctatgcaatggctttttgaaaaaattgcctattttttcatgttttggccgggggggtgtctcttattcccttcttttttattttcctttcagctgagtacaccttctctttcatttattcatgcactgcatgaaggatggaagcaggatgaataaatcacagagcattgcccctctccccactcagggtctgtgaagagagctggagcagaatacagtccaggcattatgtcaactttcaggggacctggggcaggtggccgattctcacagagaccccacttccctttcctgtgaaaaataccacagcccaacagccactggagaacagtgttcttctggaagcttcctctgggcaggaggagtcaaagatcctggtcctcagggacacttgagatgggtgtgcccaaagctgtgcaggatggtttggtttgttttgtttttctttgcctcaggaagaatgtgttcacaaacctcaggacaaatcgtttaaaaaagtgtcctgacagttgtcatgcttcatcacttgatttagaggcaataggacagccttattttcttctaatctctggtggttgaggagtctggttggcctggcagaaggctgagattggctgagggagtcatgagcgagcaggggcctctggtgcctgaagcgcccctcaggaagagcgggtctcaccggaaggccacactcatctccttcctggttacccagtgtggggatttgctactttgctgagtgtgttttgtctacattcatggtgctccagaactgtgtctgtgtttctcacattctctttcgtgtctgccagagcaacattctcagcaaaccatctgaatgcaactcctgtgatcacaaaagtcaatcactgatggaaatgaagaccacgaccctgattcctcaggcacaggttttcatctgtcactatgtgctaaaagcaaaccagcaagtgagggtgtcactgtcaactgctccttgtcgtgagattcccacctttccctcaagacatctcagatatcatatgtaaccttgaccctgtgtcccacagcaacagcggtcattgagtgtaaagccttttccttgaggattgtggtagacagaatgccccccaaaggtgactatgcttgaatccatggaaactgaacatgtcaccttctatggcaaaagggactttgcagacgtgattaaggttaaagaccttaaattagagggagtaccctggactatccaggtgtctaatctaatcccatgagacttcaaatgcagagagctttctctggctggagtcaaagagatgtgacaaaagaggtcgtcggagagattggaagtgtgagaaagacccgacctactgtttctggggagcccacctggaaagcacgagaagggacacaggcaacctttgggaacaaagactgccagccacaaggaaaagacagcagtcctctagccacaagaaaccgaattcagccagcaacctggacaagctagaagagcattcttccccagaacctttaggaggaagtgaggccttgcagataccctgattttggcttttgagacactaaacagaggatccaactgagttcaactggcccagaaactgagatatgtttggactgttttaagttgctacgtttgtggtaatttattttggtggcaactgaaaatgaatgtaattgtatattagaaaaattgaaggtagaagctctaatactttctccccacaccccagtggttcatcatgtgcagcactcagggtgtggaaattccattttgaagacaccgtcttccaggattctaacccccacctgggaaaggtcctggagagaacttctagcatgtatttctgagccattcacatttaacccagagagagaaggtgtcctgcccaaacgcaaagcagcatggcggtagttctggacataaccttaacaattgccaggaactctctggatgtccatccatcagccctatctagtctttttgtctgcatggcattgtgggggatgtggcgatgagggccaggatcgcagaagtcagagtacccgtggctggagcttccattttaaatgaagtgttcttgcttatggcttgatggtatcctttcagattttgcatctggctgtactccagatgtttatatagaaacttcacagtagacatgatggtggcgtaggtttgcaggaaggatcctttcctacttacagagtgacccaatgtggccgatcccttcaatatttacaacagctgggtgagtggaggcatgatcaactccatttacccgtcaaataaatgaaatttcagagcggttacacaatctgcttgaggtaacaaggccagcaagccacagagccaacatacccctggtgcctggctccacaggagtctgggaagagggagaggaagatggggacaggatgtatcaccaggatgctaggggaagagagaatattgacgtgtggggcagcctgcatccccaaatcaggagcactgggtgctgctgtgttacagtgagtgtaggagcatgccgttctgggcttcactctgcccaaatatgtcttgctcattttcaccgccatatggctgctcgtcccggtctgtttgaggttccttcctgttccctctctgcctctaagtccttcaaaaagccaactggaagtgcctcttccaggctttccttagcctttctttattcccttgaacttctattatgttaattgttcaaaagattagttctgacacttaccctatgctgctttgtattactattggaaaacaacagtagctctctcaacccattgggtggatggtacatgccatgctttatacattcccgtggccctgctgtacctggcacacacaaaaggggattaataaatatgcatatgttgaatgaaagaatgga

SEQ ID NO: 2992 - DNA, 9098 bp, Homo sapiens
aggatgggccctgcctgaggacgattttgaacactctcgctgatatttccaacatagctttggcaacatgatgagtaaagaaaagcgagattccatcagcaaggaagacctcgcccgggccacattggtcaccatcaccaacaacattggctccattgctcggatgtgcgcgttgaatgagaacatagacagagttgtgtttgttggaaattttctcagaatcaatatggtctccatgaagctgctggcatatgccatggatttttggtccaaaggacaactgaaagctctgtttttggaacatgagggttattttggagccgttggggcactgttggaactgttcaaaatgactgatgacaagtagagacgagcagtggaggaaacagcctcccaaaaggacagagaactaaaaaattgctgctggagaaggtgaaagtcgctttgggacggaagccaagccattatggcagatgaacctgctggatttgtaaataatttaaaatccttccagatgatcttttactcttaggttttgagctaatgattcaaaacgggggaatataaaaggttttttttctgtatactgtatttttttaaaaaaatggtgcagcgtggccaaacctaccaattgtatgcattaactttgaaaagttgtttgatgtttaagaaggacctgatatgtaagcgctggtcatttttcttctggggtttactgatcagtgtggtgattttaacttcatttagtaattactctaggagattttaccttgacttatatttttcatgacgtttcatgatttgctgttggtttcaaatgaaactacaaatctggcatgttttactgtgaacacttttgttatttgttttgtacccttttttgtcttgtttttctgttttagttgtcttctgaaaaaagagtcgttccctctgtttctgtcctcagatgatgtccctccccctacctgtaacctttctttgacataattgttcatatcaatgaaggtgctgaccagctcaatacaaagttaagcacaagatctaaagctcttgaaaatgcccgtgaagagaagactgaatgtgttaatgaatttaatgagtctggcaaaagttgcaaattatatgcaagtttgtcctatcgcttataaatgtagtgtttcattggatttattttatgctaggttatattaagttgaaatagtctgtgattaaatgtcctcatccatgcacagaatatgaatggcagcaaatctttgtgcaagaaatttgaaacttattgggaaaagcctcccagtagattaattgttcatatcaggagatttagggtaagtcatgggttgaggtgtcagatagtaatatctatttgttttgtacatgtatatatctaggaactttgtaacaacacatctttaataatgttaaaggttttttcatttttaatattttaaactaaaaactgtacttcaatctcagtttctaaaattaaaaataatttatactgatctatatattttttctttttgaaagatttcattaagactgatgggtaactttcaaatgagggtcatgtacaaatattgggatgcatgagatcccatgatcttgtgtattgagcttattgttgaaagggatttttgaaggacagaacaattactccatgatgaatcttcctttctctgccttctgagcaccgtctttaatttccatatcttcaagtcttgaagaagttgatgttaattgaagaattcacttgtctggttgaaataaagcctgtttctgttgtgatgtttttagtgtatatgttattttcatttcttaattctcatgtttatagtatctgctttgtaccatgaaatgactgtctgttgtgtttttgctactctacatttcaaaattggaggctttcccatgagtgtggtatggtccaaaacactgtcttcaggtgaagctgtagccctatgcatagatttttaaaatagagctttattgtttctatacaagtgactccttaatgccaactacctctgctatatttggtaattccaaaggagtttcaaaatttggtcatcacagatacattttaccaacttctatctggctttaaaaaaattcagacagctaaagtgttcttgaaaaggataagttaaaaatctacatattatttataattagtgccttttgatggcctcttctattcctattctcatctatcaggtaacagcagaccttgattccgcagatcatggttctacaaaggaaatcagggcaagttagtgtgactgtattttttttaattatctgaaatcacttgatctctcattacaaacatttaaaatattggtgtagctgagaaaatacattattccattatacaaatatcagttaaatgttgactacatatagccagcctgttttttacaaaagagatcttgtagcctgaggattttcacattcacttgaattacagaaacttttcttagaatcaacatcacaaagaaactgggaagactaaagaattttgaccttgtgcaatatgaagtaagagcatggctttttatcgtgaggcagcttcagtctgggtccagcttagtcagttaccagttcaaagatatgctaagcctctttctaaaccatagtttcctcacctataaaatgggacaaataattgttttacatacatatttaaagagctcagcacaggggttgacacaaagtaaatgcttcattaatgatagctacaatgaaaaaataaattatttaaactaatttattaaatcagtaattcttaactttctggattgtgggaaacccatgttagtatggagatgtttcaccaatctccgtatgctaatacatatccacagctccttgtccacacttccaaaatcccatacttaagaaatctatcttgacagctcacttggcagcaaaagctgacttgagcattatttctcacatgtagtagggctcttcacatgttttgttgcaaagctcgtcatgagttagataacaggatactgactctgacaggggtgttaagtaataaacgattttgaattggctgggtgtggtggctcacgcctgtaatcccagcactttgggaggccgaggcaggcggatcatgaggtcaggagatcgagaccatcctggctaatacggtgaaaccccgtctctactgaaaatacaaaaagctaggcatggtggtgggcacctgtagtcccagctacttgggaggctgaggcgggagaatggcgtgaacctgggaggcagagcttgcggtgagccgagatcacaccaatgcactccagcctgggagacagagtgagactgtctcaaaaaaataaaataaataaataaataaatgattctgaattttgaaacacatctgatcccgagttttagacaaagggattgtggaaatatagttgtgttcttcaccttatgcagtatacatggattcagagtctctttgttgggaacaattgttataggtaatgtatacttgatgtcgttcagtcatagaaggaatattaagaagttactctgtgccaggaaggaactggagactaagatgcataggatacagcccctgcagagaaagacagcaaaatctcaagccaacatcagtcatcaagtgccacaagtgccattcaatcatttattcattcacattcacagcagtaaacagaacaaagatccaccatcacagagcttatattctagaagggaagacaggtacattactaaatatataatgttagatcagtactacaaagaaaaagtaagctggtgtaaaggctaaataaggggtagttctattcagaaaaatgagaaggggaggaatatctcagggtggtctaagacagcctttcctaggaagtgacctttgagcagagagttgaatggaggtgagaacacattgtgtaaatgtctgagaaaatatttttcactcctggcaaatgaaaatagggatttgaggaactgcaaagaggccagtgtctggagttaaaaatagaaagtggtgggagatgcagtgttgggagtaaacttgagccaggtcctataagaaatctgtgagggtagtggcctctacccagaagagaggttggtcatttgtcttccagaaggtgctagagaaggttttgtgaagtcttaaccaaagaataggaatcactaagtggagaggaagggagggctttccaagcagagggagctgggtgagcagaagcgctgagggaagaaaccacttggcttattcagggactggaagctctttgctatagctggagcctggttcatgagacagaaaccaggtagtgagaaagaggaagctggcccaactgtggaaggacttgtcttccatgctaacattgcggacttttccgtagtcactgtggagccatcaaagagtttcaaggaaagtgaaactagaaataatcaggtttcaaagtggtaaagcaaaatgctctgttgaagtaaatgagtaaacaagttacgtacttttgaatacctaacattattccatttttttccctattgtgccagacctcatgcagtagctacagagtgaaccatgctttcgctgtaagtaggatggctataaaaattattgagaactttctcagaggacacaggctactaatagctacagccccactatgagtctattcattgagcaagaaggtttcaatactgggagcatcgtaaactatcactcacaagaattgttagaaagcagttttcctcccagtgatcagaagatgacgccacatttgtgaaaaagatttcattagtgtacatcgtttattaggtctaccagctgcccattcttttgctcatctgtttaatttttaataaatatcaatgatctgagaggcattgggtagcactgaggatgcaatccgatgtgaacaagacttcaggagctctgctttcattaggcttacatttggttaatggagataaacttgaagcatataaaccaataaataaacaagaaaatatcagggagtgacaattgctattaaggaaagaaacagggtgataggatagagagggaggagagagacttcttcagtcagatgatcataaaatgcaagtatgattaagtcatggcctcaacttttaaggaatgatgggctcaccttgctttcattcttgccacctcctcaatgaaaatgaaagatgtttttgggaaactgatagctaattttctttttcttagaatatttgatttagataatatgtatttaaaataaagttatcacgtaaaataatatattgatttagtaatgcaccttttttcccctgctcatttaatgaaaaaatattatttgaactgtttacttgaatctttattgttaatgattttgtcatgaccagagtcatttaatagtttccacagcacaagtttgaaatttaatactttttaaatttgtgatgtgttgaccactgggtttttaaaaaacccagccacaaacacctattcccatgatgagctcaattatttcacattccaaaaggtgtctcttcagtgtaaccatgtatgtcaagccttgcaaagtcaacttcaaaaggctagtttacaagtattcgtcacttgcaatacaaaaataaaaaggaattttgtataaaagtctttgcctgtttttttaaattatcaagtaaataaacattccaaactagaattaattgaggtgatttcagttaatgttttcactaaacagttttcaatcagtccataagaagagttcatctttttaaatttaagtattttttaaaaaaattcaacattttacatgcatatagttttaaaagtcaaatacttgcacaagactatggaaaacagcagcacacaagttttcttttttcttattttattttatcattgtgaacacggtggtttcccaagggtaaggtgatggagataaaaatttttgagtatttgcatatctaaaaatttttagaaaaatttttattctattgtcatgcctagttgatagtttggcagactacagaactttatgttagatgccatttttcttcagaattttgaaggcatggttctattattttggcaataatagagaaataggaaccttcatacattagtgttgggatttcaaaataatacactcactttgagaaacagtctgtcagttgttcaaaaagttaaatatagaattaccatatgatctagcaattccattctcagatatgtatatacgcaaaggaaatggagatatacatgcacatatgacttgttcgagcatattcttagtaatgttactcataataactaaaaaattaaaatttccctaacgtctatcaacagatgaatgtataaataaaatgtgtacttctatacaatgaaataatatttggccataaaaaggaattacaacacaaatgaaccttgaaagtattatgctaagtgaaagaaactagtcacaaaagactacgtattgtatgattccatttatatggggtctccaaaatagccaagtctacagagacagcaagtagattagtggtctcctagggctgagaatttggtagaaatgaggagtactgctaatatgtatgaggtttcttttgtggtgatgaaaatatactaaaattgattgtaatgatggttgcataattcaactaaaagtcattgaattgtacactttgaatggattaattgaatggtatgtgaattataggcatatgttgttttattgtgctttgctgatactgtgttttctacaaattgaaggttgtgacaactctgccttgagcaaatctattgatactgttttcccagattgtgcccatttcatgtctgtttgtcgcattttgataattcttacaatatttcagactttttctttattattataattgttatggtgatttgtgatcggtgatctgtgatcagtgattgttttctggtgccacaaatgtaagacactgaacttaatcggtatgtgttgcgttttgactgttccactgacctgcagttctcctatctctctccctctcctcaggcctccctattccctgagacacaaaaatgatgaaattagcccacttacaaaccctacaatggcctctaagtgtccaagtgaaaggaaaaaatcacacatctctcatttattagaaactagaaatgattaagcttagtgaggaaggcatgttgaaagctgaaataggctaaaatctaggcctcttgtgccagttagctaagttgtgaatacaaggaaaagttcctgaaggaaattaaaagtacactctagtgaacacacaaatcataagaaagcaaaacagccttgtggctgatattaagttttatgtctggataaaagatcaaaccaggcacaacattcccttaagccaaagcctaatccaaagccaagctctaattctcttcagttctttgaagtctgagagaggtgagaaagtggcagtagaaaagttggaagttagcagaggttggttcatgaagtttaagagcagaagttgtctccataacataaaagtacaaggtgaagcagtaagttatccagaaaatgtagcaaagatcattgatgaaggtggtaacactaaacaacagattctcaatgtacacaaaacagctttctattagaagaaaagacgacctcggactttcctaactagacatgagaagtcaatgtgtagtttcaaaatttcaaaagacaggccgactctctttttagaggcttatgcagctggtgacttgaaggtgaagccaatgcttattaaccattctgaaaatgctagggcccttaagacttatctcctctgcctgtgctctataaacggaacaacaaagcttggataacagcacatctatttatagcatggtttcctgaatattttaagctcattgttgagacctgcttctcagaaaaaagattcctttcaaaagatttctttcattgacaatgcacctagtcactcaggaactctgatgtaaatgtacaaagagattaatgttttcctacttgctaatccaatatccattctacagcccacagatcagggagtaatttcaatgttcaagttttattatttaagaaatacattttgtaaggctatggctgccatagatactgattcctcttatgggtctaggcaaaataagttgaaaactgtctggaaatgttttactattctggatgccgttaagaatatatgtgatccatggatggaggtcaaaatgccaacactaactggagtttggaagaagtggattccaaccctcacggatgaatttgaggggttcaagacttcagtggagaaagtcactgaagatgaggtagaaatagcaagagaactagaattagaagtggaacctgaagagatgactgaatttctgcagtctcatgatagaacttgaaaggatgaggagttgcttctcacggacaagcaaagaaagtggtttctcgagatggaatctacccctggtgaagacactgtaaacattgttgaaatgacaacaaaggatttagaatattgcataaattcaggtgataaagcatcggcagggttggaaaggattgacctcaattttgaaagtcctgttgtgggtaaaatgccatcacatgacatcacatgctgcagataaatcttttgtgaaagaaagagtcaacaaatgtggcaaacttcatttttgtcctattttaagaaattgccacaaccttcagcaaccaccaccttgatgtcagcagccaaatacattgagatgagaccctctaccagcaaataattagtactggctaaaggctcagatgattattagcattttttggcagtaaagtatttttgaaattaaggtatctatattttttaacacaatgctattgcaaacttaacagactatagtatattctaaacataacatgtacatctgctgggaaacaaattcatgtgacttgattgcctgggtctgaaaacaaagttgcaatttctccaacatatgcctatatattaatgaaatatataaaaagcaatgtaaattagaagactgaaaagaaccattggaatatagcacaaaactgaaattatatatgttaattggatgtttttttttt

SEQ ID NO: 2993 - DNA, 3207 bp, Homo sapiens
ctccacccctgggcccctgccctgggacctaggtgagaacaggccctcctgcctttgcacccaaatgttgtgtttcccaagaccaccctagcctgccctgcccccatcctgtgcctataaaaacccctgacaccctagcaagcagacacacaggcagatggacatggagaggaatgcaccgacaggcaccagcatgccagcaggccaccgaccaggagaactatcctatacggagtttagctggggcactgagtggccggactccagtggaaaaccttcccactccatccccttctggcttcctccatctgctgagagctacctccgctcaataaaaccttgcactcactctccaagcccaggtgtgatccgattcttccagtgcaccaagagtacataaatggaagtctcaccccctcaagtggattctctgtactgtagctggctcaagaaaggagaaggggctttgtcaagtaaaactggctgattggttccacatctataaaacagaaaatgcaaatattaaatatctatttggccttcctcatcatggatacaatgacggtaaaaggtaacttcacaggattaaatagcttgaaaacaaagtgtcgagaaaatgaagacacttttaatatcatcattgtgatcttcaatcaagaaacatttctcttttttcaatttgcaactggaatcttattctcacatgaaacttgcactattagtgcaaagttgtgcttcattgttaaaatgaacaaaagcaattacattgtgctgtaaggaaatatgcttggtccttgatcagaagtaattctgtcagtataacacgtgctgaaaggcagcaaaggttggcctctcaaggtcactactccagacacttacccagtactattgaggtaactctgtcccaagctgcaatcctttgacagagaggatggattgaaccaaaatgccggcaggcactggccattgctgtgtcgctcataaccatagtcgctgttaggaaagagccgagaaaaacctttcactaggtggcaaaattactgaaaacaattctacatcagtccacagccaagttccacactaatcaattagtcataacaaacaaaaataaaaacaaaaaaaaaaaacacaagcattccctgaatcaatgacttctcaaaaatagaacttttttcatagaatatctatcaattaattattcaggaaaatatcctacacaactggtcattccatttaaacactctcaagctgagagagtagattgtgctctcattagaacgatacacaatacaggtggctgggcccagagaaagctgtaatgagaaaacgggtgtggtggaactcaacccttggtgagaaattcatcgcagagtttaacacggccacatgtggcacagtcctcattactggtgatgtctttgggatgctcttccaagacatctggatctaccaagagaactgagccaggtctctctgtgtacactccatatgcttcaaagttacagccaaaaaggaaatgtccttcaggagtgtctcgagcattcccctaaggaaatgtttcacactaggcagttagcgctgccacttgggactaactgttttaaatcctctctctacttcggaaatagccaaagacttccctctcagcctcctctcattcatgcttccaggagcctctgagttgcctgatattcttggcaactggcagatgaacctgggcacagagaatgacaacaaattgcacctccacatgcacagacaaattgcaggcagcaatcggcaagcattagtatgaactggcccatctgtgtaatggaggtgagatgctggcacacaagggtcagtaagggagaaataggctcagctcaggggcctgtcaccaggcagctggtacttagaattttgcacataccagcaggatttggtgctggttcaatgcagcatgggtaggaagacttcagaattgctgcctataggacaaccagtgtttgcttcaggaagttactttacgaatgctggagagggacaggcaaggtcatttgggggactgtccaggagagggccaaaccaaggagaaacactcagtgacaatcacctttcattacactacagccaggtgtaatcaccgaaactccagctaccggtagaaccccaacaaggttgtgatgagccttcccaaatattttcagaaatcatgcagtgacagaaatcccactggaccagaaaaccttacaatgaactccttcatgattcatttcccacttctcagaatgcatttcagctggtgggatgagtagccgattccaatcacaaatgaatgcagggattgggccaagactaaggggcacgagagacacgggagaggagaaatctaattgccttccttatctggtattcctttcattctggactagcttacaattgaaaaagaaaaacaacaacaacaacaacaacaacaaaagactggcttactttgaagcctgtagaaaagattcccagagaagcaaatgtttcaaggagaaatcaggacattgggacatctcatctcatctcatttttttttttctctttggttttctaccagagaataaatttgcctcctgctaaagaatggctgtttcttaaggcaaaagctaaaccactaatgtaagatgctaacttcctttgcaaatcttccttgaatacagtaaacgaagaagcagcagtggcttcagaaagagggatgcaatgaatgacttaaaatctcatggtagttttccctgtgaatgcatttcaggatgttagtcccaaagggtagtacagagataaaatatttttgtcattgtaataatattgcactgactaaaacagaagtcacactggggaggcccctgaagatttcgatgatttgagctccctgaagatttgagctccaatgtaactgaagctctgttgccctctggctgagcccaaagagatacttcattcgctcttggcttggcgtcctcaccaacaaggggatacagctgtgggttactggtctgacggctggctgccactcttgtcagaccttcttagtactatttattcagagaatatctccagatgtctaccataagagaaggcttaacttttctaagatatgtgatgtgtatgtacacagtatctcagttcagtcactgatattttaatgattcaatatgtaacctgaggttgctatacagctag

SEQ ID NO: 2994 - DNA, 17794 bp, Homo sapiens
gtgcttttgctctaatggagggcacctcttcccagggtggggcatgtccgggttacctgcagtccctgggagccatttaacattttgcagagaagtgacagggccagtgggagggtcgctggaggtttgcagtgagcaagacctgagcatcgcctagggtaccagataaatagcagcagactccatcccgaggggtccagcgtgagtccttcttaatggcgtgatttttttcccaacacagaaggggatgattgaaatcagagactgccgtgcacgaggaaatggcatgttagtggggctcgtgtgagccagaaatatcaacatgtgtggggcgcagagagggacagggctggcgagatgggctgggaagaccgtgctggccccaggcctcctgccaggcactccctctgtggcttggtttctccgtgtctccgtgttcatgctctgtctctctctttccgtaaagcctgccaagcctgactcagtgacagtaatggatgagaacaaaaataattgggcatggggaggggaccaccgataatagctcttatgatgtcgatatgatgcccagtctagaaagaacagctcctgtcctccaaaagatagctttgaaggcacagatgagaggaaggaagaaagaaaaggagggaaagagagagaggaaatccacagcaacaaggcaacctcatgtctgagtctaggaagacccagacccaatgtccttctgctgcacggccgtaagtttccaggctgtcaggcagacattaccaaaaaaaaaaaaaaaaagtcagccaggcagtgggggaagcctgtgaagccacagtaaagtgcagatgtgaaaatcgggggaacccagctttcagagcaacttgccaactgccaggaagagggtagcaggaagaagcctccaggccgaagctcaagtccaccgggcaaaccgtccaaccgggaacggggctgggccaggccctcgtccccctccctccacgtctcccggctgggcacagagtaggaccacagacttcccctgcatgttggcaaaatttgcatctggttctctccttaatcaaagactaataaagagaaaaaggaatagattcatgggggaaaagaggacaaaccgaaaaatagaacagcatccagaaaacaggagatccaagaaaatctcagaaagtatgtgccatcctctatggagtacaagaagacatagcttgtgggattcatcgaaacagtactggttaagatgaaaactcaatagaatgacatgaaaaggaagatggaggagatagttacaccaagaaactaacagcacagtcagattgaagtatacactaaagaaggaaaaggcagagttgattcataaagaaagaatcaaatccgtgctgggccattggcccgtgtgccctcagaccctttcctgctgttcctgggtcctgctctgcatcctgggtgacagggggaaagggaaagccccctcaagctgcactcagagcccccatcagctggcttctagtcggactcagccaatgggagacaccatgggaaacgagtgtggaggaagaaagaaaccagggtatttctctcttttgtctctgtcttgtgtagcttcaccagcagcacctgcatcgtctctgtgacaccaacacccaccagacagtccctcccttcatggccccagtccccagtgggtagcccctgactcaacttgcttccagcggatggccctggtctctggactctgattagactacctcatcccactatcccaccaactcttaagagtaatgacagctttctatttcgctaatctctaggctacttcaccttccccttgttggaatctcagcagtttgattacctacgtaaccaattccatgtgtaaagttgtttctggttgaaatacctagagtggtttcctttgcctgattggactctgatacaggtggtttaaatcacaagtagcagaaaacccaattcaaacaggtttaaataaggaaatgcatctttttatctcatataacagtaagtgcagaagtagcaggcttcagaattggttgtttcagtgtctggatgatgtcctcaaagaacctggtgcttcccaactctctgctctgccaacctcagtgagtcagctttgtcctcagaatgcctccctcatggtcacaagatggcttccagcaacaatgggcccgtttccttgttcatatcctgttgttccttttttctagaaaccctgaggaggtgtcctcagttggcttaaacctacccttctctgaaccaataactggcaaaggagattggtttaccatgattggattaaactaatcatctgaattgttggaaagtcaacctcagtgttcactataatgaaatactaatgacaaaaactattcttaagtgcaaaaaaaaaaaaaacccaagaaactaaaagagaaagtgatggtaataaaggatagagagccaacccacagataagtgatgttactgcagaaggagcctaggacaaatggatcagaaataataaccaaagacataatagaagaaaacttagctgcactgaaagtcttaacttttggttggcaatcgaaaagggtgttctctgcaaatcaatgacaggaggcacatacctatatacattctaacaaaaatgttctaaaaagacatggaaaaatctggcaaagtatttaagcagaaaacaggctattcataaaggaataaaaaccaggctggactcagatgtttctgctgtaatagtaacataagacaatgaaatatcatccaccgattttgaaaggaaaatttggacactagaattttagactcagtgaagatactttcattttgatgatgaaagacacttttagatatcaagggttcataaaacatgcctttctaatgcattttctgaaaaagaaaaaatacttcaattatttatcaaaaagtatttgctgagcaccagtcatgtcccagcaatatactaggcacataggataagtgagtgaacagataaggggaaagaagtattcctgcctatgtggagcttacattctaatggggaagacaggcattaaatattgagcatgatcaacagaccaaaaaagtgataaggactatagagaaattaaaagggtggaaggcagttgcaattttaagtcaggcagttagggtcagtgactgctgaacaaagacttgagagatgtgagggacccactgtgtggatgtctggggaagagcagcccagcagaggaccagccatctgtagcctaaggctggagtgggccagccctgcgcacagaaccacaggggaccagtgtggccggagatggaaggagctagtgggatgggagtaggagatgagattaggggtggtaagggagagggcacaggttgtgtggggtcttacaggacattgtaatgactttgaccattggagggatttgagcagaggagtgacgcaatccaacaatattttgtaaagatcctcctcttaacatctgccatgttaagcagatgcttgagaaagaggagaacagatgtcgaaagatgagttaggagggtgttgctgtgattcacaggaggggtgatggtggtgtggacaagggaggcgatctgaccctggatatattttggaggtagagccaacaggattttttaacagatgggatgtggagtgtaggagaaacaggagcaatggacgactctgattctagcccaagagactgcaagaatgagtttgctatcacttgggaatggggcaggttatgggtggcacagcaggttgggacctggtgaacaagggagttcagtttttggtatgtggagtgtaggagaaacaggagcaatggatgactctgattccagcccaagagactacaagaatgagtttgctatcacttgggaatggggcaggttatgggtggcacagcaggttgggacctggtgaacaagggagttcagtttttggtatgttgagtgtgggatacagccaggtgtagctacaatgtaagcagctggatatcgaagcccaaagtttgagagggagagatttggccaacctggagatatacctttgagggtcagtgacaaaggatggtatttaaagccaggaaaccagataagatcaccagcaagtgagagtaaacggaaaagaggaacaggcctgaatgcagggatggtcgaacatctgaaggacggagatgagacagcagctaaggaaaccgaggaggggcaaccagtgaggtggaaggaatgagagcacaccttcctcaaagccaagtgaaggctgcattgaggtggaagacatcgtcaacatgtcaggcgtggctgacacagcaagtaaagtgaggcagagcatggaccactggcgaggcagagcctgggccaagagcagcattggtgccattggtaaggacagtatgggggagtggctggggctaatggcccattgaggtagatgtactccagctgacaaagagataacactaacgaagagctcaggaagggggaaatccatccccagattctccccactcttccccctaaatatatctcaaaatctcctaccctcctgactgccaccacctgaggtgaggccaccaccatctctcccctagatggacacatcttcttcactgggctctctgtctcctctaaactattccccagatccagccttggtgatatgtccttgtttggttggttggttggttggttggttggtttggtttggtttggtttttgagagggggtgtcactctgttgcctaggctggagtgcagcagtgcaatcatagctcactgcagcgtcgaccttccaggctcaagcaattcttccacctcagtctcctgggtagctgggattacagatgcacaccatcacacccagctaagtttttgtattttttgtagaaacagggtttctccatgttgcccaggctagtctcaaactcctagactcaagtcatctgcctgccttggcttcccaaagtgctgggattacaggcatgagccaccacacccagccttggtgatatttctaaaattaaaatcagacccagcctctcctccactcatacctggcaagtgctccctgtgccagcctccttctcaggcagataatggactccatggtcttccctgctttcctctcctgtttcatttccgagcactccccatgtcagactcatgccccagccaacattatttgctccttctcacctcccaaacctggcataatacgttttctctgcctagaacactcttgtccccagaactctccatgcctttttttccccctgctaactcctgctccagagccaggtctcggcttggatgtcacttcttccagaaatcttcccctgaactccccctcatatgaccacagcactgtattgttgttgttatatttgggactgtaaagctctgtgaaggtggagctggccatcataacatgcagacataacacaatccctgctttctagtaggagctcggcaaatacctacagaagggatggcttaaaggacaggtggtgagcatacaacccagctataacagggacaaataattgggaaacacattgtaaaactaaatgcaaataccaaaattgttactgaaggagatacgcaatataaatatgatcatataataatgacaacctggaactaaaactccagtattattaagaaaggaagggagaagaactggttaagagagaaatgtaagagaaaggatgatggcatatccggaacataaaagatactatttagatttttagagaactataggtgtgtgtatatatatatatatatatattttttttttttttttttgagacggagtctcactctgtcgccaggctggagtgcagtggcgtgatctcaactcactgcaacctctgcctcctgggttcaagtgatcctcctgcttcagcctcctgagtagctgggactacaggtgcatgccaccacactatgttggccaggatggtctccatctcttgacctcgtgatctacccgcctcagcctcccaaagtgttgggattacaggcgtgagccactgcatgaggcctaggttgatatttttttttattttgaaggtaactaatagcattttaaagacaatgcatacttccaaaatacggaagatgaatccaaagaaaatacaaacatgtacaacagaaccggaaaacaaaggaaacaagaagcagaaaacaaaaagaataaagtgagaccagagtgagaccaaacgcttgatttatgataataaatgaaaattgcttaaactaccctgttaccaacacagactctcaaatacatttaaaacaaagtgaaacaaaaggttaaaatttaaaaatgaggccaggtgtggtggcgcacacctgtaatcccagcgctttgggaggccgaggagggtggatgacctgagatcaggggtttaagaccagcctggccaacatggtgaaaccccatctctacaaaaatacaaaaaaattagccaggcatgatggcgggtccctgtaatcccagctactcgggaggctgaggcgggagaattgcttgaacccaggagatggaggttgcagtgagccaagatctcgtgattgcaccccagcctgggtgacagagtgaggctctgtctcaaaaaaaaaattaaagaatgagcagagataattctggcaaaaaaaaatgtacttttatatcaatatgcaaatagaattccaaggaaatacacaaaatgagaggggaaaaaatattcatttgatattgaccaaggatataacccatagtgaaaagataaccattataaactttatgtgccaaagaagattgtgttaaaacagagaaaatgactgaaaaataatttaggtgattcttaattcatatctatcacagaccaagtgagccaaaaaaaaaaaaaaatgaagtgcagtagctccaaatcataaatgtgacaaacatattttgaaccaaatgaaatgtgacttctgctagtgccaaaacagacattgtctacagccatattgcaatataccagaaaattaatagtaaaaagtctgttcattttaaaaaataaccatttgaaaatgttatagcacactctcaaataactactgcctcaacagttatttaactgcagactatttaagaaagatgagccgggtgtagtggctcacatctataatcccagcgctttgggagactgcagtgggaagatcgcgtgaacccaggagttcaaaaccagcctgggcagcatagtgagaccttgtctctacaaaaaaaatttttaaattagcctggcatagtggcatgcacctgtagtcccagctactcaggaggctgaggtgggaggttcgcttcagtccaggaggtcaaggctgtagtgagccatgatcacaccactgcactgcagcataggtgacagagcaagaccctgtctcaaaaaaggaaggaaagaaggaaggaaggaaggagggaaggaaggaaggagggaaggagggaagggaacactgcctcaaaactcttggctatgaccctaccaacgttcaaagggaaatttataccattttgaaagttgcctttattatgactctaggaaaaaaatgttatgaaattaactgagcagtcaatccaaggagcatgaaagacaaacaaaacatacctaaggagataggagaaaggagttaataatgataaaggcaaaaattaatgggttataatattttaaaagagaactgatcaacaaaatccaatagctgatttcttgaaaaaaggagtaaaatggaaaaaccttcagcaaaactaaacaggaaaaaaagcattgaaaatacaattacagtgaatttcaaatgagaaaagggtgcttattcatcgatagagtgaagatctcttccttccacctttatggatccgtatggacctcattctacagctctcggccctctgccttccagctgggtatagccagtggggtgtcccggcagcaggagggaggaaaggagagtgagggcagaacatgcattctctgggctggctctttgcctcaggctagctgtgtatccccaagcgaggactgctgcttctgctacgacagctcacctgactggcccttcagcccagggtggtaatacctctgccacgaccccacattgctgccctgacccttgtcagtttccttgtacccacatctggttaaatagttcctgtatcaataaacacttctggaatgatcccatatcgaactcgccatctcttttttttttagacggagtcttgctctgtcgcccaggctggagtgcagtggcatgatctcagctcactgcaacctccacctcctggattcaagcaattctcctacctctgcctcccgaggagctgggactacagatgtgcaccaccatgcctggctaattttgttgtatttttagtagagatggagcttcaccatgttggccaggctagtatcgaactcctgacctcaggtgatccacccacctcggcctcccaaaatgctggaattacaggagtgagccaccgtgcctggcttctccatctcttttctaatggaccttgactgttatctatgcaatgctaaatttctttaaaatgaagattattttccaggaaaatatagattaacaaaatggactcaagaagaaatcaaaataaaatgtgccaataaccatgaaagaaatgaaaactatcaaattactacctgcagctaaatgccaggcatagacaatgtcaaatgcaagatctactgtgccttcctgattccaataatggtctacttgttaaaatattcccaagtattaaaaaaaaaacaaattttatcagatagttttactaagttaacataaaatgatgttaaaacttgacaaaaatagctcaaaaaattataaaccaaatttattaagagatttaaaaatcttagtaaattgagtctggcactgtattatgtatactctactatttcaaatgagaaaagtgtgcttattaatagatacggtgaagatctagcctgatctagtatatataatagcatatatatccctctctgatatatagtgatattatcattttatatttttatatataatatgtatattaaatatagaagaatagccaaatagggcctgttttatgaaggcaaaaatggatcagtattggaaaatctttttctttttttttttttttttgaaacagagtctcaccctgtcacccaggctggagtgcagtggcatgatctcagctcactgcaaactccgcctcccgggttcaagcgattctcctgcctcagcctcccaagtagctgggattacacgcgtgcaccatcatgcctggctaatttttgtatttttagtagagaaggggtttcatcatgttggtcaggctggtcttgaactcctgacctcaggtaatccacttacctcagcctctcaaagggctgggattacaggcatgagccaccacttccgacctggaaaatctttttctatcaacttggttagaaaaaggcaaaaaatgaaattacatcttaaactttgtagtaacctaggaatagaaagatattttcttaacttagaacagggtatctatttgaaactaatgttcaaggttatatttatggtgaaacattagagacaatcctattaaagttaggaataagataattatgcatgctattaatgttgttatttagcattgaactgaaaagctctagccagtgtaataagacaagaaatattaatattgaggagaaaaaaatatcattatttgcaaaattattgtctacctgaaaataaccctaataaataaaatgtacttacaaatcagtgaagaaatgaacacaccaatagaaaaatgagcaaaagacataattgagcaattcacaaaggaagaaaaacaaatggtcaaacaaaacaaaagtaaatagtccatattgggctgggcacagtggctcacgcctgtaatcccagcactttgggaggctgaggtgggcggatcatgaggtcaggagttcaagaccagcctggccaacatggtgaaactctgtctctaataaaaatacaaaaatcagccgggtgtggtggcacctgcctgtagtcccagctacttgggaggctgaggcaggagaatagcttgaactgggaggcagaggttgcagtgagccaagatcataccactgcaccccagcctgggtgatagagcaagactccatccaaaaaaaaaagaaaaaaggataattgcttgtaaatagattcacaatctattctgcatggaaaaaaatcagatttcaaaatcatatgcaaagcattcacccattgttgtcatatatattaattttctgtctaaacacataaaacattagcatacacaaaatgttaatagtagttacctctagccagaggaatatgaattttttttagtttgtcatatttgtattttaaaggggttttaggtctggagctgtggagaagggaggcaagttgtgaagtgagcagcctccatgagtgacttcaatactttcttttgttggactctgtgtccatagagccccagtagacatgacgcagggcaggccccggtagtggttcaggtcattgctgcagatatatggtagctgggcttagaaaagttgcataacctctggtctctcaaccaagaaatagaaagaacgattatacaacacttggcaaatcttagacctcaaaaagagagagctatgaaattgccctgcccctctccaaaatcgaatctgaatttggtccagcttctttttttttttgagactgagtttcactcttgttgcccaggcttgagtgcaatggcacaatctcggctcaccgcaacctccgcctcccaggttcaagcgaatctcctgtgtcagcctcccgtgtagctgggattacaggcatgtgccaccacgcccagctaatttttgtattttaagtagagacggtgtttctccatgttggtcaggctgctcttgaactcccaacctcaggtgatccgcctgcctcagcctcccaaagtgctgagccactgcgcctggcaactgaatttggtccagcttctaaatccaactactaatttacagaaaacagaggaagagcagcatgtccacaaatcccacagggatgtaatcagcaaaagccccacagtgagaaatgctacaggacaaataacccagttcccaccacaagtaagtcacatgaaacaaaaaagacatctaaaaatacatcacagcaaccagtctcattatatcggccctaactggaatgattattcaaacaaacaaattattttgttaatataatggcatttaagagaaatctgtgaatttaaacactgattgtatatgacgtgatattatgaaacttgttaatttctcaggtgctataatattatctttgtttcttcaaagggtcatataaaagatgcactgaaatacagataaaattataggatacatggaatttgctttaatcttaggagaagtggatgggcaggatcaaccatgggttgatggggggggcggggatacatgggagtttatcatactattggcactacttttttgtatgaaggttcaaacttctccataacaaaaaaaagtttattttttaaaagcaaatagtgttcccatctttatggtgaagctaatggacttgaattataaatttgtgaataaggcaataggaatctttgccagtggggactgtgaaaataaaacggaaatgccaagtcaagaggaaattcaacagcaaaacaattcctcttccccaattctcaatttcctgacacatctgaaaattgaggtgctgaagacctgtgcatctgtccccgcagtcatcgaggtgcttttcaactcctaccctcagctctgcttgtcagagtcctggaaggaagtgattcctgaggaagtattccaggcaagagggctgcctttctgcccatctttagtacaaaacttttgtctgtttttgcttctttgcatggggagttttgcactgatattcggctaagtattatacatctgaaaaaggaagaatgggaaatgagggtgtatttgcacgtttctggttttttctggaggctccataatcacacagccaggagcttgttatagtagttgcggtgccatggcctcaaggagctcagagccccgtgctggcctgaaaagcgcgagggttccttaaccagtgtccaaagaaaggccagagccgcctgaatccacgggcctagctccacgtcaggacatactaatccggccctgtgagtcagcttcatgctccagcagctcaagatacgaccaaggaagctatggggattacatctatccacgacaaagtccacaggtgactgtccattaaaagagagtgagaacaggccaggtgcggtggctcatgcctgtaatcctagcactttgagaggccaaggcaggcagatcgcttgaggtcaggagttcaagaccagactggccaacatggtgaaagcttgtctttactgaaaatacagaaattacccaagcatggtggcaagcgcctgtaatgccagttactcaggaggctaaggcaggagaatcgcttgagcccaggaggcagagagtgcaataagctgggatcacgccactgcactccagcctgggtgacagagctagactccatctcaaaaaaaaaaaaagagagtgagaagagttgtgtgtgttttttctgtttcactgacttgagtcatgtgtgcatgactgaccaccagaccaatgccatgcactcgctcctgagcccctccctggcagaagggaagagctggtcatgacttggggagatgaacagggccaccccggagctgtagggctgctgtgcaaagaggatggagcaaaacggaattcggggagaccacctggagcatctgaagtcaccccagtcagaatcccctctcactcggcaggaactgtgctttgggagagcacacaagcccctggggtagagggtggttcccacaagatggtgcgtctccctccagtgcgcttatctgggatcagttagccatagaaaagcccgcttgtaccatcagtggtctggctaagaagaaaacgtatgttggttccacgtgcccagatttctaatccacctgccttcccttccagatgcacaagccgttctaccagtccctctttgccttggccctcaccccacgctgcctgcagcatctttgccgctgtgctcttcgcagactgtttggcaaaaggtgctttgacctcatccccctgttacccttgccaaagcccctgcagaattacctacttttggagccacagggtgttttgcactgaaacgcagaacgctgcaaccaatactgttgttctcctcgctgaccttccatggaggccgtgtgttggagagtgccctgatgcagatggaggtgatgggagttcccttcccacttgctctccgtgggaccgggtgaagcacagaccttgccaagcttcaggttcacctcgaaatggaattggcaacaaaagccctttctgcctctcagggtcgcttgtgaaaatccagtgaaatcgtgactatcacagcacttggtctgggaaagtacctttcaacaacagttaagccaaaaggtacagtgagtcctcacttaaggtcttcgataggttctagggaaccagctttaagctaaatgaggtataacaatgccagttttcccaaggttaattgatataaacaagaatgatgttcctacagcatatttctggtcacaaaaagatcaccacacttctaaataaagaccaatacaattctaatagtaaagattgaaataaaggcaagctacacatacctttaaaagagattaataacaagtaagataattatttacccaatttttggtgaatcagtatgtgatggtggttgtcctgctggtgggttagatcaaggaataaatgtttgcaaaacgaaccttgtcaggagcacctcctaccaccacgaagttcagaacagtcaccaatgtggcaggcttgctaggccctctcataccgcatcatttattgtcatgcatttggatgattattgtatgccttatgaatttttactttacaataatttgtattcattcattcattcattcattcatattctaatgtgcttattctagttcagggtcgtgcgtggccagagtccaccccagcaactcagtgtgcagggcaggaaccaggcctggacggggtgctattccatcgcagggtgctcacacacccccacacccacccacccacacacaacactgggacaattcagacacgacagctcacctcacttgctcagctttgggatgtgggtgggaactggagcacccagagaaaacccatacagacagtggccttgcccaggaatcagtcttgtttcttttttgtttttttgtttgtttgtttgtttgttttgagactggcgcaatcttggctcaccgcaacctccgcctcccaggttcaagcaattctcctgcttcagccttcctggtagctgggataacaggcatgtgccagcacgcccggctaattttttatttttagtagagacggggtttctccatgttcgtcaggctggtctcaaactcccgatctcaggtgatctgcccgcctcggcctcccaaagtgctgggattacaggcatgagtcaccatgccctgccgaatcagttttgtttcttatcggtgttataataaaatgacattaaacaaaacattatttaaggacctactgtatatgtatttttccagtgtgttagcagccctcatgctgcccctgagccttgggaccgtcccctcacagagaggcctctcaccccgctggggcccgaccacccggggaaactctgtaccctagatcacaacggacctgcatgttgagaaaggacacttgcaaccaaggcacgtgcacctgcccagggcctgtcggtgctctcagtgctcccaagcatattacagcccagagctcccccggaggacaccggcaggatggtgaatggaagtttccatcctgtgtgagtcttcatgtgacaccctcaccaaaagccactgctccagctccaggaacagtctgggaagtcagatgccaggaacagacacaggttgatcaaaggggccttcagctcagcctgagcgtcacatgccaacagagatgctctagacaacaaggactatatcaaccttgtcttattttctctattccatatatatatacaccttggggtagagggtggttcccacaaaatggtgcatctctctccagtgcacttatctgggatcagttagccatagaaaagcctgcttgtcccatcagtgtctggctaggaagaaaacgtatgttggttccacgtgcccagatatatatatgccagaatctcactctgtcacccaggctggagtgcagtggtgcaatcatagctcactgcagcctcgaccttcttggctcaagtgatctcctgcctcagcctcccatgtagctgggactacaggtgcacaccactgcactgggatcattttttctattttatatagatgatgggatctcgcatgttgcccaggctctaattcctggcctcacgtaatcctcctgcctctgcctcctgagtagctggaattgcaggagtgagccccctcccccagcttactttctctattcagatgctttgacatctggggccttgctgacccaggaggaactgactgccccccacccaccaggcttagctggttcttagcaacagtaaacaattccacacaaagcatgcttttccaatgttagccaaccaatctggagcccagagcccacacctcaaccacctcttatatcccactctttctcacatgccagaccactgtctactccagagcaagtgccacacaacttgggaaagtcctatgccccagagtctgctgaaattatccaaactagacaaacttcagccttgccctctcttgcccattcctcccctgcctcctgaaagaccctggggcttcctcatgggctgcccccatgtcatagcataccctctcctcttaggaacaatgatcaataaaacaccttttcaatagcagtcatctcctgatctgttggccctatgagacatcaaattttctatgaatacactgtattttaaagcaaagactcttcatgttcatcctccaaggacaagcagtggctctcttttttccattacagccagcgcaaggtgctgccccaatgaacctcagaggagacactccctctgtattggtctgttttgcatcactctaaaggaacagctgaggccgggcaatttataaagaaaagaggtttattcagctcacagttctgcaggctgtacaagaagcattgtgccagcatgtgcttttggtgaggcctttcaagaagcttttactcatggcagaaaatgaaagggagccagtgtgtcacatggcaagagagggacaagggagagcgaaggaggtgctgggctttttaacaatcagttcccaagtgtactaatccagcaagaactgactcaatactgcagggaggtcaccaaggccctgtgacccaaacgcctctcatgaggccctacctgcaatgctggggatcaaacttcaacatgggattaggagggaacaaatatacaaaccataccaccctcccattggtagaatctggaaagggaattcagaccccagcaaataactgcagggtgaggtgggatgttatatgcaccataagtaaagcccatcatggagtgaaaggggggcccaggcagagcccaggaagtgaggatggacatcatgaaggagttagccagggtgcaccttggtggacaatcaagttttaacacagtggacctgcccagggagtgataagacagcatcccccagctccatcagctgacccaccttcacccaccctttgagatggacaattgatctgtcctacaaaagggctacgtaaacccagcttcaagacccctcagatccccatcccaggcagatgactctccccaagcctctcctacatagactttcaggagttaccactgcctccaaaggaaaacttgaatgaaggcaggtgtgcagggaagtacagggttccatggagggatagtgatttatcctcctggctaggaggatccccatgctttggcagctggaaggaggcaaggctagagaaggtgggggcagatcaggaggtacttggcttccagaccaagtattctgaacttcactggacaggctgtgaggaaccacgaagcaagtgagcaggtttggtctcagtgggactctaggaagattgctttgtcctggaaagggaagcaatacactggaagatgagtagcagcccaaggtaacaccttagagataggttcagagcttctccactgaccaagaacaatgacttaactgaaattggttcaatttgcttacctgggaagtgaacatatctgcgcctctctcacttacttaggaattagtaagatgtctggtgtaaggcaggtcttcaccaaatttgaagggatcttgttgaaatgcagattcagactctagaggtttggagtggggcccagattctgtggctccaagcatttggatgtttctgttaaccttggatcctgatctgcaggccccactgagcagagaaactgcaaaaacccaggcccagagcccaacccagagaaagaacttgataaatggttccttctgttattaggattgttttatcattagaaaaagaaaacagcccaatattaagatagagactgtaaaaaatggg

SEQ ID NO: 2995 - DNA, 1187 bp, Homo sapiens
atatttattataacaatgtaagactttggttataataatgaaaggagaaccagttgatttcattgagcaactcaatcaaataattcctgatgtggaagagggaagtttattaggatcctgagctagcatggagcatggccatttagagcatgagaaaaatgcttaagttcccccagttagtttgatagatagaccatatttttacttttaacaatacaccaaaaatcctttcctgctttggaaagatcttccttaataacttggagaaggaaggtaatatgatctacaatttaaattaagctttaactagtgaaaacacagttttcttcaatgaattaataattaagcccatgaaataatttcaatgagcatgaagatcttataactataattgtcttagtaatttatttttctgatgcatctaggattttcttcttcccctgtgactggtgaatgattataaattgactgatcattgtgatagcttcttctaatatgaacaatctaaatatcatgctttgcaccctatgtttaaaagtaacaatatattcaaacttaaaattctccatgaatcacctgaccataaatttagttagaaatcaaggaagaagagtaaccatgtgttatgcctatttcttattaaaaacaatttttagatattgctggggaccaaaagttttgaatcaaatgttttagctggtttccctgtgatcatagactccgtgtgtatcacacaacacggaacttagccctggaagcttactgagttgtaaggacatgaattctctggcaccatggtctcaggcatcttccagccacccagtcttgtagaagagataagccatttcaggcagacacgtctctatccaggcttggaatgcatccaaaggaaacacaaaaaactctgacatcagaacacacctgttgactttggagcatccgtatcaatcacagccaagaccagggcagctgtgctggggccagccctctgtgtggggcagaaggaatgtcagctatgaacaaagtcaggaggaaacagagatagaggcttccacattcttctgcctctttgtctacataccattaataaggttgactttttttttaacttggccccaaaaacaattctaggatggcatcttcagttcttcattcacttaaacaatgatttttagatattttaaata

SEQ ID NO: 2996 - DNA, 1166 bp, Homo sapiens
gttccacatctaaaggctggaagccatttgggcagaggcagaatctgggctcagagtctagccctgcaggacccagtgtggcagctgcgtgtctctggagcactggagagggggctactgcaaattaagatctgctgtaaagagcatcttcctggttattctctgggacgcaaaaccatggtggtatctgatctcatcacacttctgccaggaggtgaaatcgaagaggctacattcttgatgctcagtgtcttcttcaggtcatttgcctgaggacacctggggatactgagctatgaaaagaaaacatttggaagatcactgattccttcatggagaggctggcttgggaatagatgacgtgtcaaagattgacatcaaccttgagtgcttatttgtggacttgagatacagataaaaaaaaaaaaaaaaaaacctccctagagtgagggctacttgggatacatgctatatcccaaggagttctcagtttgaggtcagccccagctctacaactcaccaggagagtgcgcgaggatgagggagagacagcctgctctggttctcttcaaggtgacaatgacacctgttgacagatgagaattccagccaggaatacagatttaggaatcatgtttctcactctcatgatgacatagaagagatgcgtctgaatctttctgccagtgtgttaaagttattctgatattgactgtagttctgagctttgtctctatcccaccaaaccactaacttctggaaattacttgtagaccaagatgggaggactccgtgtgtggctccatatgaatgacttatcgtgcctgtccagagtcagggaaaggagaaacaatcttatttgagaagggaggatatcactgcagtggttgtgaaatcgtgtttggaagctagattgctctagaccactaagctctcttcatgtgacaaagaaacttcctaaaatactaaaagctaaaggagattgttatctaagcttgagatggaaggttgccagcggaaacttggaggatcacagccagtcgcctgggattgaccacagggagtggcagaggcagaaagcaaaagaccagttgcaattatccaggtaaaagatggaggctgttgcaataatccaggtaaagaatgtttggtggcttgaaccaggg

SEQ ID NO: 2997 - DNA, 17573 bp, Homo sapiens
gcatcacctcatcaatgtaatggaccagtgtggtgtcctatggcatggaaatgtggtggtgtccctatgggctagattatggcatggagctggagagtttccctagccttgaggtagaacagtgaaggtatattgctggcattgccaactgaaagaaaagagcttctgatggtcttattaataggcatttgttggatcaatagctacataaaaggtgacatacaagccgcatgcatacagtggatgtattgctttgttccaacaacagctgcatctggaagagcagctgcctttgaagtcagcacctacttaacttcaggataatccactgtcattctacaagctccctctgtcttctacacaggccaactattataggccagttatatggggatggggtggtaatcaccatccctcaatctttcaagttctcgctggtgacactaatctttacgggaatgtggttttgcctttggtttactatttttccaggtagagaacagtactagtgatttccacttggtctttcctaccatgatagctcatgctcctctgcaggttagggaaccaatgtggggattctgctcagaatgtccatgctaacgaatgcaccccagaacttgggaaatgaccataggatgatttcaggccccactgggcctactgtgagatggaaccaaacccaaactgcattaatcatttgaccttcataaatgcctactctgattggtggattgcagtaacattttacgcattcgggaattagtgctagttcagggccagcatcccataattcctgagaaagtctaatagttactccttccccaaggtacaaccaccctagcaaatggccatggatcttttgggaaagattgggagggagatacacacttatacatttttcacggtatggcagggtccttcttcaaggattcacaaactctatgttggtgaatcagttcaagtctgggaactgattgagaggctatgactctgtcatttggtgacttaatccagaacttctgatcactagacttagagcttttccattcacacagatacagaagacttaatagactacctatctactttatttctagggacagtatgatcaacttagtcaatgccaacaatttctgtgaatcagactatttttattattgctttggttctgatgtcacttggtccctgccaccctagagtcctatcaccttcattgcattcaggaatcttaattcaatcatagtcgatgccctgatatctgatctacagagatgaacgagcactgagctcttcaaggatgctgagggaggggtcacctcatgaatttatcacagccttggcaaaggatgtgtcctctggacccttccagaatggatgagcaggtcttgcatgatcaatacattctagcattttaatctccttaggtctttgaatacttgcctttatagtacactaagaagttgtggcattttgatttcatttactgtagaccacctttggatacatatttcagttaaccaaccaaacaagtgttagagctcttcctgtctccttgaaataaagcatggaatacatactctctgctcaatgcaccctcattagtaaatctgtgctgatccagtttgtactccttcctcctgaactcaggcaagagtggagagggagtggctgagaaagctagactaaagaatcaagaagatttaatgaacttactggtcaccatttacatcatgatatacattctggaagggacctaggagactggtcaggaatacctcctaattagcaagggagctaactttctccctaattcgctttaccttgcattgttagctcattcttggttttcttgaggtgagcagatgacagagttgggaaaggatgccattgtcacttggattctttcccgataattccttcctcttggtaggaagagtagatagctcttcagcttcctcctcttcgaatagggtagtgctttatgtaaattgtgaggattagagagactataaagagcttggcacattgcagacatgtaatacatagttggcatctattcttatcattagacctaactatgggagtaaaatcgattttcatcctttttgtttgaatacgtttgagagctttcttgcttttagtttgttaatttcattctatatatcctgaatttttgcagtcagcagattatagccatttgccatttcttcagataactatctgaaagatctgaaattttagaatcagacagcgctgtggctgaaatatccaagcatagccatgactgctttattccagtgtaaacctcagtgcaaatgctgcttgactagtgactgatttgcaccattcgtggaaattagaaaactagaaaattagttcgttttctagtgcttttcgatagtcatccactgaatggaggcatgagtacaagggaagaacaatccactgaatatgggaccctgtaggtggtactttattcctaatttagaaaaaaaatattcaaaacaacttaatttttgtaagtaaacagaagatggtacaagtaacttagccaaggtcgcatagaaaaaacccaggtagtgtagtgcttcaaagcataggtttcagggccaggtagtctgggttgaattttggccaagggcaatttatctaatctctttgtgccttggtttcctcagctgtaaaatggaggttactatgtctatcccaaaggcttgctgtgaggattaaaggagttatcactttaaagcccatagaacagttcctgcacattgtctatgtgctcagtaagtgtttgctagtgaaagcaggtctgttgatatcctgtgtttatgctttgccattgggggaagctgagtgaagggtacatgggaactctgtacagtttttgcaacttcttgtgagtcttaaattatttcagaataaaatgttacataaaacaaaggcaggtctcctggctccaaagcctgtacctgtgcctgtccttggatatccttctgtccatcattaggaaaaggcattccttaaaagtcccagtgcaggagctgctccagcctaagggctgcaaggttaatcaaaagatgagtgtttcaggatccaactgtacatttagagaacagcaccactacttagagtaactaattaaacctgcaaggaactgcaaacctgtggtttaaaatccccagaattgaaagctgtgagaaacaccattctgtcccatttaatgatgaatggaggatctaaacaaaaactcctcagtagcctgtgtgagttcaggattacacatgtatgcacacaccacacatttgccttagaaacctcaaaggttaactacttgttatgtgcttatggcctaagtgtcagataaaatcctatataagcactgggaacataccctataattttgttcatcaaagtaaaagaaacatgaggccggatgcagtggctcccgcttgtaatctcagcactttgggaggccaaggcaggcagatcgcgtgagtctaggagtttgagaccagcctgggcaacaaaggaagaccccttctctacaaaaaattgaaaaattagccaggtgtggtgggagtgcctgtagtcccagcccctcatgggattgaagtgggaggcttgcttgagcccaggaggttgaagctgcaatgagccatgattgcaccagtgcactacagcctgagcaacagaatgataccttgtctcaaaaaaaaaaaaaaaaaaaaaaaaaatggaaaagaaaaagaaaaaagaggctgggtgcagtggctcatgcctataatcccagcactttgggaggctgaggtgggcagatcatgaggtcaagagatccagcccatcctggccaacatggtgaaatcccatctctactaaaaatacaaaaattagctgggcatggcggcacgctcctgtagtccgagctactcaggaggctgaggcaagacaatcacttgaacctgggaggcggaggtttcagtgagctaagaccatgccactgcactccagtctggtgacagagcgagactctgtctcaaaaaaaaaaaaaaaaaaaaaaaaagacagaaagaaaagaaacataaggaaaatatctgggaatatcatttttaagacattgaaaggaattgatgtgtccaaatttgtgcagatcaggtgattttgctgatccagtgaggtatatgagaatttgtaaaacccagggctgaggcagaaaccagttttctgacctcttgaatttgctcttgaactctagtcagcatttcagaaaaaaatatgttcagaaggaagttcctagtagcactcagggaccctcaaaggtgttgggagggtggggtctctcagagtgggcatgggtagatttaaaactcgatttaaattgtaacaaaatgaatatttggaaaacaagccgaaaaaggctttttgtaatttctaactggataaaataatgaagaataaaatcttcctgactgtgaggaatatgtcaaagaaaacagattcttgcacatcaataattcttagggtgatggacaaaaaattcctcaaaaggcatgggttaaaaaacggttttgaagaattcaggactagatggtatgactctgttaccccaagaatgacatctcatcgatcccatctctaccttccctactcttcaccgttagccaagacaaatcaggacaactgctaaattattagcagaaattttactttgacttcactgaggactcagtgtttgaaagggaaattggaaaaatatttctttccagggagtctactttttcactggttcaaaagaactgagttcactgggcttcagagaataaccaaaggctggttgttaaagacatgggctccatgaactagagtccacatccactcttgcctgccccgtgtggccttgcttcaccagcctgactgctgggcttgcttcctgcctcaacagcttaggaagtgaactgttctgggtgagacatgtaatctctctgagcctcaatctcctcatctgcacaatgaagatgatgatagaatgctcctaaggtggtggatgaaatgcttaaatgagataatgcatttaaggcacccagcaccttaaaagttgtcagtaaaacgagctgtactcgttactatcctggagtggaatcaggtgatcttctgcccacctccacctgacaccccaccaccctccatacagtgccagtgctttcagtcctatcacggggtcttatataaatgcctggccatgctccaagtataaattgttgtatgtatgggaagacagccttaattaaatagaaacaggatttggaagatctagacatctaatctgtaattcagttcctggtcagatggaagctgagtataaaaggcacctgaattccaggtgactcaacctgggacctctctctaggaaggaggggaggtaataataagacttagtaatactctaccttccctgcgaactccttaagttccaagtgctgtcctgtccaggccctcccttggggatccttccataactcaaattttacaaaatgggacccttgtcatccacctccctttcaggtaaggttgcttccatccggtgagaacttaagtcagaagtcttcgtcctggtgacaaatggtcagcttctccagcggatgttccagtgcctggagctcatgctccctgaacgcctggcttggtgtctcttctcagtgagcacagcctttcttgaattcacaccagctgaacttcgtgaaagtgcacttagggctactagcatttgaatttccaactttttttttcctctttggcattttgtttctattttttatgcttcttttttgtattttatgtatccttgtgagccatctgccatcctttctggaatgagatggcatataaatgcatacatatatgcatacataaaatacatactgatatttgagaaagacttatcaaacacaggcatccctcaaggtcattggtattcaagagagtaagggggagggatgggggagatagtggtatttttcaaaacatatatgccagtaatcttctggtctcctctttacctttatttcagagacccaggtaattttagagtcactctggagggaagattcgtatcttgaaaaattcttccaggtgatttggacatacctttctgcctcccagccacccccccccgccatggctcatagccacgtctccgggattcctcagctctatttctggatttggtcagaaaacagcctgctctgctggattagctcatctctccatggaaatgccaccctggagttatgagagcacggcctctttctaaggctttctggtgcaatgcaaccctcctcgatggccacagctgattgactggagtgaacctgtgacctgaactgggccagtcagatttttcatactggaaatttggcgtcggagccctgagaaacaagtcaggtggtctcgggggctgaagctacccctgtggggtgactagtggaactcctggtagtgagaaaaagtgagatgagactgatgatcttcagaaggaaaagtttggactaaacacccagaggaaagctgaaatgagagaccacatggaatgaaggagaacgtgagtatgagcaagcgaagaaagccaatcactgagacaagtattgccagggaagaaggcttttttgggtgctacagctgaggagctgggaggtcaaaacagtgtgggaaaagaaatttaaaaaaatgttattaaagaagctactgtcaacctaaaggaagaaactgaggcaaaattaatgtaagtaaagagtttatttgggccaagatgaggacagctgctcagaagattcaggcccaagtgatcttggataggagctctgtttggcctttgttaccagcaggtttttaaaggcaaaagcaaggggatacgtagggggatgatacaaagttgcttgtcaggaattctctttggtttacagaaatgtcattcattagttattgcctatacattgttgacatatagattatgacctaatgatatctatcatgtggtgtcattaggttaattttgagctacttgtgagaaaaggcctagagtccacatagcaagcaaattcaagagatgattatttagctcaggaggggaagtgggatgtgactgtagcctcattctcatgcctcactgggcctgataatttaaaggaggttcacattcctcagatagaaagtttcttttctttctcgctataagcctctgtctttcttgtctctctattgctaagtggtttggcataaaatcatgtgctctggtagaaacctaagggctttttattcagctgttgaaattcatacccactggagattctagagccatcagtggccatggttcctgccactggaggaaactgtctttagagagtgaaggtgaagctgacatttataaacagccacggtgagaggcagggctggaaagcaggcctggctctgttccagttcctgtgtccattttggagacgagtttccgtttcctatggtttgattacgtgatcccatgaatctccatctcctgcttaagctgttttgagtgtcttgtccatacatgaagtgtcagggtgtcctaagaagacagtggaaagtgatggggtccagcatctgggatgttgggcatcttagtactgggggagtgtgtcagtctatagcaaaatcttcacttctgggctgggcttcaggatggaactcaagtcttttggagggaggaggagttcctagaggaactggggtcgcaaatgagttccaagtcaaggactcaagaccatgagtcaaatatagatgcctgagtgctgtcctcagcaagcagtcaagggtgttggacccagacgcccagatggagtccagggtaggcatcacttacaggtcgtctttgatgcatagaaataaaaaaggcaatctaaagggcagaatttgggttgaagccccataataaaaatcaagcagcttgttctaagtagcagttgtcatttggaagaggctaggcagaaagggtgacatggtaacatttacagatagaaagaaggataagcagatgagagaggaaaacttcaaagaaaaatgaaggaggtagaatctgaaaaaaaaaagtcctggactgaagagaacatggtgttgctgcttttgtaagttatctgtgggctaggttgtggatatagagaaagctgctaaaggtgatagttcactgaagatggcaaaagcaccatgagcagaactgggacacaggatcagggccagatgagactacaagatgacaaattttgggggtcaggaggggaagtgagatgtgactatggcctcattggtagacttttccattcatggcccccaagggaccgtgtctctcagtattcatgctcttgtgcattgtctcccatattggactctgggcttggcaaggtgacttgctttggccaataatatgaacaaattaaatagggataaattagaggcctgataggcatttgcatattggacctatgctctttgaattctgagattgccagaggatggattgactagctgtcattaccttactacaagcctatggatgaagccagcacaggaggtaatggaaggaattgcagagctacgaagctgtgactgtaatgcagcatgcctagtccccttcctacctctagtcttcttgttatatgaactgataacttatagtttaaacttctcagtaagttcactttcttgcaactgaaagtgtcctaatgacacagtgtattagtccattttcatactactctaaagaacttcctgagcctgggtaatttataaatgaaagaggtttaattgactcacagcttagcatggctggggaggcctcaggaaacttacaattatggtggaaagcaaagaggaagcaagagaccttcttcataggcagcaggaaggagaagtgctgagcgaagcagggaagagccccttataaaaccatcagaccttgtgagaactcactcactatcacaagaacagcgtgagggaaactgccctctgattcaattacctccacctggtctctcccttgacatgtggggattatggggattacaaatcaagatgagatttgggtggggacacaaagcctaaccacatcacacagccttttgtttttaattttttgaggcaaattcccataatgacatggttttttttttgaagctgggaattctataagtaaaaatatttgcaaggcacttaacagcttcgatggggaaactctatccctgtgtccatgctttctacttacctgatcccctaagtaccattttctgaaatgctgtccactgggatgcagcaaggagtccagttggtgattttagagcatcacagccatgaagagttactgagttgtgcgtactcatctgaaactaagacagcctttttggttccagttgtcagcttgtgatctatttatctttgctcccagggggctatataaaggataccagaaacaggtacttctcatgtcccttctagctcaatgagtaatagacttgatggtttttccctctgatgtctgaaactttaaaaagacaataaaaacacacagatcaatatactgaataagtatatcttccaaacctcatactctgtttctcattataaacatataaattagcctcatgcaaagaaaagaagcatagcttgtaacatcttttctatctgacatgtgctgctgcctagaagactccttaacatgctccctttattacatctcccatcatattctccacttgagtatccagcaactggaatacagtgttatagaaatgagtagttatatatctgtaattatttccagcttcaaccgtgtctataataagccaatgtacttaggtcactaagctctaaataggccagagggtatggaagacatatctatccccaccactggaagaaagctcaaagcttgtccttgttgctcacgctgtgatgttttcccaaagggagggcagcagggctgttatttggggacagctgagacctgcgaatgcataagagcagaaatgatcaatggagcatccccattgtccatcacagggaaaacccagagagggaaaatagggcatattttccctcactgccctgaatgcaatacaaatctcatcactccatctccctttttagcctgtgctggagcaaatagttttagaacatgcacaatttgaagcaaccccattaagtcaggatggcaaatgctataatttatccatgctccctccttggagaagttgaacaaatattgcagatgagctttataggtaaagactgtagcagagccttattaactaggtttagaacagtaggttgaagccctttctcagacaagaaccacagactctgtttcctcttgatgtgatagatctgttaggggtgcttgtgtctgcactaagattacagctctaggcagggtagttcttgagacacttagaccacagctctgctctttgaggaatgaggcaattcaagtgttaaatgggctccatgttttaatctttagcacttgaacttattctatttctgtccccttctttgcaatgttaggctcagctgtctgtggtgacaggacttcttctgcagccaaccagcatacagctggtcactacagccctaggtgctgccaaaggctgagaggaatgggaaatgctagtactttccttcgtgcaagagtgggagatggtgcaagggcatttctgtctagttcaagtaagcatatattgagttctccctactggctaggccattagagacatagaaatgaataaagcatggcccctgcctcaaaagctttcattgtctacagtaaggtttggcaaactatacctgtgagggtgaagatgctgcctgttgtaaataaagttttatttaaacacaaccatgcacactcatttacatatcgtctatggctgcttttgtttctacaatggcagagtaggtctaacaagatcatatgggcccaacagcctaaaatatctactaactgatccttcacagaaaatgtttgctcacctctgcacaacttagtaatttttggtatatttacagaattatgcagccactaccactaccaaatttcagcattttcatcaccccaggcgacatctcatatccattagcagtcagccccagcccttgataaccactaatctattctctatctttatgaatttgtctattcctgacattgcataaaagtgtagtaaggcaaaatgtggccttttgtgactggcttctttcacttgcaatactgttttaaaggttcattaatgttttagcatgcatcagtgcttcatttctttttattgcctaatagcagtccattatatgtatataccatatttggtttatcttttcctcagttgatgaatgtttcggttatttccactttttgactattatagttaatgatattatgaagatttgtgtatgagttttgcgaggatatgtgcttttgcttgggtacatacctcagcatgaaatttctgggtcataggataactgcatttaacattttgaaggactggcaaactgctttccaaagcagctatgctgtttgcaatcctaccagcaatgtatgaaggtttccatttctcgacattcttgctaacacttgttattgtctgtctttttgattctggttgtcctagtgagtataaggtggtccttcattgtggttttgatttgcatttccttcaacgctaatgatgttgactattttttcttgtactcattagctatctgtacaatgtcttctctgaagaaatgtctatcaaatcctttgcccatttaaaaattaggttatttgctttttgggttaagttgtaagtgttctttatatattctgaattctagtttcctatcagacagtatatattatgcaaatatgtcctctcattctgtgggttgttttttcacctttttgatggtgtttttggaagtgaaaacagtttgtaaccttgatgatatcccatttgcctattttttcttttgttgcttgtgcttttgatgaccaatctaagaaaccattgcctaatccaaggctacaaagatgtacttctatgtttttttctaagagttttacagttttagcttttatgtttaggtatattatccattttgacttcatttttatatatagtgtgaggtaggggtccaaaaatcctcttgcatgtgaatagacagttgtcccagtaccatttgttgaaaagactattctttccccattcttcacacccttcgtaaaaatcaattgactgtaaatgtgaagatttatttctggattctcagttctattccactgatctatatgtctatccttatgccagtaccacacaatcttaatcactgaaactttgtagtaggttttgaaattgggaagtgtgagtcctccaactttgctcttccttttcaagattgttttggctattttggattccttgcatttctgtatgaattttaggataactttgtcagtttatgcaaaaaaaaaaaaaagccagctgggattttgacaaggaatgcattgatttgtagatcagcttggggaatattccaagatcagttttaatctttttgtttccaagatgttttgagcatggatcatctgggtaacttgcatcaatgattcccagcatttctgagggttaagtttcttttataatgtaaaccattattactgtcttctcaaaggataaaacttttacttttctattaaaagcatcattttattgcccaagtacataagaccaaacactattatgaactagagaatgcttttaagtgaatttgtattttattaattcataatagtgtctatatatacttcagaaattatagagcaaaacatggagaaatggtaaatattctgtcttcagccactgcttggtatatttatggagtcattgtccggtttgcaaaaaaaaaaaaatcagctcccacttagggaacctctagttagcaagaaaatccttcttctaaagcaggtctatctttctgtccagagtgcctcagccatagaacagggcagtgtgagcaggactggccttcgtaaactgaataaagatgccaaatagctcacgatcaacctggtgcttttaaagagttgactttcttgtgagggaaggaaattgtatcccaagctgcttcccctgttgtctaaagctgactttgcctcacctggcctgggaaactttgctccctggatgctctaccaattgagttaattggcagtatgctcagatgaacaaattcagccacagaaatacctctaagattttctttggcaccttcaattaccagtttttattaaaaagaaaaaagaaagcaagcaaacagaaatctcatgtgaacattctaatctttcctgctggcatcacctttctttatatttggaacaaaatggagaagtaaaaaatcgtccttttttttttttctctcagtcaagacgctctattgaagaaaagaataaagtaaattgattgcttataccagtccagaaaatcgttcagatttgtattctcttctacttagacacatccactttgccatattgtagtggaaaggtcactgatactagaatcagaatatcttaactcaaataccaaatccctgtcttgctgatctcaatttctttacagttaaatagaattagtaatagctaacttttgaatgtgagaattaaggagaaacttgaagagagtaaagcagttaaataattcaagtcttgtgttgtttttttttattactagcgtgctatttttgcacgaaagataatgcacccgccacttcctgagattcccaacctccttctagagggccacgtttttcagtgtggcatgggtccccgcaggcttcccttcctgctggagcaagtggagactatgcacctccccaggtgtgtgcccaaatcatgcagagagggctcaggagctcccagggcccagcagcttcttcctgatggcaggagtgggccaaggcagcatgccagggcccaggtaaagtgagacccagacagtggggagagagggcgaggaagtcaccagacagagagatgaacatagcccttcttttcctcccttcccatttcccacctgtccatgtaactagcatgacttacatcttcgtatgtgttctttgaccccatgtggtgtcctttcttttttagtgttaaacattttctaggcttctggcttggtgcaaatgatttgcctttggaaaaaattatatttattgaaagcttcaccatttaaataaaacccctctaataattcccacttccctccttattacccctccttcctctgctggctagattcccatctgtgttcattgccttggggaggagcttgaaaaggcggggtaacctgctagtcactggcttcctgtttctggagcctggcccatgatgggaagcagtgaggtgccctgggtggggtgaggtgtaataggaaagcatgaagatggtggaagtgggagtgcctctgaggggaatgctccaggtcaacacagaagagcttctgtccctactttcctgctcttggactacagaaacgtcctctgggccgagggcaggctcagagtaaggaggagagagagagagagagacagagaagcagcaagaagagcagaaaagtcaacaggcctgagagggccatggtgcaaactgcttcaaaggcaggtccttggagcccatgtcactgcagaggagttggagggctagagaacagagaagtttggcagccatcatccttggccatagttccggaaggctgcaagaggctaggtgggcaatgtatgagcaggacatctagcaaatgggccatggagagcctgactgagactcttatgtcctattctggcccagaaacttcacaatgggtcttaaatagcacagagaagtgcagccctgaaaggttcacatggacaggagtctcagcatgtggacaggtgatagaggagcaaatggggtgaggcacattttagccaacacctgtaactgaggcttaggagatgccctcccctttttcccccatgacctggtactaagtactctctcttgaactggtgaactaccctggacaaaggactgaattcccagggactgagattacatttttgtcaccctagcaagaagagggctcaaataacaattctaaggcgttatagaaaattttgtatttcttgcacacttgagttggtggaatgaaattcatacccaccacactgttctttgtctattccttgtatgtgttccactctagttgatgtgacttggtgagtcttttggactggattaaatatggcacaacaagtctttgtcaagcttaccatttgcctgttcctctattaggtaccaggaacaggtgtgtgaatgagaagtggttggtagtaggcagcctcaaaggccctcatgagctgcacctcctggtattcttgaccttgtgaatgctctccatttgaatatgggctggctctagtgatggagcaaacagaatatggcaaacagaatatggcaaaagtgatgggatgtcacctccaatatcagattacaattagactgtggctttccttttgctcattctatctctggctggttcggagggaagccagctgccatactgcaagctgcctgaagaatagatccagagaaaacgaactgatatctccagaactgaagacctagttcctactaatagccctgctggggagcttggtttcttcaagtgttgaaccttgagatgactgtagtcctgtttgacactttgcagccttgggagagactcagccagaggcacccagctaaacctccaggattcctgaccctcagaatctatgagaaaataaatgtttctgttttaagttgctgtgttttggagttactcattatgcagcaagagataaccagtacccagtccttgccctccaggaactcttgctctaggatgagaatttctttggaaagagcattcatgataataaagatcagagagctaggcataatggcacggattctgttaattaggcttcaggcagtgagaagaggagatgagacgcaggatgctgaacaggcaataatgcctgtgaggtctgggatcggtttcctctggccaacacattctctttaattacaaagcttagttcctgaaatgacaattttctatttttactcagtggattggtggaagtaagagaagtagcatcccgtggtagaaatgagagagcagggctgtttagggaatttagctcaaatcaacaactgtttttggggcggccactctgtacctatgagcccttctctcacatactcatagatgctgtgccccagcctctactgaatcaccctttatcgagggcattttgctaggatagactgtgcttgtgactgatgttcttagtcatcacctcttctgtgaggtggagccactgaaaaatggtaactctcatctgtcattgttatagttgcaacagatttaaagacaacttcattgaaaatagaaaagggtggtggtggaggcggctgcgaaggagaattggtttttcttctaaaaagccctgactcaggccacacattgagagtgctgcaatctttttggttctacaacttatatcccagaatccccaacccactatgaagatacactcccttctcatctgaaacattgtgtgctaacaatagcaacactgggaacttcggatatttccttgcaaatggatttttcctttggatatgactatattaaaatattgctcctggttctggttcttaattttaggtgagttcagaaaaaaagatgcatcagattgaaggaggacattgaaatcaattatatactgattagctcggaggaaaggtttccttgttctttttcttttttttccctctttctgtattggctaatccccatgcacactgcaattgggtgcagtcaagctgttccaggcttttgataactgcctcaactgtcagaagtcactgggagtgccagcagtcagccacagaactaccactgagctttatggaactttgcaaatcttactggaatccatcgcatttcatcttgtcagtccaaccagctcactgtttgttgtatgtgatgttttagagataatctctctctgggcacagcacagtgtttgttttgtctgctgagcattgactgccttatcttctgttaccagtattctgattctgtggggaagaaaataccactctcagtctacatgattggggtgggactgatcccaatcctgcttccagaagggggcaggtaacccatggatgggcgattacagtgctttatcccctggtcccaaggcttggtttaggatggacatatgacccaatccaggccagacatagccattgagacttggttctaggacttctatttgaggagtgagaaaaggcctgttatgctccattggggttggtgctacaggtagctttcttatgatcacaggggagtgcctgtccatgaatggagaccacatagaggataggaggagagagagagagagagagagagacagtg

SEQ ID NO: 2998 - DNA, 2258 bp, Homo sapiens
atttgccttgaaacgcaggaggcagagcgggcctgggagaaggaggttgtttccacgccttcctgggggagaggctggtgcagtcgtgagagtcaaccgggagctcggaggaggagcagacaggacgtgggagagctcgggagagacccaggctgggcgtcttgcagctcagacccttggccacccaagcagcgtagccggcatcacagcccacggcgtgaggccaccaagacagacagaggaggtgagggggacccggactgggccagccacacgtggaggtcgtggaggaagcaggcatctatgcggaatctcggccgcccagtctgccttgtccacagagaggtgcctgtccgctgcttcgagcgtgtgccgacgtctcccgaatgtgtcccctttctcttcttccttgggatttcctaacgtctgacgatcccagcttgcgttggccccctgtgctgtggccccacgacgttttgtccagcttgatcagagcagaaaggggacctggtgggcagcccaaggggcaggaaacttccgggtggattccagcacagccccagccctgccggggtcttcatgccaaacccctggtcggccaggcttgaagctgggctgtggagccacagtcctggcctacaggcaggtgcttaagtcactcaggccactatgacacagttccacagcctgggcagcctacataacagacatgtacctctcacagttccagaggctggacgtccacagtgagacactgtctctaaaaaataaataaataaaaaataaacaaaaggccaggaaaaacgtaaggtagtatcaaaaatgtaatgtgtcaatctcttttcatgacaggctacaactgaaaacaccagtcatattaccaaggctgtgaccgaaatcgtgtctctgagaatgtgcctcaagcgttccaagcctggccggccgcgctggctcacgcctatcatcccagcactttgggaggctgaggtgggaagatcacctggtgtcaggagtttgagaccagcctggccaacatggtgaaaccccatctctactaaaaatactaaaattagctgggcgtggtgacagccgcctgtaatcccagctacctgggaggctgagacaggagaaccgcttgaacccgggaggcagaggttgaagtgagccaacatcgcgccattgcgctccagcctgggcaacaagatcaaaactccatcccccctccaaataaaaagaaagttcccagccttacagcgagagtaaataaaaactgtcaccatctggcaggcccaggaacctcagggctatcggtcaaatctaaagcctgccttggtttggcttcttagcctcaagaggccattaaatctgagattcccatctgatcaacatagggagaaaagcttatgtttctaaagaaaagctgtaggcctgggtgcagtgcctcacgcctgtaatcccaacactttgggaggctgaggtaggaggatcacttgagcccaggagttcgagaccagcctgggcaaaatagagagacccttatctctatactttttgaaaaaggaaaagaaaagctataatacatctgttaggagattgtagctctgggcattgtatttgagctcttatatctacctacagactagactagatcctaaattcttctagattccttcagtcaaaatttcttccatggaattactaaaaataaaaactgctctgttcctaaatccctataaactgaaactagatgaattttaaggaacaagtctcatatctgacatatgggccccacaggagttcaccaaaccatccaatgccataaccacagacatttcacctgcaaaccaggcagagaagctggcgttttcacactgtagccagggcttccagttcatcgggacgagattctgtatcagagacgccctccctcttaccgtctacctgctcgtgccacaggatcatggtcatttagttcattcaactggtgatcttaagcctagatgtacacctcctaactgaacaatgctggaccggctctttgagatgatagcaaagactatgaaacaaataaaactgaaattaataatggactccaggtagactcagcctgagagacattcctttcaaatctctcttgttcaaatgtggctaaaggttttgccactgacttctagctgctaatcacttccctccactgtgggacaagaccagcaaccgcaggacaccacatcccagcaccaacaagggacaatcaaaac

SEQ ID NO: 2999 - DNA, 715 bp, Homo sapiens
tcgagcgcggccattcgccgcgttctgccctctcccccctttcctcacgctggtggtggccctttcctcagtcctgctgatgtcctccagctgattccaggctgttcccggccacccctgaggccgtcctttcgcttcttgtaaaagcctccccgcctcctgagctccctcggtcgcctcccgagaagccaacgggcctctctggtggagcgttaggttgacagcgttttagcaggaccgcgagaaaccggggagatcctcttacgaggaaaaactccaagattacatccctgttatctttcctccaagtagtttctgatcataagttatttgtttaaaaatgatgttttaattagaatttatttgatggcttttaaaaaacttttactgacactcaacatgtttgtttttgtaggagctgactaaggctttggaacagaaaccagatgatgcacatatattatcgtcaaagagcttattgtcacattcttcttgggaattactgtgttgctgttgctgatgcaaagaagtctcgcgaattcaatccaaataattccactgctgtgctgagaaaagggatatgtgaataccatttaaaaaactatgctgctgctctagaaacttttataggaggacaaaaattagtgcagatgctaatttcagtgactggattaaaaggtgtcaagaagctcagaatggctcagaatctgaggtg

SEQ ID NO: 3000 - DNA, 2671 bp, Homo sapiens
cacaaggtgggtgggggttggggggaggtgtttgtcatggctcaggaggtcaactttgaagcggggcattccctacaggtagggatctgcccggaacgcatcccatcccaaactgcaaaaccacaagcatcaacagcaggagccgagcaaagtgctcggcggaggaagaggaagggcgagggagagaaatggtcgagtacagaagcctgcgtgtgggtaagaaaataccctaaccactcgcccaccggacgcagggcggctgggactgcgaatccagcagcagccacagcgtagcagcgggcggcagccgccgaggcagcaatgtcaggagggcacagctggaggaggcggccgccaaagccactaccccacccccaggaagatttggaaaagaggcactggctactggaggaagggagaaatcaccgagagagcgaaagatgtaacagatgcagtgactcatgcctataatcccagtactttggaaggtcaaggcacaaggatccattgaggccaggagtccaagaccagcctgcacaatgtagcaagactccttctctacaaaaaaataaataaaaattagccaggcatggtggtgcactcctgtagtcccagctactcaagaggctgatgtagagaatcgcattatcccagaggtcaaggctgcagtgagccgtgatcatgcctctgcactccagcctggacgatagagcaagactttatctcaaaaaacaaaaatttaaaaagatatcaggtagctcatagaattgttgagagggctgtaaaaccaggcttgaacttaaacagcaacgataaaccacccacagaacggacatgatgaagaagttggcaaatgttaccaactgtcctggtttttttggtgactgtagtttccaaggattcagatccttccatgccaaaatctgaaaaatgctgggcaaagtatgactgacaatgtggtaatcttacagctagcactagagacatcaagcactagacaacacaatttgccctttggccacttatacaatgggaactcacgcttgcagtaacctctattgccactaggagagagaaacacagaaggaggaagggagaagggagagagaggaaaaaaactgttgcttgtctccttagctgtgagtcaaaggtctaacacagatgtctggctgaaaagcctaggtcacatgcctgcaccccagagaaagtatgtgacatcttctgcttccattatgggaaacagcctttgcttgtcacgaagatttacatggtgagacatatcctaaatatagggaagctgttgaagtggcccaaataatgaccaatttctactaatttgtactaatatccaaattacttttaattatctaatattacttagatacagtgaggcaaccattcgttggatatataatggtttctttgatttcaaaaatctttttttatgtaatatatgtctgaagaccatcaaaataaattcttaaagtcagattaataggatgttacttataatattattgtaattatttgaccacataatagtttatgcccattatatactatgtaattgtatgatggaaataatgctgtactttgtttgtaaaagtttaattatcctgacctttgttcatcataaagaattgctccatttctattatttatcgaggaaaaaagtttctctctttttgtttttaatatgtcattaggagaagagtagttacacgtaggctagagtgtttgccaagaagaaattgattttaatgggaaccttttatctaagacaaactttaagaagagcagtaatggacaatgtgttctgtgcaactcttcagccttcagtctcacattcattgtggtcaagtattttcagcaaagaataacaagtcagagtttgtgtatatttttcatagctgttcattctcttacagagtaaccttgaacaaacctcttaagatttgtgttttatcttcatatactgaaatacaaaatgggaatgcctatatttaatcaaagatataatttttactgatagatagtaaagaacaaaacactggaacaagaattcctgtcctgcctttcacaatgtggttttgaggccttggccatgtcacttaaattctcatatctgttttctcaatctataaatgatcataatacctgcactatctgtctcaaattgcatatgtgaaagcatcttaaaggtacaaaacaataaatacaaagcattattattaaattattacaccttccagcatttaatgctaaaaatgccaaatgcgtcctttggttatatgtaggaaatatgtctcagaaaaatcaatttaaaattatagaagctaacaggtaagtcattttaagtgtgtggttatcttctgcatggcagatttttaaatggtaattattaatgaagttttcctatacttactgtttccaagactccattctttccaaagttttctgagttatgcttatcatcccttaagtcttagggatgctcttctgagcttttggggtttgtttaattgatatgtcatagttgtacatattttaggagttcttgtgatattttgatacatgtatataatgagtaatgataaaatcagagtaattgggatatccatcacttccaacatttgtctttgtgttgggaacattaaaattcttctcttct

SEQ ID NO: 3001 - DNA, 13956 bp, Homo sapiens
aacataagtggacatgcacaacaaaaaggccctttcgggcgttaattttgtatcacctgcctgtatttctattcaaacatgaaaaatttttgaaacaaatttgaagggggagtggtccttcaccaataaggcaccaataaggcaggttattttctcctttgtactggcaaccatcttttctgtagtttatgctctgctcacaccctatgtgcttgtttcccatctgagataaccctgccccttttctgttttcatgaccattattcaatggaaaattggaataaagtaaaacaggacaagcctgaattactttgggctctttgttatatctcatcattttttttggtctcttttctccactacatttaaaacaaaaaataacctttgcctgtgcttttccctcacttctaaatatgttttttttaaccttttctttcttctcttttgtgcttgctttcttagttaacattacaaattttctgttttttctaaagctaattttaaaaggaggcctataatatttgtgtaaagtttttcattcctccagtcatcccattttctatatgactttaatgtgttatctgccagaacaactagaatagatatctccattatttctgcacagatggcagagtgaacaagactttgtccttagaatttccatcaacaaaacaaaaccaaaccacttactatatatgtattgccattcatgtttaagtgctgaaaatggacttggagacttatctcagcactatcacttatgtactctaactcttctttatttgagtagggaatccttcttgtgacttccttcagggtgtggacacattgaaagattaattattcacatatcagctggaaaaaagtgaggtgacaagtgttgacatttgcgtttctgaaagaggcacattgttacatcaaaaaaaggataatgccaattaggatttcatatgtgttgttttattttcacaattacaatgttagaggaaagctcaaaagtaaaggcttttgtgaaaatgatcagatgataaatcttgatacctgtgtaagaagtgaaagcaccagagtttttttagaagatgaaaaatgaaaaaaaaaaaaaaaagaaaaagaaacaatttggcattgttagaaattctttattgggagtggaaaaacatgaaataaagggaaaatagctttaatcaactccaaattccttctttggaagtgctgtgtgtaatctccaataatggtggtgtacatttcccccaactctattaaaaccatcattatcattgtcatcttcatcaacatggtcatcatcattgaacacacactccatacaaagtaagatgttatgtgtttgtattataagcagagattagacaataactctaatcacaaggatgctgtaactagtagtgtagatggtagatgtgcacaacaatgaagggatgtttgatggtatctaagttgtgtaatcattaggcttacttgaagagtttcccctaatttttctatttttctttttccttttttttttttttttcaaacagggtcttagtctgtacccaagctggagtgcagtggcacattcctcatggctcactggaggtgcctcagcctcctgggctcaagcaatcccccaacctcagcctccctagtagctaggactataggcatgccccacaccagctcattatttatttttttatttttttgcagaaacatagtctcactctttttcccaggctggtctcaaactccagggctcaagcagtcctctgtcctcaacctcccaaagtgctgggactacagtagggtataaccacatgactaatgtcacatataaaaatggagaacgggtgcacattaaagagtaggtaagtggttaatatactttttctctctcaatcctcccaacctgccctctttacctttatctctccaaaataacatgtttgttgtttaatagagatgacatcgtcctaatctaaggcttaagattcctgtaactcttaagtcacactttgccaaatttttattcaatcactgaaggctcacattgcctctgaaagaaaaaaaaaaagcaagtgaaatatttctgactgtgagtgttcttatattggcatcttagtgtgaacttaggggatatgttagcgttgactgttttctgtatcacctcaggtgtattttgtctttcccctcttgacttcacttacccactcactctgactaatgtcctagcagtggcaagcatgtagatgtctaaaaatgtagaaattgtaagaaagaggctgtttcagggcagcatttggaagtggctattgtgtagggctaaccatatctctctcctgccagaggtcatggccttgttgatggtctctagtcaagagcaatcccattagtgaaaaaaaaaaaaaaaaagaaaaccagcactgacagtgactgcttccaaatattctcctgtctgctactatagaatttcctagtgtttcccatcttgtcaattcctttccctcaccttttttacactgagtgaacaacttttatttgaagtgttaggtactaacccagttctctcaccctttactctgcttccttcctttcttaaatgcttcctgctttgtaaccctctgcagctagtgatacattagtttatgtttgtgttttctcaagaagtgaaactgttgtaggttgacctattatatagaagtacatactcctcagtagaaggcaacttatgattgtagaaactgggtgtttcgtgagaagttgctacttaactgaccaattaggaaaaggggtacagaaatgattgagacctccaaggagatacagattcatttaagttgagtgtactgctgcagacatcattttgaatatctgtattacgagtaaatggtggaaatttgaagacaagtccatactttatgaaagtaagagaacaagaaatttgtttccctaaatctgtgagcataccctataattcatcagaaacagcaaattcacaaacacaaaattgacagaaatatgtaaaacttttccagcagtttacttctgaatacattagaaaatgtgacagaacatagtaaatttcttgtcattttacttcccaagggaagtgctaggtttgtaaatcctagaatatcatcaaattatattttgaaatttatttctttttgagctagaattttaaaagattacatgttttttcacagaatacgttcatccagttactaataatgatgctgaaggaatggaaatgtaatttctagaaatcatcacttttcaaagttttatagtttgtgaactggaatactgaagatggaagtatgatttaatatttggtagaaacaggagagtttgttatttgtagctctgatattagaaattacttgaggtttctgttaccaaacttcacaaaatatatttcataaaaagcattcttaactcaggttatacattttttaaaaattattctgaaaggaattagatatttaacattgtagctgacctaaataaattggagaaaattcttaaacaattatctttcattttcccatcaataaatggagcaataataatacctaattatttattgcacaggagtcttgcaataattaattaaagctttaaagtactttgaagatgaaaacaattttataggcctcattattaaaggtaatttgttatggtaaccagtcaaagtcattcatttggtcttttaaacttgtttttaaatgctctattcggatccaggtgttaattaaaaaattttaaaacaacacttaggaaacatatgaaattctgctttctatcttgatgcttaacttgtgaaataataggtaagttttttttccgaattttgtttttttcatgtttatacgcctctctcaaatcccattgagtgagcgagtattgctcccagctcattattacaaaaagaggtttgccatgttaaagccactaagatttttctttttctgaagctctttacttaatgcaaagacaaagtgtcatctatgataacaattctgcatatggaaaacacaaggttattcatccatttaaacatttattgagcaaatgctatagtttaaaaaagataagccactcggtaaattggaaaatatagtaatatgtcacttgcatgaaatttttatccaatgaaataatcaagtaattaaatttaaggtgaaagtgattgatgtaatataggttaaaagccagtatggcaaaggctgaaacattacaaagagaggcatcaaatgtggttttgggaagcactcaatttttgtgtagataatatcctagatgtacctgtatttcataggaaagaaggcagtagtggtattctagaacagtggttctcaacaagggcaatagtcccctgtcccccattcctgggacatttatcaatttctggaaatatttttggttgtcacaactagggaagtgctacttgcatctagtgggaagctactaaacatcctacaaaacacaggacggcccaccacaacagagaattatccagccctaaatatcaacaaaactgagcttgaggaagtctgctcttgttggaaaacacagaactatcaaggcaccagatggagaaagtataagatgtatatcaggaatagcttggcaggagtagacgttgaaggtaacattgaaaatgctttaggatagccttgattattagattagactacaaagctgactcattgaatcactcacgcactgtgagtcattcaataaacatttatatctcaggcaatacggacagagagatagaagatatagatgctgctgtaaagtttacaatttagttggagacagtcagataaaccacccactgtgtgaacaaagtgatatctgtcaaacaccaattctactgtgtctttaaaaaaagttcaattaaaaataaattttggaaagagtatgcactacatacttctccacaacttgggactatatacaatcttgttttgtgtatcagtttgcctttatttcagccagcatttcttttggcagtgtacttttaattcccttttatataacaactattagcaacccatgacgtattggatagcttcccttccagactcactctggacccttctctgtgctattccaggctcaagatactgatcttcgggaacttcatgctgagtgtccctgtgttcggttcttgattgtgtttggcccaagagggacatttataggagatgagagggtgagaggagacaggggttggggcatttggtccctcaactccctcctccaaatagccaggtcaccacagacttgctgcatccctccactgaaggccacactcctttcagatgccctttcttatagagctaccctgtctgggtccttataactgtttcctctccttatcccttctatctaaagctggcaatgttcctcatctgttgtgagctgtatgctgcttcactatccctctttaggaaactgcctacacatttgtaaaaatcctttattaagcactcctcaaagtgccagtctaggattctcattgttatatatggggaacatgacttgggaactgcttgtatggtagttgcttttaaaaagagttctgcataggaaggagtccgaaaagtttaaatttcatattatgacttatgcacatctattgaagaatgtatctgttagcttatttattcctgcatgtatgtatgtatctgtatgtatgtatttatttattttgagatggagtctagctgtcgcccaggctggagtgcagtggtgtgatctcagctcagtgcaacctccacctcccggcttcaagcaattctcctgcctcagcctcccgagtagctgggattataggaacctgccaccacacccagctaatttgtgtgtggtgtgtgtatttagtagagacagggtttcgtcatgttgtccaggctggtctcgaactcctgacttcaagtgatccacctgcctcggcctcccaaagtgctgggattacaggagtgagccaccatgctcagcctcttttatttatttttaaatgtggtttagctgttccgcaggaccattctgatgttctccatataattccatttttgctatatttggtttcagtgaaaatgtaaggttttgaaaaagtgaagtggctcaagagtcatgctttattctggtagatggatttcaaagacgggaagaaggcatgaggcaaggagacaaacccagatgtacatttaataatgagtaattaatactttattgattatgttttcctttattttataattctaatgaactgacgccaatatttttaaaaagcaagataatgatttgaagagagttagccatggcagggaaagcatgaatggaaaagagattgtgctgttatagtgacagtgcctggaaactcattgaacctgacagtgtagaaagatgatgtgagataggcagggaaagacagtagtaaaaatccaaaatttaacgtacggaaacaaccatgtctgtggccattccactctgaacacgccgatactgtctgatctcagaggctaagcaccgtccagcttggttagtatttggatgggaagaaacatcttcttccccaattcctttttagttaccaattatatctattacttttatgaatgttaagagtctacattgagattagattagcatgcaggggtatgacaatcttttaatggagaaggtaacttctggtatctataaactggagaaaaagtgattcttcttacaagaaataaactgcagatgcaggcactaatagactgaagcaataactctatttccctcttttgatctttgaagtatctatatcaaaaaaatcttcttggtggtggggatatactacatggagatgggccaaagactacaaagagagacttaggtaaaatcttgtctttgtatgaggattctacttgaattcaataggcctgtgtccctaaagaaaaaaaaatgtatttattgcaaaccaatttagcttaagtaaaggtacacattttggggttttattggttgtggttgttcagttaaattatacttactgtactggacaccatatacgccaatcactgttatcaattctaggaatgcacaaatgaataaaatatggtccctgtcttttctattttctgtgaactttctacttacgtcacaatggtgcaatgggaaaagaagaaatggatcatttattcaacccttgataaaagaaagacccctcctagttagcatggtggtagcagggataatctgtaaggaaacctaaatccaatgtgaacctctgaagaaagtgaggatggttagagtaatctagtcttgcctccacatcaggacatacttgccatgaccagcctgggagtgtctattttttttccccattaaagagggtagcatttccttttagttaatactgagattcccccctagaaaggttctaataattgtagtgtaacaaagttagtatcaggttaatatccactttaatgggagaatttccaaaactaatattatcagttttaatgatacctttttgatttacgaaatgtctgttattcacatagtttttgttagcagtcaaaaccaacaaaaatatttgatgaacccagataaatatttgagaaacttgtatgctataacacttcattttaaaagatatgtattttgtcatctccaagttttctttttaaaattgttattccaacccttcttcccctcaatttaccagcatcactaaatgcccaccttatttcccagtagtttatgtgttctctcatattttaaaaaggtttcttgaggtataatttacatattataaaattatttatttatttatttaattcatttttaaatgtggtttagctgttccgcaggaccattctgatgttctctatgtaattccatttttgctatatttggtttcagtgaaaatttaaggttttgaaaaagtgaagtggctcataaagagtcatgctttattctggtagtgtattcaggtgtacacccattttaagtgtacagttcaatgaaatttagtaaatttttataattgtgcaaccatcaccacaatccagttatataacatttcagttaccaagaagtttccctcatgcccctttgcagttaattcttgctcccgctgcagccctaacaacagccactaatttttctgtctctataattttgccttttctagaaattttgtataaaaggaaccatacaatatgtagtcttttgtgtctaattatatttgtatgtttttgaactattaacttgccacatgtattagtactttgttccttttattgatgagtagcattccacatttggatatattttgtttattcagtcatcagttgatagatgtttggattatttctagcatttgcctattatgaattgttctgaacaagcgattatgaataatgatttctcacacacaagtgttatgtaaacatatgtttttatttctcttgggtagatacctaggactaaaatttctgggttatatgataagtatattcttaacttttaaagaaactaccaagctaccacttttccaatgtgtacgtatcattgtgcattgccaccagcaatgtaaaatggtttttctacactcttaccaacacttgatattgttagttgttttgattataatcactctagttggtgtgttgtggtatcatcttgttcaatatccattttcccaatggttacttatgttgaacatatttttatacgcttttgcatatctttttcaatgaaatatccacatcttttgctcatttttatattgggttattgtcctcttggattgtaaaagttctttttttattccaaatacaagccctttcctagatatgattggcatatattttttcccagcctgaggcttgtctttgctttatcttaatggtgtccttaaaagccatgcttgtgtaaacatatgtatccacaaacataaacactgtaggagttttattttgtttttttatcttattaaaatggaactgactctatatacttttcagcatcttgattttctcattcaacattacctcatagaaattcacccattagtttcaatttattatttttaatgactgcatactatttcatggtatgcattcccccactgatgagcattcaatttgtttctaggtttattccacacccccaacagccagtaaaacaataaccacatttgtacccatttatagatccttaagtacgggtgctttttatttctgtagtttcaagtccaggagtaaaatttttggctcaaaggcttatatggttttattttgatttatgttgccagatggctttctgaaacgtatgtgataattcacttttctcccaaatgtgtgggcatcctttctcccatatccacttaagtcagggagctgtccattttcaaaggttgttcagttaaattgttcagttaaatgtgactgggcatttgcattcctatcatgactagcaaatttgggcattttcacgtgtttgctagttgactgaatttgctcaattgttaacttcagtttaaccctttataaatttttcctttgggtgttttgtcttttttttttagaatataaatatatttggaattgtagatattgggttttgtcatttgaattgcaaatatttcttccagttgtattgtttgactattggttttgcttttgatctcccttgctacaagaatttttaaattttattattcctagtcttgaaatatttgtaatatcattactatatattttctaattctttaaggtgggtactagattcctttatttttgtctttctcctttaataaaggagtagtgtcctggaagtgataacatcccagtatcaaacacctagagtccagatcttggtttctgaaggtcatttacttctaaaaagaaccaagagtgcttggagaaatggctgattacaggttgtggccaagaaaaaacaatcagatctgaattattttgtggcgttagaaacaaggaagtactcagagactaatggagggagtcatgttaaaaggactcagaaatcacattcaaggagccactgctggtctactctggaaaaaatttgaataccaaaaatagagaataaataacaatgatggtaaaggatcacaaaacatttgaataaacaaaaaaaaatcttgagtcagcagagatattccaaaaaaatgagagactaataaatgtagggaaaacatgtatatttaagaatcactattgcagctccagtataacatttgattaggcaagaacatggacagaggctaaaattttggccattagattgttggggaacacggtagtctcacaaggatacaatgtttgataaggtttggctgtgtgcccacccaaatctcatcttgaattgtaattccaaatgttgtgggagggactggatgggggtaattgaatcatgggggcggtttctcctatgctgttcttgtgatagtgagtgagttcttatgagatctgatggttttataaatatcttgcatttctcctgctatcatttattctctctcctgctgccctgtgaagaggtgccttccaccatgactgtaagtttcctgaggcctctccagccatgtggaactgtgagtcaattaaacctctattattgataaatcatccagtctcaggtatttcatcatagcagcatgagaacagactaatgcagtaaattggcaccacagagagtgatgtgctgctataagggtactcgaaaatgtggaagtggctttggaactgagtagcaggcagaggttgaaacagttgggaggactcagaaaaagaaaggaaaatatgggaaagtttggaacttcctggagacttggagggctcagaagacaggaatatgtgggaaaatttggaacttcctagagacttgttgaatggctttgaccaaaatgctgatagtgatatggacaatgaagaccaggctgaagtggtctcagatggagatgaggaacttattgggaattggagtaaaggtcactcttgctatgctttagcaaagagactggcgacattttgccctagaaatctgtggaacattgaacttgagagatggtttagggtatctgacagaaggaatttctaagcagcaaaccattcaagaagaagcagagcttaaatgtttggaaaatttgcagacttatgatgcaatagaaaagaaaaacccattttctgggaattcaagcctgctgcagaaattttcataaataacaaggagccaaatgttaatcaccaagacaatgaggaaaatgtcagagaccttcacagcagcccctcgcttcacagacccagaggcctaggagagaaaaagtgttttgtgggccaggcccaagcgccccccagccctgccccccggcagccttgggacatggtgcccagtatcccagctgcgtcagctccagccttggttaaaaggagccaaggtacagcttgggccatttcttcaggggtactagccccgtgacttggcagcttacatgtggtgttgggcctacgggtgcacagaagtcaagaattgaggtttaggaacctccacctagatttcagaggatgtacagaaacccctggatgtgcaggcagaagtgtgctgcagcggtagagccctcatggagaacctctgttggacaatacgaaagggaaatgtggggttggagcctccacacagagtccccagtggggcactgcctagtggagctatgagaattgggacacaattctccagaccctagaatggtagatctactggcagcttgcaccatgtgcctggaaaagtcacagacactcaatgccagcctgtgaaagcagccaggagggggcggtaccctgcaaagccacaggggcagagctgcctaaggctgtgggaactcatctcttgcatcagcgtgacctggatatgagacatggagtcaaaggaaatcattttggaactttaaggtttaatgactgtcctattggatttgacttgcatggggcctctagctctttggctttggccaatttctcatttggaatggatgtatttacccaatggctctaccccattgcatctaggaagtaactaactttctttttattttgcaggctcataggtggaagggatttgccttgtctcagatgagactttgaacttggacttttgggttaatgctagaatgagttaaaactttggggaacctttaggaaggcatggttgtgttttaaaacatgaggacatgtgatttgggaggggccagaagtggaatgatatggtttgggtgtgtcctcacccaaatctaatcttgaattgtaatcccacgtgtcatgggagggacccagtgggaggtaattgaatcatgggggtggtttcctccatgctgttcttgtaagagtgagttctcatgagatctaatggttttatgtgtctggcatttcccttgctggcattctctctctcctgccaccctgtgaagaggtgccttcctccatgattgtaagtttcctgaggcctctccagccatacagaagtacgagtcaattaaaccatttttctttataaattacgcagtttcaggtatttcttcatagcagtgtgagaacagactaatacagtgttacttcataaattgcttactaatcgaaaaggggaaaatgtattaatacctttaagatagaaagatctggcaagtagacaaacttaacgttgcaagtaatagaacataatattttgtttctcctctgctatgcagtataaagtacctaaatcattaccaacaaactatgcttaccaaaaatgtttattctaaataaagcatctactgtggttctcatttatatagtaagtataggaattagagaaacaaatgaagtagcaccattatgcatcaatcagacaaatccatgatttgggacattctctaagtcaactaatttggctcttttagaaagtgaaagtcaagagaaaataaaaatgtaggaggcatggcatggtggctcacacctgtaatcccagcacttagggaggcagaggtgggtggatcacttaaggccgggagtttcagatcaacctgggcaacatagtgagaactcgttctcttaaacaacaacaacaataaactcttgccagcagaggtgtgctattaaaaaaaaaaaagtaagagaactatcttgattaaaaatgatttcagagaaataatctttattgcaatatgagaatttttctttgaatactgaagttgtttttaaagatataaaatttattttgatgaaaattgaggaaactttaatatggactgaattagatgacatgaaattattattaatttttaacaattgtgataatggtattgtacttatgtagaagcatgcccttattaggatatgtgtgctgaatgtaggctttaattgctgcaaaagtcttcctcatgtaaagtcaaaattttttaggtactaactattggtcttcgttccgccaactggagttaaaagcatcagttgatactgtcacaagaaaattatcttctttgtattagtaaaataattaaaattaaaatgtatatatacaaggcagagaattacaaaatttgggtatcaatactactatattaattttatgctactatagtatatgcccttttagatgtttaatatctgctaacagatatgtttaggtagaaatgatgtatatcaggtatttctcaccatttagatgccatgaagttgctgtgaattaaataaacatttgtttggtaaactgcagtaacctattttaaagtgttctttaaaaggtatgtataggccaggcgtgatggctcacacctataatcccagcactttgggaggctgaggtgggcagatgacgaggtcaggagattgagaccatcctggctaacacagtgaaactgcgtctctattaaaaatacaaaaaattagctgg

SEQ ID NO: 3002 - DNA, 5061 bp, Homo sapiens
cagggaattaatgcaaaaaggctcaagcttctgtgcccctgggaaatggcagaggaagacagcttcagcctcagagcacacagcactgagttgtaagaaacaggtctcatcatccccttggccagcagattttcaccctgggcccactaagaagcctgccagggggtcctctgttgtctggaccctgaggcttcatcctcaatgtgttggagcctaggagagaggattagagttatgcgagtttcccaacggtgcagtctctactcaccgcaacctctgcctcccgggttcaagcaattctcctgcctcattctcttgggtagctgggattacaagcatgcgccaccactcccagctaattttgtatttttagtagagatggggtttctccatgttggtcaggctggtctcgaactcctgacctcaggtgatccgcccagctcagcttcccaaagtcctgggattccaggcataagccactgcgcctggcctgtttctattttcttttgccaggcaggttatgttatactggggtttcttgctgaggtctgtcctgggactgtctgaggtgtcacaaagagcccacaggtacagacgagaaatttgaaagtgaatccagacgcagcagatgacagcaagatgggactccaagttctctttctagaaattacaagctgctccgctacccacacatgtagctcattctccctgtggccaagacactcctgtgcctgagggaaaggcaatgcctgcggcagaaacggagcggtcccccagccaggggagagagtggcacctagtatggtacccaatgctctaaggcatggagctgattgactgctgactgtagaccagccactcaccacagtgtaggttggaagccttctaaggccgtgcgttctgcagagtcagcccatgatggggccaggagtgtgggctccagtgtcacccccttgggatttaatcctggctgcacctctgggggccttgggagagtataagggaaagaaatagtcccttcctttctttggagagaaggaatccacaagctggaaggagggaccctggcacgaagaaaggcacaggcccctccataacttgtttctaccactcccctttgagggcccctggggaaggttggttagtcttgaatctgtgcccaggagaaaccaaaaatccttagtggggtttctccctgtcctaggcctcctgtcagagctagcggagatctgctggaaggaggccgggaggaggggatgtacggatgccatcatgcctggatggaggaccagaaggtctttataacaagtatttgtggagctcctaatatgtgccaaactgtggtagacctggatacccagaaacacggccactcccctaaaggaggttgcaggctataccaattaaaataattatctcagtcccttcttatcaacagagtcgtccatggagactatttctccccctgccccaggcacacagaagccttgaggctttcattgtggccccacggtgacagcacacccaggtggcactctcagcttatcactgatttgcagagctgctgtcttgcagctaaaagcaatgtgctggtggatttttaaaaagaagttctgagaggcttcttagaaggtctttctccacatcactaactattcggattccggagcacggtgccaagcccctccatttactgcagccttgcccttcctctcaagatccagccgctaatgctatgggatggctggtggccccacttgggctcccccaacccccacctcgacccctagcttccgcctgtttggagctgttatcagaggaaacagacttgaacatgacggagttgctgtctcttgggcctgaccagagagttgtgttttcttggcctatatcacctcagatttatcctcggcctgaccgcagtcattatcagctaaattcaccatctctagatgcccagaagatttcaaaagtggactataggctgccagttggtgttagagttcagagaatccctggacttcagcactagaaaggagcagctgctatgtcgggggtgtcaggggctggatgcaggggctgttgcactgatcccagcttgctccattcacaagcccctcatccatctctgaagactgggaccaaagccagggctggggcaggcctctctgggcacaggggcctgttagcattggtttcattccttcaccaagaggcctaaagacattggaatgatgaggcaattaatgtgaaacagaaacaagtggctttagttccaggcatttgaaactgaaaggaagctgttgacattctttgagacccactctaggctatgatttttgctgtgctagccagaactctgctacttacttgaagtaggaccttgggaaagtcccttctctaggtctcaatttcctcatatgtaaaagtgcatctgggattagtcaagacccttccaagcctgacatgctatggtctaagtgtcccagtaatctctctgtcacccagggatcaaagatttacagatgtgtaggagagatggggaggaacacactaagatatgtccttgtgagtttagttaactaaaagactgggggaaagaaagggaagtaagaaaataaagtgaaaaggtggaagaaggcagagtgtaaaagagggagataaggaaagtacaaaagatagagatgtctgctgcaatttctcagtactcttcagatacatcctggccaggtttactttcttaggggcagggtagattgtgagggtgtggaaaatggtattttttcaaagagagtcacaatagtattgccatctcacatgctgttatacaatgtgatcttgccatttctctaccaagataaatgcagtctagtttctctccctttaaatctgagctggccgtaagacttgcatgaacaataaaatgtggtggaagttattccaagtgacttctgaggcttggtcagaagcagctttcccttagttactttgagacatttgttctgagggaagccaatctgactacctgaggccattgtgctggagaagccacacattggcattcctgttgacaatcctagctgaaccctgccttctaatcatttccctcaaggcttatcaaataagtgaatgaagctatcttggactctccagaccagcccatgctgcagctaagtattactgatcaatttcactttataccacagggagcggaagaatcacctagctgagccctacccaaattcctgctgtgtttgtgcctagattttttttataaaacaaaacacactggaacaggatggcaggagatttttttgtttttgttttttaaacgcttgtttcaaacagcaatgaaaaatccttaaaaatgtataaataagacttcaagattttagaggtgtgaaatttcaaaagaaatctggaggctgggcgtggtggctcacgcctgtaatcccagcactttgggaggctgaggcaggtggatcacaaggtcaggagatcgagaccatcctggctaacacagtgaaaccccgtctctactaaaaaatacaaaaaattaactgggcgtggtggcaggcgcctatagtcccaggtactcaggaggctgaggcaggagaatggcatgaacctgggaggtggagcttgcagtgagccaagatcgtgccactgcactccagcctgggtgacagagtaagattccgtctcaaaaaaaaaaaaaaaagaaatctggaagccaactttcaatttgcccattaaggactttagtacaaaactaccatcttctataggtcattatatcgtttttgtttttgagacagagtctcactctgccacacacattgcagtgcagtggcgcagtcttggttcactgcaccctccctgtcccaggctcaaatcgtcctcccacctcagccttccaagtagccaggaatacaggtatgcactaccatgcccaactaatttttaatttttttttagtagagatgaggtctcaatgaagcagtgttgttgcctggggtaaatacccgggttcatcatctcgagccaagaagattaaggacatgaacacacatgaagagtaagtttaggagcagaggtttaataggcaaaagaaagagaaaggagaacagctctctcccttgcaaaagagaggggctcccaaaggggaaaacccagcctgcggtggactacacccgattttataggcaagcttgagaaggcagtgtctgatttatgtagggttcacagattggtttgaccagtatgatgtttacatagtattcacggaaggctgcatgccccaccctaatcttattatgtaaatggagtctttgcctggctggcgccatattgtcttctccttactgtacatgtggtttgacaaagggaagggaagatgaagctgccattttgaacatgcctagtcccaggtagccttttcctgttggcacaactgctggcattcacctgtacaagcttccagcttgcttacctatgtctgcagctcgattttacaggctgctctttgtagaaaaaaaaacaaaaaactattttgagactgcttttcatgaaaagaaaaaccttaccaaggactcccagaccctcactatctgcctaagtaatttcttcttaactcctgtatcattactatattgcccaggctggtctcaaattcctgggctcaagtgatcctcccaccttagcctcccaaagtgctaggattacaggcatgagccactgtgcccagccatgttgtattttttaaagtacagtttatcatgaaaaagggagaaaaggtactacatccaaccagaatggctaaaatgaaagagataaacactatcaaattttgacaaagatatgaaacaaccagaactctcatatatgcctggtggcagtgtaaaatggcatagccactttaggaaatagcttggtagtatccactaaagctgaaaatatgcatatattcaattgtattcttaagtatatatcctacaaaaatttatgagcgttttaaccaaaagatctgtgtacaaatgtccatagcagtaatcttttctt

SEQ ID NO: 3003 - DNA, 5231 bp, Homo sapiens
gcctaattccactgtgtaacttccatgcataacactcagaagccagttaagtacagtgctgaagcaggacaaaaaataatatccaaagatattttggcactaacggcgctatctgtagcaagaaagttgagcagtgtgaactgttgagacttccaaggagacttcagacaaccaagacagtgtaaaggaaaacagagaaaaagacttgttagacattattaagggcacgaaagttgaattgagcacagtaaatgtacaaacaacaaagccacccaacagaagttcacttaaaagctacaactggcgggcctcaaagagctttaggacatgctccaaagaagagaaatgagcccctgagtcctgagttggtggcagctgcatctgctgctctgttttgacaagcaaacaagccagaactgctcaggcagctccgtagcatgaggaagagtcaggggcacagagagatggagagagacctagttaggtaagtgaatcaaaccattaggttagtaatgtttatatctcaaaataggccattttcatgtggctagtaagtaatacacataatatataccacataagtggaatttacatatagaatataccatataagtagaattttagcaattcaagtttttaaaaaacttatgtcttaagtaagattatagttttaagagaccaattgaatagttactgtccttttaggaagttacagtttcttgtccatgaaacaaggaatgataaattcagtaatgttattaaaaataacagaataagatagcttttctgagaaaagtaatttttttttcagttaaatagcttgctggttttatgcatggtatagcaatcttcaggtctgtttccttctctttttcctcctattcttatgtttaagctgacatctttccacttactctcttcatctctcattattttatgctacgttagactccttgctgcctacattgtagtaagtggtaacactgcttcattttggagagtgatctaaatctgttattcccaatgagcgtgtgtaccagatgtatttcgggaagttaaaagaaatggccatgtgtggtggctcatgcccgtaatcccagcactttgtgaggctgaggtgagaggatcacttgaggccaggaatttgagaccagtctgggcagcaaaacaagaccccatctttacaaaccataaaaaaattagctgggcattgtggcatgtgccggcagttctagctactttgggggctaaggctggaggatggcttaagtccagagtttgaggctgcattgagttaagataggcaccactgccctccagtctgggcgacagcgagagaccctgtctctgaaagaaattatatttaaaaaaaaagaaaaccataaatatctgtactgtcagttcagtgactcattttgtttgtgtttgaacaaatacaagggcaataaataaatacatctatcttggttttaatttagttattgaatataggtgataggcatacagatactgattgtactttctgttcattttcttggaataatttttcatgtgacacttttatgtttgaaatgaatatttctgaagaacatctttaaaagacaagtaaacaaaaattgtaatgttctgttatgtgaatgttaatagatgactttttaaaatttaatttaaacataactttgtatgctgtataattagtggataaaaatgaaataagaattaaatgttatcactgtcctgtttcagaaagtttattactgttctgtagctaaggtttctttatttttttatttttttggagacaaagtttcactcttgtctcctcggctggactgcaatggtgcgatttcggcttactgcaacctccacctcctgggttcaagcgattctcctgcctcagcctcccaagtagctgggattactggtgcctgccactgtgcccagctaattttgtacttttagtagagaggggggtttctccatgttggcctggctggtcttgaactcctgacctcaggtcatccacccgccttggcctcccaaaatgctgggattacaggtgtgagccaccgatcctggctgtagctgagatttctaatgcacttgacctttttattatttcagtttcaataacaaaatatcagatatgaaaattgccagatgtgctacagctagaattaatataaggccagagcatcagattcagtttgaccaaggctatgacaattatcctggcctggagaagactgctgatcttagaaacaggtatcaggctttgtagtctgctgggttttgtttgtatagtttggttttaccttgactgtagatttaccttattgtgggtgtgtatgattgctgttggatatgtgagcattatgaatgcatttacatctgtgttcttactctctgtataccacttcctagagagggaaccatgtgctggagttagccagtcctgcatttttctataccttaaatcaaaataggccatgcttcatatctacccatgatgaatagggttcctttgatttagaataaatagagctgactgaattctgaacaagtgagtattttgtaagaaacattatttttcattttaaatatcaatgcctaatactgtgtattcatttaccctttatatctctatacatgcttatcttttgttacaccttagagaaatgacccaccatcaacgaaaagaaagaaaggcgtaggctgggcatggtggctcacgcctgtaatcccagcaatttagagggccgaggcaggcggatcacgaggtcgggagttcaagaccaacctggctaacatggtgaaaccccatctctactaaaaatacaaaaattagccggacgtggtggtgagctcctgcaatcccagctactcaggaggctgaggcaggagaattgcttgaatctgggaggtggaggttgcagtgagccaagatcgtgccactgtaccctatagcttaaaatggtagattatttgtggctatttgaaattactgaagttcttaaagatggtgagccatgtcttacatagttattttagaatctaaagttgttctgtatttacataaagtttctattctttctctcctttaaaccctgaaagtggtagttgagaaggaggagccagatatttggcatggtctgacaaaagttaacgtgtcttttatttatttatttgtttatttttttgagacggagtctcactctgtcgcccaggctggagtgaagtggcaccatcttggcccactgcaacctctgcctcctgggttctagcgattctcctgacagcctccccagtagctgggattacaggtgtgcaccaccatgcccagctcatttttgtatttttagtagagacagggtttcaccatgttggccaggctggtaactcctgacctcaagtgatctgcccacctcggcctcccaaagtgctgggattacaggtgtgagccaccacgcccggcctaacctgtctttatagcaggatatgctcacagttggagtgttttcaatacattgtgtattccgtggatttgttttaagtaaaatcaggcacttgagttaactccttctgggtgttaaattagtgatttatacaggaaagttggaaaaggtggttagcagttaacacaggaagttcaagagtttatggtgactttggaatattatttgaattactaatttaaagtgatttagtatctgttacatattattgaataaagtagaaagtgttcttggagttttacttaagaatgtttaactgagtcagttaataccggagaaaatttaactgaatcattcagcttgcatataatactgtgcagctacatcgggatggcatatttgatttttaatattagatttgatatttaatattttaaaaattaggtggcaaaggagaaactaaaaaagtaggaaaggggttcctgtgccttcagtgtgttaaaaagccagctaaaggggagtaaggggaagcaatggtgagatgccaagttgttcaccctgatatgacttgggcagggtctggggtatcaaccccagacaacccaggcctggacttattgcttctgttggaaattgacagttcacactggcctttctcagaatgttggcactgccactgactaattctgtgaccggggcaccttttatagcctccatcagcctgtttccccagctgtaaaatgctgaaagtgaaacctagcttaaatggctttcttgaggaatagaaaagaaaccacgtataaactctctggtacatagtaggtgctcagcaaatgtccattccctttctctgttgtgcattcctcttttgaagttcagtgctttaccaaggcatttcctctctgccgtgacttgctttaatccaccatcctgttcaccggacgttcggttgagaaagaagaatgcaaggcactgaggaaagttctggagcagaaaagcctttgtttacaaataacttgggaacctgctagaggaaaacttgtatgacttgaaatcacattacttaatgttcatatgatattttcattttttccggttctatttagtagagaaaagtagtttagtccataaaaaaagaatttagaattatttttaaaattagccctccagtttataaactggattttaatctgccagtaagtttattcaagtaaatatgtaaattgatgcataaaacagttgattatcaagtttgcaagaaaatgttacctgttaactctgatattaatttcaatggttaaaaagtcatgtaaagaaagttaattattttacagaatgattgctttatgaaagggaatgttgtgatttacctatataatcttttgtaattataatttgtaattaaacattgcagtgtttcctgcccttaaaaacaagtgttgactctttttaacagcttcttttaattataatttgtaattaaacattgcagtgtttcctgcccttaaaaacaagtgttgactctttttaacagcttctttttagcatagttttataatttttcacaacatggagtttttaaaacttaatataaaagggaacaaataaaaattaatgctaattgagctaatcttttcagttggatattttggaaattaagttgctgtaactgatttgttgtattatgaagcaaaacttcaagtgcacatttctgtttttagtctatcagtcctaaaaatgtggcaatttagctaagatgtttgatgtacgtcagtg

SEQ ID NO: 3004 - DNA, 4875 bp, Homo sapiens
ctctacccgagaagactctagttgtgagatctaacaagtataaatagtcccttatcattgacattttgtgaaaatgggcaactcttcaactttgagaaggtatacttgaggccaacaacaaggaacacataatctggtctcaggaaacattttgcatcatctggtaaagggatttctgcctcatcagattacagactacatgtgaagccttgaaggatagctccaaggagatgcgtgagcacaaggcagtgtcctcacagtgagctaggaagaggcttgcactgtcactgccagtccgtttgtgcatcagagaaggcctaagcgtaattgagcagtcattgctgtctcctccagggagaggaaccatcctcctcacagatggctgaagatcttatgaagctgaacctcccaacaaatcctcatatttcgatacaaataagaatatgattgtcaatattcatacaatgttttaaaccttatgtagcaattttgcacattcttatactctttcagaaatagtgtgggttgtgatgatagatttgggtttgaattctggttaacctgttggctatgtgatcctgggtgagttacgtaacctctcagaacatattttctcctctataaaatggtgatggtgatggtgctagggtcaaaatgataccaccttatgggataaggattggatgagagaaatacctagcttgacccataagaggcactccatttccttcccttttataaaggtggttatttgcatcagtagacctcagatttccacaatagttacatgtttatataggtgatgtgttctcttcaaacatgtctcatgttacatggtgaatttttttttaagagatagggtctcaccctgtcacctaggctggagtgcagcagcatgatcctagctcactgcagccttgaactcctgggtttaaaatatcctgccgccttagcctcctgagtagctgggactacaggtgcatgccaccacacttggttaattaaaaaaaattttttttgtaaggacagggtcttgttatgttgcccagtctggtcttgaactcctggcctcaagtgatcctcctggcttggcatcccaaagcactgggattacaggcataagccaccacacctggcctcccagtgattcttaactcagcaatggggcatggaggcgttaatatctgtattgctataaagcacccctgagcctccagactgagaattgtcagtctacagtatgataccccaagtatctctcatgagtttgatatttttgtgataccttattcttcactcttagtaggtttatttcaataaagtaaggctttgcttatatgggagggcagtgcattaagctaatgcaaattatagttgataaactaccttctcatgtatcgctgaatgccagggagcatttttgttgggggcagtgctggcgggagttttgatggaagtaatagtagagagatggagagtacacaagacctagaggagggttgattgaaccataaggaaaaacagataaaagggaaggtgagaggaattgaagacaattatcatttttctcatacagcctcatttagcaggctgagacttggctgtttcgggagtacctgctgcctctcactagaaactgccatctttatgctatcaccctgtctctcatccagtcttacctacctgaggtataagacctggactcaccacttgagttatacatggctacctgatccatctcttcaaagtcatattaaatactataagattctcagatttaatctgtcaaaacctaaatagttctccctataatgatacacgaatggttacaaataaagtttggaaactgcaaattagaaaactagagagaaaggaagtggttccagtctaccatgagcagctcataggctagatgaactgaacatagcttttggtttgttctaaggaaaggatataagaccaaagtgtccataaagttcttatttaaagtaacttttagagtttggggtaagagatctttcaattgaaactactaagaatacttcttaggccaggcaatttgaattgatgagataagataaagctgaaggtcaaagttatgactttgagaagagtcaaggcaatgccatcatcaagggagccaatcttccagtagacaggggctcctggagtgagaactacagacctgctgtttccaggctgcaaattaattgcattggcccagcagacaccatcagtaaacaagcctgccagggaatatctacttgatcctctttcacagagcaaacttccaagggctgcctgggtcccatccttattttgttatcatcttcaagtgagtccaagtgcacagcaatgaaaaaaatgcatgtgtagactaaagaaaagagtaacataacggtgcgttggaccatgaagtgatagatagcttcatgaggaaagaagaattttggagggaccttgattatgggcaaaatttaaagaaagatgggagacagcaaatgtatccatacttctggaatgttttagcttttggcacttaggtttgagcatccccagatgtctgtggtgtacctcataatctggtccttgcagttgggctgatgtgataacatctgttatctaaggtatctactgtgtgctcatggacaaggcatctgtttctgtgactctgtttattttcattgatgactcccatattgaaactcctgggaatgattccatgaaagatgaaataagccaaggttcgaaggagcaaacagttcaaacacatagtaatatagtgggaattagagcagcctgatggatgtgtggagacttcaccagctggaagcagactgggaattacaagtttcatcaacagaaccaaagcacatgacatacgccacagggcagaatccttattatgtaataataacccctgcacacttctctcccccagttaacaatgcacagattgaggtcattgtgtatttacaacctggagatagctgacagcccatacttcaccttgaagtttgacttgtctgttccctcaaatgtgtcgacacttctgaaatgttttctcctttggcacatcggtttgaacatccccagatgtctatggtgtacctcaaaatctggtccttgcagtcggggtgatatgacacatctgttgtctaatgtacctactgtgtgctcacggacaaagccaaataattaatctgggccgggattgttcatgctttcacagttcggttcggcattgatctcttcttgcagaaggcctatattgggaccaaactgggaatgcaacagggcaaagttggtctaaaaatcctctgggaattttccatttggcaattaaattttctgtagattacatctctctatcaattaccagtgtggcttttataatgttataaaatctgagcatagccagttacatttcttttaccctgagtctctgggtctttatctgaaaaattaaaggactagaaaagatgactttgagttttttacagctctaatgtttgagaatttaataatttctcagtagtgaaagtcagatttcttgacaatatagcaattagtttgtccacctgtatgtactctcctacatgtatctgcctgaagcccattgctactggtatctcccaagatggaaatgtgccaagctggtataagcccagtggaatttcactaagaaactagacccagccactcagcccatactcacagtcttatctttcctcccattcatttacccattcactcaacaaacatttattgaaggcctgttaagtgttaggtactaatctttagaacctgctctatggctttttagtccatcttcccttcactcactttttttgacaaaccaggcagacaatggtgtaggaaatgtatatttaatcattctcttgaacgatcagaactctaaaatcagttttctataacaacatgtaatacagtcaccgtggctccaaggtccaggaaggcagtggttaacacatgaagagtgtgggaagggggctggaaacaaagtattcttttccttcaaagcttcattcctcaaggcctcaattcaagcagtcattgtccttgctttcaaaagtctgtgtgtgcttcatggaaggtatatgtttgttgccttaatttgaattgtggccaggcagggtctggagatctaaattcagagtaagaaaacctgagctagaactcaggcatttctcttacagaacttggcttgcagggtagaatgaagggaaagaaacttagaagctcaacaagctgaagataatcccatcaggcatttcccataggccttgtcaactctgttcactgagagatgttatcctggtgcccgatagagttctggctctctgtgctgaggcagcagccaaagagacagaatgcttatttgccaatgactaatgtgaggaagcagacagatttgttggctcccctctttccaggcccttttctactcaaaaccagggtttcttagccctgacacagttgacacttcggattgggtagttgtaatggggagacgtcctgtacatggtaggaggttgagcagcatccctggcctctatccactagttggtagtagcactgtatcctcctccactccctcattgaggtaaccaaaattgtcttcagacattcccccggagatggggggcgaaatcaccccagctgagtcccactgctctagatgctattgaaaactgaggtcttagctgtccacgcaggatggaaaggagaagcctcagagcttgtgatgacataatgccatatagacaaggtgaaaggtccttccctggaccattcacggatgaacatcatctgagaaataaacccgcatttgtttgtttaaaaagaaggtgc

SEQ ID NO: 3005 - DNA, 18701 bp, Homo sapiens
gccacccgcggccgcctccgccctgcgctttgtggagccggagcccagtgacaggcgacggcctcttgccgccccggaccccgggcgcttacctgtggctgctggggtcggccgcccgggaccaggctgggagccccgagaaacgcttcgttaagggactcaggcagtacgggaagaacttcttcagaattagaaaggagctgcttcccaataaggaaacagtgagtacaattggactttatgtaacttgattttttcctctttgctcctgctgcctctccacatttgatcttatgaaatggtttcctttaaccctgcgctgtgctcagactcgggctggcctccagaattctctccgttttactcccttgacttttaatttgagttcataatttttagatagtaaagtgacagattatgcttatccgcctggagaacatagacttctgttgtaactctgagaacagaaaggtctttgggaacagagggttagttgtgggggaaggattgttggagagttaacatcaaattttaaacatagtggctggaataggaaatagcattttatcactagtttgaatttggtaattggcagaaatcatcaaccaaaccagaggtttgtggcttattatactttgagttctgggggattttttccatttttcaatgttgctctgttttgaagaggagttttaactctttaatattctatccctgagagtttgcactttccactggacagatgtacaaggggatcttataaattgcttaaatggagctttacaaaaaactacttagtatttcacaaagctgggggtcagagctgacaaatgtgcccgataaacgtgaggtagaaggatttgctgaggaaaatacagagtgaaattatatgaagagaatgcggggaagggattcattctcatttccctgtggttgcctccctcctcatctccttccctggtggtgtagaggcagatggggagagagtcttccctctggctaggccacgggatagggcagatgggatggagttggagcagccactccactgtctgaaggcgaagggaggactcattaaccagaaacactcttcaggactttgggaggagtgatccatgtttaatctgcctagacattgagctgcttttttagggagtggaggtgggagatggatgcaagaatatctactataaaagtatgcggataatttgggttttttggcttaattttttaattggatgttgtttactgatttcctcttgtttaattctgtctttttaaaaatgagctgtttttctggacacttactgtatagtacctcaaggacagtgataactcatggggaagaagggttttgtgatttcaagtatagtcttgtatatataaatggatgatttgcatcagtcaatgacaattaaatttaagtattacgcatctcatatgctaggatggatcatattgagaatggtaaaaaacagagagagagaaacctgtttatgaacattaaactaagatgtattatgatgccaatctatataatcaacttatttcttacccttcccagaacagggtagagttatttaatatggaatattgagatacatattttaagttttctggggatttcagtgacttgaagtttgatatgattaaaaattaaaatgcctttgcccgagtgtaggaagtttggtttggctgagtaaaaaagagatcagtgagtagatttctcctgatcgctcagattgtagcctctcaagttctctgtctctgctctgctaaaagttgcaaaccatgaagaatttgatacagaactatcttgacaattattttatctttcagttttaaaaaataaattcataattggaagattaagcattaaatctaaattctaccatctggcatttggaaatgctcggtaattttacttagtgttttatctccgtagtggaagcagatgtgagtaacctttaacctagttaagttcttctactatgtttttctttttgctcttgattttcccttcttattgatgatgtgtgactccgtaaataaatagccttttttctccttcagaggcattctcagtacaccaaccttttgagctagttctctggttgtcttttccactagcctctttgctgagacctttccccatcactcctccgccttcacagtttcccacgctgtagctcttctcccttctctagcacccagcagttttcctatttccaaagtcttcatcagtcaccatcattggaactaatgagagagttgtttgcagcaatggaggatttattatgcctgacatttgctaaatattcatagtgtccttgctgtcttttgcattgcactggaggagtttggtagtagggtaaatctgtaagtattataatgagctgggagaggcactcatcttgtgttttcttattttctctagttatcaacatagccaagctaatcattcacagcccacagggaggggagggcagaggtcattttttactttttgctgcagaagatgagatttgcatgtaccagtgttgttgattcagaacttgctgggtagaattcttatagtcatgccccttttgatagcaaatccctctaatatagatacttttcacattctctctctctttctctctctctcttttttaatgagacaagatctaactctgttgccctggctggtctcaaactcctgggctcaagtgatcctcccctgaatagctgggattacaggtgcacgctaccatgcctggcttacattttcttctgtctaccagaattattaactcatttctttgttattcgcaagtgacttggaacttgagaagggtgtcagcatccaaaagaacatgcctgattgggcattggtgcaagggtcagcagacctgtgttctattcttggccttactggtaactatagtacttgatgatctctttttaattgtgcagtctgccttgagctgttcattggaaagctcaggtcaaatcttgacaacactgggaagttattttctgtaaaatggtgtttctctgcatgagaattgtgtaggtgctgtggtcgttataaaatgcctgtacgtcgttacttgctgcagtgcctgagaacgaagtgatgattcttgccttctctgctacttacttgctctggaaccttaggcagattattcatcccctctgtcctttaatttctgcgtttgtaaaatggggtgataattcctacccttttgattattttgagaatttaaatgagataatgtttgtaaagagtgcatagaaatacttggaaatgattgttcttcctgtctaccttaaatactacataaggtggtagctaaatgctttgaaaagtacagaattcctttctgcttgtaaatatactgagcctgtataaaaataagttacctgtttttcattaatctgtcttgccaaaaacttggagggcagcaactagttaacaacgtccgtcttgaagctttgttgagacctcattcttaccagttcattcatgcggttatagcagagaagggttcctggtgggcatagacgtaaacagctttcctagctcttttggtttctggtgtttattgcacaagagctaaatctggcttttctctgaacactgctgcccactgaagtgggaatagtggctgtgattgcggaaaacccaactgtttatagaggcttagttgaatgggtattacgtgttaacctcagggtacccaagagaataactacaagtcaaatcttttagtgtcatggttgtgcaaatatcctgtagtttattatactttttcccattctctgtttctctataaccatttacctcccctcaatatgcttataaagtatataattagtaggtgaaatgtagtcaggaatacgggtggagcattttagattcaccttggctgtatacctcttctctgtcaagccactgtttgtcataaaccacatcagagtcttaagtgttagtatatttgtataagtcacagagcgcccggtgtctgaacttttgggaggacagtggagaactaggcctcttgattctgctttgagccctgccacttattgttgggtagatggatggtacatgagctttgatgttaaggtaatgcctgaaaaagtaggaggcctaatagagaatcttaattacctaaaggtgaatccatgttaggaataacacaaaatcgtggatgatccaaaaataattttttgtttgatttgtctatacattgcagttttcttcaaaatcatgagataattattcaagcagtggtgacatatctcttctctgaggacatatcagttatttgaaccaaagactttttgtgtctggcacctggatgattgtcccttgaatcctggcctttgtttatagctgtgtctcctattacttagacaaattcagctggcactgggtcgtagtccaggagcgcttcctcagtgacctgccgttgcttgtctctggtgcaactaagattggtgagaagacaatgtgatctaccccagcttggtagccaagaggtgttcccaaagtgttagcccctggagggagatggaaggtgaaaggggacatgctttggctgtctttctcgtctctttctttttatttttgagcacctagcccagtgaagattaagcttgtgtcatttgtaatcccagttggtggtgcattgacacttactacactggaaactcattttcattcacttcccattatcagaactaaattttgtgtatagttcaattttttaaagttctgggtgcccactgagcactgcaatgggtagggtatctataaagagaagcaaggtgccatccctgccctgcagggagccagcacgacatttacatacctgccatacttggtagaatgtgctgagggccctggtgggtggaggttcaggccccacaaagtgagcacagaggctcctggaaagctaattggaggggcggtgtttgaactgggctttgaaggaaggattcatttttgacaggcccaggttgggagggtagaggaaaagcaactttccagccataggaaatactatgaacaaaggcacggagacaggaaattgtaaaacgtgcccagcaagtacatgagcatggttggaaaggaggttgcataagcggatgcagtagaacttgggcccaaattatagctgcagggtagattttgggggaccttgaattccctccaaagaatgtgtatgggtgagtgtggggatgggacccatttaaggcttttaagaagagaagtgagggctgtgctaccgaagtatgtataggatgggaccaaagaggaggctcttcttataatttagtcttgtaggaagacagatagggacttgaaagttcaaagttaatgggaagggaagcctgccttctatcttcattttctctattggaaatgtgtcactgtttggcaccaagggcccagtgaaagggcagccagttttgacgtttttaactttaagtaatgggatgaaaggtattagagatttaaatttttaatttaataaataacatgaaaatcaaccacctttcttagccacatttctgggaatgaattctattaaatacgtacgtaactactggccattaactgtacttttttcttcaggcaaaatgtcatttgcatagaccatattcctgcagcagagaataaatgctattgagaaagggctttaagactgagtaatcaggtttctgttaatattaagaggttaaaaatgattctagtattcaatatgagcttccagcctgaagttttatttaatttcaggttataaccttaaataaacaattttcctagcctcattaatgcttaatctaatgttgcataacaaagtatggacttccttagtcggttgatgctactgagaatgtgcaaatgtgtcacggccacataccagtacattagaagatctctgtttttaaaccttgtccctcttctacaaacgttgtctatcctcactgctcacagtgtgctcctcaggccagcactctcatcactggttaaaatggaagattctcaggccctgtccttgtctcttgagccagaatctgcattttaacggaccccccagaggattccaaagtactgtaaagtttaggaagcaccgctatttacagtaatgcagacttgcagaattctgagcctgcatagtatatcattcttaaaatgatactgtctttattctgttaaaattgtaaagtttcactattagggcttgattttgtttttctaattattgcaaaatatttcaaacagaaaagtatcagggcttatttccattgtcaataataggatttcttttcttttcttttcttttcttttttttttttttttggagatggagtctcgctctgtcgcccaggctggagtgcagttatgcagtctcggctcactgcaagctccgcctcccaggttcacgccattctcctgcctcagcctcccgagtagctgggactacaggcgcccgccaccacgcctggctaattttttgtgtttttagtagagacggggttttcaccatgttaaccaggatggtctcgatctcctgaccttgtgatccgcccgccttggcctcccaaagtgctgggattacaggtgtgagccaccgcgcctgaccgtgagccaggacttctcaatatagttttcttctcaattcccactcccatgtttttctagaaacatgattgtaactcctgtcttacttgatacaaaagctcttgttctctttaccttgtggcatgcagtctagttagaccttgccagattctatttcagtttttaataagcctttttatgtggaaggatggccttctcttgttaactgaagtttacatagtcataaaggtttaataccacagtgttttcgggcattgctttcttttattggcattccttatgtatgaaaaagaaatataagttatttgaggggctggcaagatgggtaagaggaaagacatttatgtgccatactgtttttcttaataatttgtgctcacatagatataaacagttggaattttccatttgaggccaaagtgattgccagtagaaacaggcactgcattttggcagtaagtactgtgatcctatagctattcctgtgctgagagtttgttcccattaaaatggagccgaggctcgaatctattaattgtgatagtctgaactatagggatatttgcctgggcagtggtccagttttcgtgagggtaatctatgagagactggctgatattcccttgtgtaagtgaagtacgtaagagacttttggtgctggtgttggaaagaaaaggaggtattaaaaaattgggtgactttttaaaccaagggccttggacagttgccgttctcagtgtaaacagcctgaccttggcgttatcctacatatgaaaactagtggggatggcatgagaatgctttaattatttgaaatgtattacttatagaaactgcactcaaatgaagtatgcttggggcttttaaagtgttattgaacaaaatgttgcttgcagggatttatttgctgttggtatttgctaacctatatttcttatgatttggctgtgtcttggttacctggatgacttttagatggagacatttatgactttgaagcctaaatagtctgcaccattttattagctagtaaaacaaatggaaggtttgaattggtctttagaaagacttacaagttgtggttgctgtggttaacagtcaatggatttatccacttggagcttatattttatatcatagattcttttttagccttgtaagatctattctgactttgaaaactagtttgctgatattttaaaaatatatctatctagtctgttaggaaaccgacattaaaactaagtttcaaaatgtatctgaaattataatccttgaataactagttcatttttaatcttatttgaaactatacccttgagtaatacttaggaaaatagagtaaaaattaatagtattgttttgaaaagtaaagcaaagcattaacctcagtctcagtcccagctgctcagcatgggaaaggcatccccctactcccagtaagattttttttttcctgtcatgtataatttgaaaaccattaattgtgttaggtaaataggaaaagcaaacaggagcaaccttcctttgggataccagaattccattaagctaagttttccgagatgttgaattttttaattaagtttcagtattaatggcccatgtttcttccccccaccgacccccccactttggaaatataattctttgttctgctcaagtgtcttaaatccttcttctgaatcctctcaattgtggtatcataatccccaggatttgactattgaaatgttatttatttatttagagacggaatctccctctgttgcccaggctggagtgcagtggcgcgatctcagctcaccgcaacctccacctcccgggttcaagtgattctcctgcctcagcctcccaagtagctaggactacaggcatgcgccaccatgcccagctgagttttgtatttttagtagagttttagtagagatggggtttcaccatgttggccagcatgctcttgatctcttgacctcatgattcgcccgcctctgcctcccaaagtgctgggattacaggtgtgagccaccacgcccggccgactattgaaatatctaaactatcccagttgacaaagttgggattttgggggagcttttggtaaccccaggcctgtgctgtctaggatgggatgtctgaggtgaataagggtgcttaccttcatggcccctagtgaaggggccaggtgggccaggggtcttctctgaaaggtatctgagtcccctcatttcttttttttttttttttttgagatggagtttcactcttgttgcccaggctggagtgcaatggcacaatctcagctcaccacagcctccgtctcccgggttcaagcaattctcctccctcttcctcccgaatggctgggattataggcatgcgccaccatgcctggctaattttgtatttttagtagagatgaggtttcactgtgttggccaggctggtcttgaactcccgacctcagatgatacacccaccttggcctcccaaagtgctgggatcacaggcatgagccatggtgccctgctaaagttccctcatttctaacggtcttgctggggctgcctctgctcctccccaggctggttgctgttacacaaagggcccatttcatctcagcagagttgggttttgttccaccctcttcaaattaagattgggcaggtacagtggctcatgtctgtaatcccagcactttgggaggttgaggtgggaggatcacttgagcccaggagttcaagtctagcctaggcaacatggtgaaaccccatctctacaaaaaatacaaaaaattagctgggtatggtgacacgcacctgtagttacagctactcgggaggctgaggtgggaggatcacttgagcccaggaggtcgaggctgcagtgagccaagatcacgctgctatgctccagcctgggcaacagagtagtctcaaaaacaacaacaacaacaaaaaacaaaattaaaatttattttattttattcttggacttgactctgattcctcttttccatgcatttttactctgcacacatgtgtgcatgaatgcatatatgtatttatatagaatataaagccttctgggcagggacctcattttaatacctctttatggcacccttagagtcctgtaacagcccttactttttatttgcttaaaatgaagtatgtgtgtgtgtgttcacgcatgtataaataataggttcgaaatacattgtaatcatgggtagataattaatggtcctaagacgtgaaaactcttcattgtttttaaacgaacattttcctcatcttttgctcttcagtgtgagcaaaatctaacagaccaaaggaaaaaaaaatccatcaacagtcataggaagcttacaaagcttcggagatctggcaccaccaaagcttctccacctgatctgctttgaaatgctctttttaagaccagtttgaaacctggatatcccaggccttagactttgtgtaatagacagaaaacccctgtgaactctactgtcccaggacaatgggtctaggacttggggttcactctgccacactggtccttcctgttctgtttattgtgcgcagtaaatcaactctcctgtttgcgcagcggttctgtgttctagattatttataagattgaaatccattgtttatttttctcagcaggtttattgagccagtcaagaataaaatactgtcttaagcagtagagtaagccattagccaattgcaacttggcttcaaattaatccctaaagggtgtgcacatgaacacacacactttgtatgtcccacatacatgtgtgtactggaggtgagagccaggggaggtggaggagctttagtggtgccagatctctgcagctttgtaagcttcctatgactgttgacggatattttttccttttagtctgttagtgagtcatcatcatatgccattttattatcttgaaaacagtctgtggaattttttatcccgtgtctttgctgtatgagtgaaccaccacagagggtgtcgggagcaatattaagctggagactttcttcagtgatgcttcgcttatgtatttgcagctgctgccattgtcgctttgttcccatgtgcaggagttggatttttttgattgttgtttggcaagaaatattaatagtaacttttgtgtgtttgattattttcggggccggagcagcatctgtccagcacctttgggatttggtggttattgacttaggcacagggcttctaagatcagaacttggttcttcttcccacaagtgctctgttttggaaatgtgctaatgacacacattgaattatgtcagaggtttgtggccttaagttgtcgagggaggtgttttcatttggcgagaatctgtaatttgtggaacaataggattaagttctaaaggaaataggcccgatgaatctgtatagatggctagtttcgcaaagtaaagcacagagccagtgaactgggggcaaactacacgttttggataatgtgagcctaaaaagaaaaaccctaaaacttttaaataaatttctaaaaaccaaaaccttttagtatatgtaatttactggcttaaaactataaatattatagttttaataattttgtagatcaggaatttaggtgggactcagctggccatttgtttccatgtcatgtatccaaagctcactctgtagtatcacctggtagatgggttgacctgaaaggtccaaggtggcttcccttatgtgtctgccaccttacgggagatgggtgggaagctggctcatctggggctattaaccagaatactggcatttgtcctgtcctctggggtggatttgcccatcaaaacttgaagttctagcagggcagggtagatactcctactatagttccaactacctgggaggctgaggcaggaggatatctttagttcagcccgagcaagctagcaagaccccatctctttaaaaaaaaaaaaaaaaagacttgaagcccttatttcttttgatcttgtaaatctatcaggtgactcaggagaaaagtccatgtgcctctctccattttatggccaccagatgagttgaaggatgtaatgcttctttatgtagtaattttgtatttttattaagatgtccatgtttaccaataggaatacccatttgtccaatatatcttagactcatacaaaagtgtaccattttcttttgtacagtactctgttctagttattatttctccaaatgctacataccttaccaggcatgtctataaatacttacatttgttgcaacatttttctggaaatctgtcatttggaatgtttaactagatagtgtgaatgtaaaatgctcctagtttattcctgatgctagtcaatcatcaagcacttactgaacttattgagcatggggagaaaaatagtgagctgcggttgtgctccctgggggtgtcttactggctgccacggtgcatactggagggaaaccaagtgccgaacaatgtagtgtggatattaaatagtaatgggaggatgaaggcttggggagtcttgtgcatcctggaagatggacacttggggcttcaagctctttgaaggatgggtgttttcaatgttaaaacttgtttgaaaggccttgccgaaggaagtccttgaagtagctttcttgtctgttgaggtatttctcactacctgaatcttctacagcattcctgcagactggggacatcgaacccattaaatgaagccattgtggttttgaacagttccatttttcgggccgccttccttttattaagctgaaatctgtatcacttcaccttccatacattgttctgatctcgtcccttggagacttagaggattcttgccataacgtcttcctcatggaggctcttcatgtgggcctgtgtagttggcacaccccctgcctgggcttctggctataggctgctcaggcctctgcttcctgcaacagccgttctgggtgaggtcttgtggacctttatcattcggccctttgtaaaaattgatgtctacaaagaggagaaagtggcaacaatggccccagccgtgtcccccagccagggcggcccccctcccctgcccagccctccttacccagcaggcaggcaggtatgcatgcatgtgtgttaacttagtgcctcctgggtgtgcatcagtgcacagttcctagactaacataaagtcacatataggttgtgtttgttctgttgagttgagcatgtctttatcccagctctcatttcccacaatgagaaagcattaatgttcggatttagtaaaaaaaaaaaaaaaaaaaaaaaaaaaattgcctgattgaatagtgcatacccaggctaaccattaattacaccatttcgacacttagaatggacctgagcaaagatttccagtgccagagcccaacatcatcatgcatgaaatagtaggctctttgctcctgggagagggaccattagctttgatcatgtcgccaggccctccccaggaacttgtccatgctgataatcttagcaccagttaatttctcaacccattcctacatgttttgataaactgtggctaaagattaagatagcaaccatttagcagacatacgccttcatgagtgtgctgcttttgtttcaaatcatctgttgaaagaaaagcttgaaagacagagttctccattttgccctctcataaacaaaaattctggaaatgagctgttcacagactggcctaggagccctggattttaaggtaaaatcattgctttgggatttgctgtcagtccaaattggactttctgcttttcattgagccttccccctgcttctattcctctccccaaaacagtgctgctcacaggaactgtgtcccgacagaagtgtggacagttctccttttctctctgctgcctcatgcggttgttagaacaagctaattccatctgagtaggtagtatagcttttctttctgtttactattgctgggtgacaggagagcaagggcagaagttatggtagatagctcagctttacaaccattgtcggggctaaacatgaatcctcagcaatcgggttggccattcctcttctcaaacgttgtactccctctgctggttttgagacaactgatatttccttaagaagtgtgaggctctgccttcaaaacggcacagtctcttttccccagatctgcaactgtgtgtgttgcacacccacaaagaagacagttctttctggctgtggggaaatgatttcagttcttgggcaaggatggcaaggaataaatgtagaagaaattcctttctgataccattctcctacctcacatcctacccccaaatcattgcgggacatttagacttgtttgggggacccccaaacacagcattctcaggcgttgtattcacttctacttgttttctttgaccaccaccacctcctgccccaagcccagcctccacctccccgcagcactcacggcaggagtcattttttatagcacacataacctttacaccaaaaggaaaaagtgcattgcttgtaacaaaatgaatctcttttctgcttttattttgaaaagtcctccctgttgtttaatgtggaggatattcatgctgaaagcctgttccaagtaggcatttgtgcgtcccagaggaacttttgatttatttccttaactctgccctcctttctctgtggttcagaaacctttaatgatctgtgaagctcagagacttcagtgcgaaacagtagtcgttttaagaacccctcccactatataaaaggcctgccagtttccacatgctgggtttttgactccctgaaaggctgacctcttacaaattttggttgtacagcagggcatcctgggttggggccttgataatgcttttgtgaaatctttttccctcctcctcttgctctctttgaaagttgtaatgaaaattccgggctcttggccagcctgtgggatgtgatacagtagaaatgtttctggtgccctttgttactactcggctttgattaggtttatttcccgtaagcttgattttgctagcccttcccccaccctccctttttttaatggctgaggaggttaacttagccaaggttaagcgttttattatgcaggctgcttcaacctagtagagtcactttggccaggcttttgtggcagagagagacaaggggaagctatgttctccctctgtgtttgcatttcttcctcccaaggctgccttttacttttaatgccagcgttcatagaaggtaacaagctaggtaagctgtattggtttcccatttctttactcagaatgttccaggaaaccattgtacaacttgtcttgagattttgttagtcaaggtaaaaatcatggtagacctctctagggtttctgccaggtggagggcaaggccttgagagccgcagttaacagcagcacgcctttgatcctccctgtggttctctgtttcaaaagaaagaagtggctgcagctttaaaaaggttttaaatgctgctttgaccttgtatttatagctctttcgcccttgccattaagaacattttatagacatcagctcagcagtcatccccataagtctacgggggctgccagtatcattccacatgcacaggtggagaaactgaggcacggtgatactaaaaatggcaccctcacaggtcttgtccaggtcatggggtggggatgagccaagaactagggccttgagaggtaggcttcccccacagagcttctgttgcaagtgcttgcatctgggacaagatttgctttttatagaaaaaaaaagtggaattttattatcttagacattctttgttcacagtaggattccttggccaccttataaagtataaatgtatgtgcttcctttgtatcctagagctgttgagatgcgaactgtctcataaggtagcagaaagcactgtgatggaagcttctgtttcatcggtgtcctggaatctgctccatccccttctctaggcagcaatatggtcctgcttccttctgggtttaggtcctgggagcctgtcacaattctgtcacacaaaaagagaattccgtaatgaccagcacagctgtatcatttcaaggttctatgctaaaaatgtgcagatcaccaaatagttggccactgagagagcctgtaccacagagggtttcctaatgcgaatgcctgccccaaacactgcagacagcactttctggacttcatcctccatgttcattaactttccactgatttaacagttctaaccagagttattcttgatctttgatgaagtagatttttgaacctcgggtgtcgggtgttttgttgtggagatgatgcgggctctgtagcacatttgtggcagggttcttttcaccctccacaaagttgtatgagctctgactcttgcctgggctgaaaatgcggtctaaaattatatatgtacgtagtacttcttaggttttttaagatcctcactggactaaatggaagagaattctaaattctcaacgtgttctaattattctgaactattctccctctcccaaaaacacatacagatacacacaaatttattttgtgtgtaacccttgactttcagaaagtttgggttattctatgcataattttttaaaaaaccatttggtttaaaataatttcaaacttaaagaatttgcaagaagagtataaagcattcccatatattctttacccagattctccaaatattaacatcttatcacattatttaaccctccttttgtgtgtgtgcgtgtgtggttttccccccacatgaaccatttgagagtaagttgcggacctgttgcccctttattcctaaaaatgcaccttaaaaagtaaaaaagttgcattactgctttcttctcttgaaaatattaatctgactggggacagcatcatgcctataatcttagcacttctggaggccaaggagggaggatcggttgagcccaggagttcgagaccagtctgggcaacatcgtgagaccctgtctctacaaaaaaataaaaataaaaaaattagccaggtgtagtgccacacacctgtagtcatttgaacccaggaggttgaggccgtagtgatccgggatcacaccactgcgctccagcctgggaaacagagtgagaccctgtctcgatttaaaaaaatattaatctggtggattgactcactcagaatcctactgctgcagttaaaaatcatagtacatttaagtttggctttgtagttgttagggggaaagggaaggggtctgtttttagtaatttttttcccccttgaaaacacagaaaaatttacagtagaaaattaaaatcaggccggctgcggtggctcacacctgtaatcccagcactttgggaggctgaggcgggtagatcatgaggtcaggagatcaagaccatcctggccaacatggtgaaactctctctactaaaaatacaaaaattagctgggcgtggtggcgtgtgcatgtagtcccagctactcaggaaaatgaggcaggagaatcgcttgaaccaggaagttggaggttgcagtgagccgagatcgcaccactgcactccagcctggcaacagagtgagactccgtctcgaaaataaaaagaaaaatcagtaattccatcactaagagatggccactaattaacgttttggcccatattcttccgactgtttctaggcatatatcaataaatattttaaacagaaatggcctcattcagttctataacctaatttttaattttatttttattttatgactatttaaaacttatctgtattgatcttttgcttaacgcatgtatctatggagtcatttttgatggttgcatttttaaaagatatcatgttattaaccaacttctagttttgatcatttattttcagtttctggggtatttttcgggggtggttactgctgcaaaaaaatttcttaatgagtgactttgtcttatctgggggcagttatttccttaagattcattcctagaaatatttatttcaagtagtgtgtgcatttttaaggcctttggtagccagtgccttgcatcctcctgagagattatattggcataccgctaccagcagagccatgctcccttctcactcttgaccatcacttactattctttcagtgttttaacttagcctgcagtctcctttttcttcgaaaactttatgatacttcaaacaacacctctgccactccctcaccctcccccacgccccaaaaagcaaactcagaaaaccgacatatagtcagttggtttatccagagtcagagaagtggcacagggaccaggggcttcatctctccagctttggcaatattttggtgactgtctagggctaattgtcattctcaaggagggtggggtgaggagccaagctttcaggactgtgctctgggtcctccatatcacctcacccagagcagccttccacctcgccctgacacggttggcaccagtctgctgccacctagcccacccttgtaaggagctgtatgggttgtcgaccctgctgtgattttactatggtttttgattgcccaaggactcttcttctctgtctcactgttaatcaggaagtagtttagtcaacaattactgtgggagagtaatctcagattagaatctgtgggacactctgcttttaaaaacgtagggtgatttgaaatttaaaagctaagattttggccaggctcacgaacctgtagtctcagcactttgggaggctgaggcaagaggatcatttgaggccaggagtttgagaccagtctgaacatagtgagactccatctcttttttttgtttgtttgttttttttttgagacagagtctcactatgtcgccgaggcaggagtgtagtggtgcgatctcggctcactgcaagctccgcctcctgggttcatgccattctcctgcctcagcctctccgagtacctgggactacaggcgcccgccaccacgcctggctaattttttatatttttaatagag

SEQ ID NO: 3006 - DNA, 2973 bp, Homo sapiens
actcacctggcggctgccacgcgcccccgcccaggatccgaggcctggggcatctgaatgaggaccctccacccacatttccacttgggagcgagctccagtcggggaaagggcctgcagcccgcctcgtccccaccctgggaccccgcgccccccagtcccccactcccgcgccgaaggcagggccgcgccctgagccgggaagtcgaggggatggaagggaaaggagccaccggtgagggtcccccgggttctgagcctcccgcgtcgggatccgtggggcgcacagagcgccacctccggccgaggcgcagctcagagcgcgatgcgggggaggaacgcgcgcggaggccgaggtctgagcgtggctagacggctcccacgccgagaaagggcgggtgcgcctgggctggatggatttcgcctccctagaccaggagggattggaccctgactacaggtccaggtgctcgtcagtgccctgccagggggtctacgcgtcctggtaccgggtccagcggggtggcgtgctgtgcagaccccgaggctagacggcctaggcccctggagcccaggagacgcttccttggggggaacttgcggcttgggaggggacacccactgcatggcttctggaaagagccggactcgcagggccaggacgcaggccggaccccggcctcattcttcggccagttatcccggagtggcgcgcatcctgtcttcctgggcctcggactgctcgcgcgcagagggggcccgaggacacctctgtggggttagaggactcggtaagacggtgtggaaggcaaggaggaaggtcgcgttgtattggggatggggtacccgtccctcccagcttgagggatcctgggggtcctcgccgcctctgagggcctagatggctgcttccctcggctcccctgcccggcctggagctacgggtgcgcccagctagagtttagggccacctggggacgtgcaaggggcgctggagcgaggcgggggctggggcggggcgtgggtgcttcacccgcgggggacgcagagcttaggcgaaagcggtgcaggcatctctctaatcgccggccgctattaaaaataaaaccgcgacccgtcgccatggcgaccacaacaacagcggccgcgcgagggaggcgaaaacttgtgcagccgcgcgacagccgccttctggggagactcggggcacgacgcacccggcgtgggactgggacccccctgcccggccccgccacattctccgccggatccccggaagacacaaggagacgtggacccccacaggcttttttggggggattgggcgttgaaaccgcagggctgacttaaccaagaggtcaccgacttggataaaaaacccacgcccgcgcggacccccctccccggccttcgtttccattcaaactcccagcgtcctcattgcagcccctggggagggggacggagggacgaggtgggtttcaggtgctcggcccaggaggggacggtgcgacccgggccccgccggcgggttttgcgcgcggaggctgcggcacctgccccgcccgccctgccgcgatccttgcagacgggggcggtcacatgcttctttctggccaggaatcgagtttcacttccagccgctattagtcggttcacacagttcactgcaaacatttgataatgaggctaaatatactcccgcgtcggaggaggcgtgggcgtccccgcccaggcccgggagacagaggcgctgaccccgggacagagcctggctttgtgcgggaggcagacgcgccccgcgcgccgcccccgaaacattcgcaccccatgctgaggcgcgcgtctgggagtccgtgggcgccccgagaaatgaagttgaaaatagcacaggagcccactatcactgtgtgaacattttgtgaatgaagacatgtatgaaaggatgtttggaggcttcaagaaacgaaagccgagagtctagctagaccagagccatccagcccaggagcgatggccacgtgtggccgctggacacgagagacgtggccagtccaaactgtgcagtgcggttgaaaaaaacattttggatatatggtgttaaataaacatgattacaatgactttcgctgtcagcctcccggaggctcattttgctcctctgggccacagccagctcagagggttgctctaggaaatatctacacgttcttgaagcacaggtttatgtgccaggcactgtactaagtgctggggacacggcgttaagaccaggccctcacggagccctcactctctgaggaggaacaataagtcagagagcgcgcgagtgcagcccttcaggcaaaggatttcaggcccaggtcaggaaggccttgtctgaggagtctgagaagaagtcaattgacaacagctagaacatctaggtcaggcactccaggccgacacgacaaagcaggtgcaaaggccccagggcgggaaccagcgtggcttgttcacagaacaaggaggtagatcgcttgcccttgggaccaaaggaaggctctggattttattctaggggcagtggaagccgttggagggcctcaggcaggaacacaaggtgtcgtggcagaaaggaagaaggggccgggcacggtggcccacacccgtcatcccagcactttgggagggaggccaaggcaggaggatcgcttcaatccaggagttcaagatcagcctgggcaacacagcaagaccccgtctctactaaaaccctaaaacttagccaggcttggtggcatgtgcctaaggtcccaggtcctcgggagactaaggcaggaggattgcttaagcccaagagtttgaggctgcagtgaactattatcacaccactgcactcagcctgggtgacagagtgactctgtctcaaaactaaataaataaacaataattgtgttattctgtctccatttctcgcatactgaatttaag

SEQ ID NO: 3007 - DNA, 663 bp, Homo sapiens
cgcttaagggtttcaaaatgaagggcatagattttttcattctatcaacccacaaagagtatagccagcatactgaaatgcacattggttgaaggttaaggacttctacaactatctctgctcagctgaaagcggataatgaacaagaacatcaatttgtgcaataagcttttgactaggagataaagtcttggaatcagctttgtgggggcagggcctgatcataaatataacaggaatcagaagtggaactgtttttaaacgtctctgagagctgtgaaagagagattctccatttggtgaaggaaaaatcttccattagaggcagataatggcgttctttataaagcatttcacattaaccagctctacaaaacaagctcctgtggatgcagtcacattatctgagccactaagtctcctgtgaagctggttttatatactcggggaagcaccaagcccaagcagttttgaataccagtggaaaaacaagactctcagcagttccaggaaaaataaattattaaagccgaaagagatggtggaacaattcatcccccaaatgtacaaaggattcttgggaaggaggaaggcaaaatgctttttttctttcaaccaatgccattaaaaataaaatttacattttactttagaaaactggct

SEQ ID NO: 3008 - DNA, 1722 bp, Homo sapiens
gtaacatgacataaagaaccttttattaacacaacaatgatattttaaaaaggaagaataataatttccaagaaaaagtacaggaatttattttatgtctttttgaatttagacagagaattatttcatagacatcatttagacaaagttagactggcctgaatttaactgcaggtcctgagacttattattaaggtcatatttgccaatgtctggtgagaaatagactgggaagatgaaaagcatcaaaagatttctaagggctaccaagattattgaggggatactgaagaacatgttttttatttaaatatttcctaggactgaccttcactcttttttcagtgaatctaccattaaaaagggtacctcatctattacactcaggagcagctacagctagagtcaccaagaagggtcgctgacatggtagttgatgctagcaggtcagctgggaggtcagctgcggctttctggcagagtatctacatgtggtctctctctcaaggtgacttggacttcaaacaggatggtacccatgtcccactggagaacaactcaagcatcaatattccaaaatttgtgatgcttcaagattgattgaggatcaatcacagtttcccagaactggaaaggtcctacttttcccctgctctacttgttaagctgcctccacagcctgctcatgttcaagggcctggagaaataaaatgtttcttcatgaaagcatggcaatgtcacattgcagaagtgcatgtgggaataaacatattgttgtggccaactttggaaaatataaattctcaaaatcactttggaaagggtttctcttttgacagaaatcaaaaggtaaccatctaaaagcacttctcctttcattctgggcacagagctggataatatttctaatttctgtaactcttaggaatggctatatcacttacatttagccaatggaatgcacacacaaatgtgtattccaccccctggtctgagccatagttctccgcagtgatatccctcatattatttctcttttcactttactattgtgacaatgcctagggaaacctagggaggcatatgttaaagttggcagaatttctgtgaccctgagtctaatttgatcctcaatgactttcatccctgtgttgagtgtgagcaaaatctatcaataggatgagatagtacttccatgagtacgttatagtttatagcaaatgagatttttacagtgtaattagagttggaaatcactgctttttaactgtgtcaaatgagtcattaaacttgtcctctgtgtaatttttgttgttttttcttttatttcgttgccttgttactaatgttatatcttatggttaacttggccctgtacatatctttaattttaattttattttttcagaaatagtaaatgaatttgttttaaattttgtatccagtaattccagtctcctaacacatgatgcctctctttttgttttttcaaccttcagtttcttatttccaattatggcatgttttcttcaaatacttgtgggatatctctgaagcctggagtgcagatttttcaaactgtccattcacactttttagttgtttcagtggaggtttcgtctaaatattctggtgcattgtattattggaattgtatatctcaaataatatgtcttgctttcacttaacctggaacaagagctgatgtgaggtcaacatata

SEQ ID NO: 3009 - DNA, 5596 bp, Homo sapiens
gttatttttcctgtctttctaaaaaggctaaaaggcaaatgttctgcagtatggaactgagtctccgagttaagaggtttgccaggtaattgctagcaatgacaaaggtgagatttgactgtcaattttctacctttctgaacattagacagacttccaatattcacatatcatctctatgtggcattttccaggactttcttaggtcttcaaaaaccaaatgagggacatatctctacttcacaatgaggaaaccaggacttaaaggggcttgcccaaattccctgaggtcagcaaccttctcttctctttgtatcccaagaacctaaaggcaatggtagcaagatggttaggagactgggccctgtagtcagacatgcctgcctttcaaatcttagctctaccactgacttgcagtaggaccatgattatcttttttctccttttgtaaaatagtgcctgcctcagggttatttattcattcagcaaacatttactgatcacctatcatgtgtgaaaatgttctaggaatatagtagtgaaccagggagtaaaaaaaatcctgccctcctggagcttatgttctagttggttgttgttaaaattaaatgagacaatgcattgaaaatgtcctgtatagtgcctggaatagagggggtatgcattttgacagaattaagacaaagtctacaaactcctggaagtaatagcttttgcctttccttgaatctataaagatagcaaatgtaatattaataagtcctttacttttccaagaaccatttcattccacggaaagccatagtagtatttagccatagtagttgtttttataatttagccatagtagttgtttttataatttagagttctttggttgcaaacaatggaatagaaaacaaagaatcaactctagcttcctcaagcagaaaggcagaaggatatgtatggctgatggaattgatgagagggtgttgaactaggcttagtacctaaaagacctggagcctgggaactaaactgcaagaggagtctcatcacgattcaaatgtcaataggttttccctattctgtgctagccctggagtggtgagaatagtgtgaggcttttgcttactggctctcggtgtgtatccagtcaaggagggataattctgtgaaaggaaagtgtggtgcatttacaaatctactgggcagtcaagaaacaaccagtgacagttctgaggtcttaaagctggatgagttatactgtcagcacaaagtgtttgacattaagtaaaagaatggggttcttgttcccaactaaacagtgggaattctaccacccagtggctatcctctgaaattccatgaattgaaactagtgcttatgatttagttaatatacatttatctgtatgcatatgcagataaatgtatatttatctatttagtactaaatagattttatgaaacttcatccctggctttatttgccaaaggcgagtcctccatcttgtggtttctgcatctctttggcatttgtcactatgcacttgttgccttttatattgtcacaggaatcccagaaacacctatagaacatcagtgatgagcatcttctgtgagtccagtggtgcactggctctgggaatatggagagacctgttacattaccttctataattacatgtatttgctattcctgagaaatcatttgtgtgtctctgccaggaaacattagcctttccattttttaagttttcaaataatatatgtagaaataatataaggaaagtacatagttcaatgcttgcacttaattgatagtcaataaatggcaatttgttgacattccaataccttgaacttcctggatagctctgtaaaacggaaagtgtccttgggaacaaaactgcacaagcatgctggtcaagattcaaattccagggagaaggtgttcaacagcctgcccctgggctctgtgccagcctctcggtgatgaagggagagtccggcttctgttattggctccccagtatgtattcaatgtgtacctttaatcaaaggtaaattccatgagggaggggccatgcctgttttataggccactgtatcttgcatgtagcagtttctagcacatgatatgcacccaagaaacatttgttggagaaatgaccaaattgggattctctctacagaggctaaagggaaatgactaagctacttgctgagtggctatcattagtgcataattttcaaaagcaatcatagaatgggcaagacgtttaatctctgtcatgaaatgtaacctttagagggaagacaagcaatcacaatgtgacttctccgagtgtcctgcagctttgagcatggcccgggcctctctctgatggggctgatgaaagccaacgaacaaaggcattttgtatgttaaaacaaaccacatttagtcaacagtgtttgcaatgactaatccctggtaagaaaacaccaagaagtggcctacacctcaaaaaatataagcacagagaattctttcttggaatactggctgcaaaagttcagcgtttggcatttgcaatgattgctgtttgattttctttatggttgtgttggcacattctggaaagtcaggaagctcaagtatatactgtgggagctctatggggtgggaataggagatatacaagctttgttttgtattataactattgcaacacatttccaaatgtcactttttgtccatggtgggagaacctggggatagttcaatgtcagatggtttcaagtgacataacactagtgcagtaatttatttattcaattattgtttattaagtgtctactatatgttgagtctggtgacactttggtttttctgtgtttaaattttattgtttcattctgatgtagcacatcccttcctgcatctctttgccagcctaattccttataacaatccagacttcccctcctacatcacttctcccaaaccaccaacacctggcaccctaccacagcttaggtgcctctgatgtgggccctgtagaagctttacattctcccaggatttctcaatctgcctgtttcttatttgtcctgtctctcccatgggatgagaagctatttaagggtctgggctgtggttgtcactaacccagtatcattacttaactcagtgtctgaaatatagtcggtgcttattaagcatatattaaatgcatgcagaatatggaattaaataaacctgaaattattttttggagtacattatacaatgcacaagagtaggcatttttagaagcatcgagcatagtaggtccttgcttgtcccaagagagcgttcagttagctaagtaatcctcatatatttgacaaatgctttctgaatgccaattatgttccagtttaccatctatttggaagtaaagataagtattttaaaatataactaacattaaaagtcttgagtggtaaaagccagattcaaataagacagtgaagggtcaggggttgcatgggtatattagtccagtctcactctgctgctaaagacatacctgagactgggtgatttacaaagaaaaagaggtttaatggactcacagctccatatggctggggaggcctcacaattgtggcaggaggtgaaaggcacatcctacatggcagcagacaagatagaaaatgagagccaagtgaaaggggtttccccttataaaaccatcgatctcatgagacttactcactaccatgagaacagtatcggggagtgcgcccccacgattcagttatgtcccactgggttcctcctacacacgtgggaattataggagctacaattcaagatgagatttggatggagacacagccaaatcatatcagtgggtgaggatatcacttaggctggtaaagtatttcaacctagtttatattggaaacaggcctttctttcccttccttcccctttttttctttatagcttctcattcatccatctgggatttacccggtgtctaccatattccaagcatcgtattagatacttggaatataaaaatgaatgacacactccaacctcaggaaatacacagcagtaaaaaaaaattttaaaggtgaatcttgcctttgaaccaaacagtttagtacagtgtttattttcagtataaaaactcatatttgtgggacaaggccatcttcatttatatagttcttattccttctctcaaattatgtttcttggccaagtctgtggaactgttggactgtatggcctctcagtcaagccagacacagctgagaggccatcggaaacttgtaggaatttccggtaattggataggaccataatcaaattttatatgaagtctggatgtgctgatgatgtgccttcatttcccaggtcagagggaaaatctggatgccttaatacacccaaaggttaggagaggccttttctgaaattgttttcaaagggatttccatgaccaaaataacataactatgctaaaaattctgtgacctgataagaaatcccttgcctggattcctggcaacattacttaaaactaaaaatgattctctcttctcagaactaacactcagtatcggactgacttatctgacacttgtcatgtacacatggccttgtgtcattagttgtattttcactgctcctgtctcactcccttgactagattataaactctttgaggctaataaaaataatacagacaatagctaatatttattgagggtttctatgtgccaggcagtattctaagcactttatacgtttcatttaatttttacaacaacctgtgaggcaggtattttatcattatcttccctgtgtatggggaactggtcccagacaagttcagtagcttgccctaggtccccaatcctagtaattgacagagctaggattcatgcccaggcagtctgactgtagaacctgtacccttgtttactttattgtttgtcttctctagatgtcttgtgctttactacatgctgacttgcatgtggaagatactccagaaattaaatcgttgttttatcagatagttttctaaatgtctcataatcctatcaagtttctgtctatccttctgggtaggagatataaggcagttgttattgtcttaatattcttggtgagagtataaaggataagggtttatttcaggtacagcaaagaattttctacagaaatccctcctcattatcaccactgaaaattcacagtgcctaagtgcttatcaggttcaaatatgatggaaacctgtcccatctccaaatttgagattcctcttgtacacatctaggacatttgagtacctcctcaaaatgtgtctcattgatctgaggtaacatagcagatgtaacttaggaagtctttattttcatttctttaacaagtaatagtcctttggaccattgtaatagaacacataaagtataatgaccctaagttaatgttgttttatgctttattttctgtaccatgtttctatcttacatgtctctcacttttccccctttaaaagatgttctagggagtgcctgccactaaaaactaacccctttctgtactttcctttaatcgaac

SEQ ID NO: 3010 - DNA, 4804 bp, Homo sapiens
agacagttgaaattttaaaattgtagttgtactctttggtgtttaaaagtgttatgttgacattttaaatattgtcctgtaatgtttacttcaaggtccatagttatactaatatttcttctttgatattaatgtttgagattgtttatttgcctctttttgcttgtgtatcactacagtgttgtcactcatagtatgacccctttattctttcaggaaaatggtgtatatacaatagcaaaattaattttaccaaataagcaaaagaatgcagcaaaaagtaatctattacagtgttatgctttcagagccttgagatttctcttcagtatggaaagaaacagaccactctttaaaagacttttccccacagacttgtttgagatcttcattgacatagggcattatgtacgtgatatcagtgcttatgaagaattggtatccaagctgaatttattagtggtaagtcctgagttttcaatattttggcaggctgctatgtagtcaggatgtaatttatcacagaaacccatttcctttttatattttgattaggaggatgaactgaagcaaattgctgaaaatattgaaagcattaatcagaacaaagctcctttgaaatatataggcaactatgcaattttggatcatcttggaagtggagcttttggctgtgtttacaaggttagaaagcatagtggtcaaaatcttttagcaatgaaagaggtcaatttacataacccagcatttggaaaggataagaaagatcgagacagcagcgtaaggaatattgtttctgaattaacaataattaaagagcaggtaaatgttttccttgtttctgaagatgtttttcttaaatacatgtcattgcaagaaagtagagttgtggtgctcttgtccatgctgcttatgaactagttccatgtgaaataattgacactgaagcagtgatatttttgccagcttttttcctaaggcttgacattgaagcataaaacactgtctggagtttatatcagggtcatggatgcaaaacaatcggatttacagtacagaatgcatcatatatgagaaatccttttcttttcattgtgagcatatctattcttttctccttatattttaggatatttggttacttagttacatacatagaaatatgactaagagtttcttgacttttgccaaatggaaccaagctgttaacattcctcaaatatgactttattagatctaaaatgtagattttcaagttgggttattatgtattggcatgagcagaatactctgatataatgtaacagctcaattaactctcattatgaaagtttgtttgaggaggaagaataaacatttcaaagagaaatggaatttctttgtgtgatccaagaacacattggtttctttttcagccttccttatttgcacattcatcacgaatactgttcatttataattcctgtggtgcactatcagctttgctgcttttgtcctccactggtcacatttgcatagcatctgtgttgggatgtaacaaattccataaacaaggagacctttgttcataaaaatcgatagttctactccagtgtgtacattatagtaaatattatcattaattgtttattttatagttgattttatatactaatagactagactttaaaaagtttgttcatgtgtagtttgttcatgtgtttgtatggtcatctagccttccacagtgtgctctttcattgtagcacaaggctagaacagggcttttgacctaagccagtccagtgttttcatctggacccaaatttggttttagtccttgtgggtgagccaggtccagaatatggttctggttggttacctggtcacatattgcttacgatctgctggccacttgctagttgatgcagtagattatttgttttagcacatttcctaagaaaagaaactgtcaaactagggtcagataggaagcatatgcttgggctttgaggtaactcaaaattgccctctcactagaggatcaaactgatggaaaggatgataacattgagtccttaaaggaggaggtagtggcaggcagaagcaaaacaaatggggctagaatggagagtacattaagattaacctgcattaacaaagaggatcccaaatgcaggtgcttagaaagaggactcacagtacagtgggttatttctctttcacggaacaatcccaaagtgagtaaaccaggttgaaggtgttctctgctccatgcgatcatttggggatgcaggcttttttctctcttcttgtgctgttaccttctagtgcactgtcttcatctgtgtggttgaaactgccatagccatgctcacatccaaggtgagatgaggaggatcatggagggctattcccaaggtttagagttcacacaggaagcacacatgcttcctctcatattccacaggtcagaactgagtggtagcctcacccccagcttcaagggaggctgagaaatcttctctaactgggaagccatgtccagcttcaactgtattgcaatgggacagcaggtttttggtggacagctagcaatctcccttcaaaaagacgtgcagaaagaccaaaaagagatgcaagcaagccatttgttgatgtgatggtgactgttctaagacaaattttatctagaaactcaaattataagcaaaaactacaaaattattagcattcttctagaaaatgatcttttttaattaaaaaattagaaattccactaacattcttaacttatatcaaagagaaattgcaccattttttaaaaacggtgaggaagactttattcaatactattgcaatagaagtcaaactattgtaatagaggagagagattgaacccaactctgaattcgaggactggacagctggggactcagagccaatggtcagggtgagggagggtcagtggatggaagtttactaagaggaacttggttagatatcaagggtgagtggatgagaaacttaattggatgtcaagggtgggaaatttttccataaactgacttagcaggatataagttgctaaaactgacagaccaaggatgaggcctagtcacgaagaggactcagaggagcctgactaaagcttggttaagtaggaagtccttgtcaactgttattatgacttaaactgagtcgactcttagattatgttattttctactaatcattttggagagcatagaaagacagaaatagtgtaaataggcacaaactttccataaatatttagatggtagagagaggtaaagaacaatgaatatttgtagtcaacagaagttaccgcatttcacttttctcctttatacagtctgtgtgtcgggttgtgacaaggtgtgctaaaggaattcttaaggttccttctacctctatagttctcttggttaagttcgatagtaaagttaggtgatagaacgtttttaattttatttaataaagctatagaggattgctattttcagatcagtttataagcaacaagtttttaaaaatcacaacaatctcagttcgatgatatcttgaaatgcttagttttgtaaataaatataatttctttgtagttttcaaatatgaagtccaactaagtagtcagtgaaaaaacttgtattttgaagcagtgcaatacatgtttgttatttattttcttatagctttatcatcccaacattgtacgttattacaaaacatttctggaaaatgataggttgtacatagttatggagctgatagaaggagccccgcttggagagcatttcagttctttgaaggaaaaacatcaccattttactgaagaaagactatggaaaatatttatacagctgtgcttagctcttcgatacttacacaaggagaagaggattgtccatagagatctgacaccaaacaacattatgttgggggataaggacaaagtaaccgttagtcttgttctccatttatttgcagcctttgaaaccatccaaggaaacagaccccgattcagtggtacatggggtgagacacagtcaacatttgccctaaatactgtcacttgccaaataaggtccatattgtgccatcacattacaaaatgactcttgagggaatttggtaaaactgaacttacccttgaacccaccattccagatttcttgaccttttcaaaaacccttattttaatgtaaaccttccatgtccgcttgcctcctctgctttcaaataaaaaaggaaaagaaaaaacaaaactcatttaattatagttaatagatttcaggcatggactttagtacatgacacagaaggtcacatgttcatcttgcaaacaaacaggctatgtgaatttctgtttctcaagtgatatttggcacctgctctgatgataacaacaagaaaaaacctgattcagtgtaaagtttatcaaaggctccaaggctcttcaaatgttatcacaggtcaggcattgctgggatagatataagatgaaaagccatggtttctgctccctgagctcacagtcctatggggaaaacgtctgttattcactcagcaattaccttcctagctgacacatcctacaagtgagcacagcaagcatgaaggacataacccctgtcttaatgaagcttataattctgttacagagtgatgaaggctagaatgtatatgcaaaatactgtaacatgtaataagtaacctgaaattctcaacagcttaaaacagtggcaaaatacagcctaaaacagtggcaaaatacagcctgtgggacaaatcaagttgtgac

SEQ ID NO: 3011 - DNA, 10229 bp, Homo sapiens
gtattaggagttcatagatagcacttaagactgactactaaaatgtagtaggtatttagtcatgtagaatttgtatttaagttgataaggtaacagtctttatcttgctgtgttatatatggtaatgtgtatcatctcctaaggattttgcttaaatatttatatgtattttatggagttttctttttaatggctaatgtttggggctgataatgtgattcactacttaagataaactgctgcttttgacatttctttacatttctaacctttttattaatccttaaacactgtcaaggtttttcagtgttttttaaatttaacacaaattcattggaattttattaaaatatatattatactacaaattcttttaattagtgcttgctttttttctgtggtagacatctgatgcaaccctgtttatgcaatgcccaaaattttgcactgttgacactgttgatagaattgatgttttaatggtacttgtaatcaataaactattttttatataaagagatgaggccaaagactacaattcccttgtcaaccttgatagtgttttagtatagatgttctttcattagatactggaaatacaagggattttaggtagttagtgaatgtacatgtgaactaaaatgctctctgtgtattttctgttgtgtaagtacttgttctaatccagtgttattgcattatgtaattgttctccctgggaaaaacagaatggcatgcattttccacaatacgtaagtgaccaaaaacgagcctttttgcaataaattggcatgctattaaccactgctgtagcagaatctcataacctttcagctattacttgttttcacattcagattttcaatgtgccagaaattcttcctagcatctactgatttcatgggtgtgttgcagaattgattctgatggtggcatgggaaataccgattttttttcttgcttaatattccgccatttgctgccagatggctgggtgtctgtgtgtgtatctgtgctgccactatgcacttgatgacttctgaatgaagggaaatgttgattgtggtaatgtttaaaataacaactgcatgaaatcttacaggcttctgctcttcttggcagtttgtctactgctcttgcagatcttggttttaagtagggagagaccaataagtcctacacgctcacccgaatactaaacttataactattcactttagtgttatttttttaaagttatatttcatttaatttctccatgcatatgttcaaattgccatataatttcagttattttatgttttagcagtgttattggtctttcacctttattcaatttcagttttcattatgagaaacacacacaggaaatgttgttaagacagcaactatatctaaaatgattctgttctcaaattgtatgtttacagataatcaaagtagtaggaagaggggaacttaaacatcatagtgatagatggttcttttaaacatgaaagcataaactgacctaattgattgttcctcttaaataatttttggaataaattagaaagctaacgtacatactctatataagaactatggctcatagaaatagtcatactcaatagtagtttgaaacctttggagttttttgaaaagagtgagtaagatccttagaaactaactttttggaagatcaggttattgattgatttgagatctttacatttttttctttgaatgctaaagcaatcaggtacctaagtaagaaaacattcaataatactttttctgggtagacattttttaatgatagtgataggctttaaattttagaactatttagaactatttaagatacttttttaaatctaaagatttttaaagctgtaaaaagcatgatgaaatcttagatcactgctgtatctaagtttaagtggtatagttatccttctaataagtctgcttttctgctaatttcaaaacactttttttcactgaccattaatcgacagttcttaatgatcacaagtgtcacttactcacagctgtcttagcaattctttttagtggaactacagctactaattccttgaactcagttgacacacatgagttatactttcttgttcatttttcctttcactatgttaggcaccccctgtaatggcctatcctgctactacaccaacaggcatgataggatatggaattcctccacaaatgggaagtgttcctgtaatgacgcaaccaaccttaatatacagccagcctgtcatgagacctccaaacccctttggccctgtatcaggagcacagctgtcggcagcatccagcccctccagtcacagtcctcacagagcttcaggaaaggacccctttgcagagctctctttggaggatttcttataaatcactttagatacagtttatgtaacttgatggaagaaaatggaattactccaaaaagacaagtgctcaagcagcaaaatccttacttccagcaaaatccaaactgctgtctcttaaatctcttaaactctcttcttccattagaatgctacaagtaactcagtgaaggcccatgaaggaaattgggactagtttataggagaacgtatcaatacagtttataaagccaagaattgctatgatttaagactaagatctgtctttttggtgactaacccttcaattctttcaactcctgttaatacccataatcagtaacctatcaagaaaagcccttatttggaaagtgtgaaatttgtatttggaaaagctgcctggagagaagaactgtgtcctttactgtatttcaacaggactcttttgggggatcaaaattaaaattcctaattatgcattatctttcttttctccagtcctcacaaatacagaaacaataactgaaattaacttttctttttttaaaaaaaattatattcagtttgcagtagacattccttaagtatttgtatttatttatgattatcaattttacataacattaatattgtatcagacctccttatgaaaatgagtatggatgtgcacagtatgtttgatttttatccacaagaatgaatctgattcagaatgcttttctcagctgacatacagagcactaaatattttaaggcaagtccataggtctgaatctcttaagaattctcggcctctgtgggatttagggaagcattataaatgcattaatccttatagtcaattctgtgcctaggattttgccagggaacagttcactgactaggaaaagcactacattttaaattcagcattagtgcattgggaaggatctttactgctttgtgcttggcatgtcattattttccatttgacattagggcctttccaaaatgaatgtgaggaattgctttcacttcaagactttccttcttttcactaaaactctagaaggtgttacaagggggagggaaggggggcaaagtccttgaacattttctttggctcgtgccatgttatgatcatataccttttaaataaggggaaatagtatctttaaagttaatgtctagccaagagtttagtaaacgaagaattaaactgcactgttgatcggtgctttgtgtaaatacatctttaacatttgggtggagaggggccttaagaaggacagttcattgtaggaaagcaattctgtacatgagtttaagcattcttgttgcattgtctctgcagattctatttttgtttacaatattaaaatgtatgttagcaaaatgggtggattttcaaataaaatgcagcttccacaaaagttttgttatggtattctggtctgagatgcattttcatttttcctttctctttttattatcaatattgtcatttttccctaataaaatatacccaggtgattatatttgttgatctaataacatggaaggtttgttttatatgaattttcaaaaagatgtctctttacactttttgttaccttgtagactcttattgataaatgcaactacttattaaaattgttcactttttgtcttttgatcagatgcctttagtcaggtaagtttaagggaaaatacgcagtttaatgttttggtacatataattatgtctgccaaagaaacctttgattgtatcatattgcctatttagtagtgcatagggttcagagtacatgataaaggatcaaaagctttgcattgataagtgtctcataatatttgctgtgattggagaaaaaatgtagtcgtagccaataaattttatcagcttttaagtttcagtattattaaaccattttcatataaactgggaagttgtacttttataagttaccctccttaactttacaaatttttgtctcttgtggtgtttgaggaggtgtttatatttaaggtctgtggcttgttttctttcatattgcctttttttttttaagtatgtttcagtatgtgacgtgcttcatagccatttttatttcattgtttaaacaacttttgggctatgtttgataagtgttatccatattttacccattttatatgtaggaatcagaaatcagaaaaggagctgggtgcagtggctcacacctgttattccagtaatttgggaggctgaggtacatgatcacttgagcccaggagttcaagaccagcctgggcaacatggtgaaacgctatctgtaccaaaaatacaaaaattagccaggtatatgcctatagtcccagctacttgggagactgaagtggtaggatcacccgagtccaggatgttgaggctgcagtgagctgggatcatgccactgcatactccaccctgggtgacagagtgagaccctgtttaaaaaaaaaaggaacttgcccagatgagtaagttaacagatggaaatcaaatctttgctttcatggtccattgttctctctgtgacctgctgtcacgtaattcatatatatatactgacatggagattgtttccctctgcaatctagactgatggccactctttattcccagtggtctttagtgaagtacatttcctgcctcctcctctgatgcccagacatcgttgacaaggaagaatgcaaacatgcgacaagagcaactttaaccaaaatataatgagtgaagtaaatcagctattgattacataattacatcaggctgtaaactcatacatgctcatgtcattttactatccagttagcaagtagctattggctgagataagagagaagattgtaagcagaggacaactgtacctgtcccaaatcgttttcaaaattatttgcctttgatttaacatctatcagcattcagcattttttaaaaggtatccctttcttaacaagtgactatgagaatacatatttaggaagaggacttccttatgttagcctaggaatcttctgcttttccagaagccaacaaaatgtgacttatgagaaataggccttaatgggatgtttttcttgaactaaaaataatttcaaggttcttctcatttatcgtaactcacaaacacgcttccaaactctgtttgcttattctacaaaattccacagagaaaaaaaatctctcttaagagtgagtgtggctcctgtgtgctagcagtgactaggtcacaatgtatggagacaccacagtagtaagccagatgaatttattcttgccttccaggaaagatatttcacagctttcatcagtggcctctgcagtcagcttagatctttgttctgccacacttgctgccttccatgggtgtgactagcccttctggaattctgctgtctgaagtttcggaaaagaaaggctgcattatcatccatgctgtctcttgctgaaaacattaagctgatttcttgctgttactaagaagtaatgtcctatttgaagtatcaccaatccaaaaggttttctgtgtttctagctagtattcctaatgttagcataagcactcattgtgtcccatttgttgttgatgtagtatgcagacgtagttgcatgaaagctgtatgaaactgacaacactgttaatgaaagttccttctatggtatttgttctggggcagatgtaacttgaagcgaatattaaactgattttaggcagacaactaggagagaaaggtgaggttagaaaaagttttgttttctgataagccctggttcaaaatagctttttatctaataaaaaagctaattttaggccagtgcagtggctcatgtctgtaatcccaacactttgggaggacaaagtgggcggatcacttgagcccaggagcttgagaccagcctggccaacatggtgaaaccccgtctctacaacagtgaaaaaaaaaaaaaaaattaagtcccagccactccaaaggctgagatgggaggatcacttgaacccggtatggttgaggctgctgtgagccgaggtcacaccattgcactccagcctgggcaacagagtgaggtgagaccctgcttcaaaaaaaaaaaaaattaaagttttgttttgtttttgttttgaggtggagtctcactctgttgctcaggctgtagtgcagtggcgtgattttggctcactgcaacctccacctcccaggttcaagcgattctcctgcctcatgtgcctgccaccatgcctggctaatttttgtattttaatagagatgggatttcactatgttggccaggctggctcaaactcctgaccttgagtgatcccgcctccatctcccaaagtgctgagattacaggcgtgagccaccacacccagcctaaagttggttttgaaataaaaattgtgtgtgattgaccttgtgagctaaaccttgctctgtcggagccttccccaattaggtaccctgtctgtcttccttgagccttggtcccttggcagctgtcctgtcctctggataaacaagtattgagttaccgtgcctctgactgggaccctagggaaggaaatatcaagtagccccccactgcccaccacttaggctatctaggaagtcagatttctttaaacttttaagaacactacatggaagcattaagcacaccacactggcactgccagctagcttagtgcctgtgtaaggcacaaaatattaaatctgcatctctgatcatttttgtcctaagaagggtagtagtgttagtctgttcttggggttgctataaatacctgaggttaggtaatttacaaagaaaagaggtttaattggctcatggcaggctgcatggcactggcttctggtgaggcttcaggaagcttttactcatagccaaagacaaagtagagagcaggcctgtttacaaacaggaattcatacttaagaataagaggtcagattaatgggatgtatcaccccttgagaccaaacctgcagcacaaaagagccttggtctcacaggtcacaaatagacattcagtgcagatttttattgctatcatcccaggttagagcccagtctacactacctgatagctggctctgctgatactcaggccaacccaagggaaaaagatggattttctttttgggggaaggctggtctttggtgcagacaggaggaatactggtccaatgggcttaggagaacaatatttatcagtcacccaatagagaagcgtgctttccattcatcaatgtttattttactgtcttataggaaacttgggaagtaagcaggacttcccaggcctcttgtcttgtgttatgggaaaccacaggacccatcaggcatttttagtttcatttaccaggcagtttattgattgcaacacttagcatacatgattcacaaagttctcattcttgataattttctgcccaaatgtagcttcctgagaagggcaggagtgatccatcacgtggtgggtgttcatgtttctggttggctccagccccttcccttgaatcctgtgctttaacagctggaatccttcagtgtgtttgggtggctcactgcttatcaaatattcaaggcctacaaccattgcagcctttctcatacctccactcttgaagcttctgctcaggctaactgtctcttccctgcctcttaattgaaactctggaattctctgtgcctttgtttttacctatttgcctgttcaaagtctgtaattattgggatggaaagtgagcaactctgatcatttttaggagcactgtaaattggccagcccttccagaaagtcataaaaatgtttgtctcctttgctcagtaattccacttctagacatttaaagaagtccagaagtattaaaagagctgaaactggatcccttccttacaccttatacaaaaattaattcaagatggattaaagacttacatgttagacctaaaaccataaaaaccctagaagaaaacctaggcaataccattcaggacatgggcatgggcaaggacttcatatctaaaacaccaaaagaaatggcaacaaaagccaaaattgacaaatgggatctaattaaactaaagagcttctgcacagcaaaagaaattaccatgagagtgaacaggcaacctacaaaatgggagaaaattttcgcaacctactcatctgacaaagggctaatatccagaatctacaatgaactcaaacaaatttacaagaaaaaaacaaccccatcaaaaagtgggcgaaggatatgaacagacacttctcaaaagaagacatttatgcagccaaaaaacacatgaaaaaatgctcatcatcactggccatcagagaaatgcaaatcaaaaccacaatgagataccatctcacaccagttagaatggctatcattaaaaagtcaggaaacaacaggtgctggagaggatgtggagaaataggaacacttttacactgttggtgggaccgtaaactaattcaaccattgtggaagtcagtgtggcgattcctcagggatctagaactagaaataccatttgacccagccatcccattactgggtatatacccaaaggattataaatcatgctgctataaagacacatgcacacgtatgtttattgcggcaatattcacaatagcaaagacttggaaccaacccaaatgcccaacaacaatagactggattaagaaaatgtggcacgtaatacaccatggaatactatgcagccataaaaaatgaagagttcatgtcctttgtagggacgtggatgaaactggaaaccatcattctcagcaaactatcgcaaggacaaaaaaacaaacaccacatgttctcactcataggtgggaattgaacaatgagagcacatggacacaggaaggggaacatcacactctggggactgtcatgaggtggggggagcggggagggatagcattaggagatctacctaatgctaaatgacgagttaatgggtgcagcacaccaacatggcacatgtatacatatgtaacaaacctgcacattgtgcacatgtaccctaaaacttcaagtataataataataaaataaagaaaaaaaaagtacctatgacagcggttgagattaccaaaggaaccactgtgtgccagagtaagggccaaggatgagtcccagggaacacacccttattaaggggtgaaggccaggaaagaacaatcaaagctggaggcggagaaccaggaaagataattatgtcaaggatataactgaagaagtagggaatggccaacacaagtaaaataaagaccaaaacctgcccattggttctagcaattaggaacttgaaccttacccctagatatacctgggaattgtcagggacagaaggcagatcacatggcattgagaaaatgcagagatatcaaaaagctatgaactaaaagagatactaagcaaaagactgaccaaggaagatttttagaaagcagattgagttcttcgttcatccattcaatacactgagtgccttcaatgtgccagtagttctaggtgcaagaatcaataaacaaaacatagattcttctttcattgagcttattttcttgtgagagtaggcaattagcaaatattttatgacaaatgatgatgagtgttgtgagaaaaaaatagtagagagagtgatgtgagcagagtgtggtgctgtttgggatagggtcaaggaagaccttgaagtcatctttgaacagagatactaagtaaggaagcaggatggtaagatttggagagtggctctcctccccacatatgggggcagagggcagaacaaaggccctgtttccctagtcagaaacagcactgtcg

SEQ ID NO: 3012 - DNA, 45917 bp, Homo sapiens
ctttaatttctggtatcagatttttaatttccaagaggcttatttgtctgttttctttaattgttcagttttatattatgccgtcttatttcacagatgcgatattttctaatactttgctgagaataattatgatttacattttttttttttttttttttttgatcgttcttgggtgtttctcgcagagggggatttggcagggtcataggacaatagtggagggaaggtcagcagataaacaagtgaacaaaggtctctggttttcctaggcagaggaccctgggaacttccgcagtgtttgtgtccctgggtacttgagattagggagtggtgatgactcttaaggagcatgctgccttcaagcatctgtttaacaaagcacatcttgcacagcccttaatccatttaaccctgagtggacacggtacatgtttcagagagcaccgggttggggggtaaggtcatagatcaacagcatcccaaggcagaagaatttttcttagtacagaacaaaatggagtctcctatgtctacttctttctacacagacacagcaacaatctgatttctctatcttttccccacatttcccccttttctattcgacaaaaccgccatcttcatcatggcccgttctcaatgagctgttgggtacacctcccagacggggtggcggccgggcagaggggctcctcacttcccagaaggggcggccgggcagaggcgccccccacctcccggacgggacggcggctgggcggagatgccccccacctcccggatggggcggctggctgggtgggggctgccccccacctccctcccggacggggcggctggccgggcaggggctggcccccacctccctcccggacgggatttacatttttaaagaagttttaatctccctctataacctctgtttccagtaagctttttgtttgttttcatttctatctttcatgttagagatttcccgaagatatttttatatttggttacctgttcatatttaaaagtgggtgtagggggctaaaaaggtgactggaagctctgtgttcatgggtggggcttgttgtcaatgatcttagttgtagagtgatgttggtgggcttttcactgtggagctcctgaggtccgtatctttaggtcttacctcttacgtttccaagattcctcaaagaagactcttccattctcttgcctgaatgggaaagacctggctgtgagggtcctgtgggttttggaaatccgtagaaatgttcacttaatctcctgattttcagtgtggtattcactctgtccactatgcagagagtttctgctctatccactacaaagaataaatatctagtcttctcctgggattgtggagagcagttggctagatgcttgatgtttgggagaggatttgaggttataataccgtcctaaaaacaacctttccaccatttttgcataatttacccttttctccttcagctcacttctagacaaatctggtgctaccactgtctaaacttttgaagattgtgcaatccaagttagttgcctgttggctttctccactgctgacttaggacctcagctttctcagatctgaaaaatatatcttcaccagctggttttccagttctaaaattttgttgttgttgttttcttctctctcttttgttccatctttaaagaattatgcaaaacatataaacacacctgcatccatttattgtacttttaattatgtttcaagtaggaatgaaagtaaaagccagtgttcaatattttatccttacttgaaaggataaaatacaaaatactaaataatattaaatactaaatacttacatccaaaaatactaaataaccccatggaaagatactctcaactcagaagtgcttgatgtagcattttggggagttctcagcagtgccctggccagctccctcagtttatccaatatactgtaggctgtcagacgtaagggtcattaaggtattcttcccttgagaaaacaccatgcaaatagctttaaaaagttactggcttaagaaaattaccaaggtcatctccagacaggtttttaaagttacctttgacattctcatttgtctgttcttccacttttcaagcatacattggacacatagcctgagccatgcatattgccatgagttggcaaaacaggataatgaataagagactgacctcatgaaccttccatgctatcacggaagacagacaccagtgttcaagatgcaatatggtaaatgccatcataaagatattaacaagtgctggaggctctagggggtggaagtgattaagtcggtcttcaaaactcatgattggaaatgtgtcttaactctcactattcaagcaataattttccagaacaatcccctggccaatttataactggaaaacttaataatttcccagcaccataatagagtcttaacttggtcagaagagaatttgaaagtgattttcagcttcttcattttatctgggaaaacctggctcaatcctggtgaagtcaagactgaaacttaggtttcttgagtctcatagtaatatactttccactaaattatattgagcccccacccaaaagcccaattattttttgatatgactgaaattttaatcagtagctctgagtctcagagatctggacatactgattttaaagacctctaagaagttctttcaaaacagtaacttaaatgaaggagctgtactttggatacagatacaggactccaaactcgttcatgtaatgccataaagagagaatggcttggagttttcattgcttcttttgaaagcagggctaccattcttaagctagaagaacagggctcttcttatttgtacaggttagtattgattgaacttcaaatcagccagcaaattcaggggatagttgtctggatgaagcttcggtgtgtcattttgcaatatatttttgagacatttctgtgtttacattgccttgaaagtacacaacagatgtataaacatataatttaaacattttggagaggcagacaatgttgtcttcagtgaacacttaagaatgtaatgtattctgttaaatgtatggtttcatgacttaattaatgattagcaaatggtatattatgggaaagctaagaactataaaaatatattgttcaattgtcagttctttatcagtaatataatattaacaataattacattactcattcaaagcacaatacatcttgcaagtgatattataatatcttcccaaagtatattaactttttatttccacaaatgcttagattgtaattttctcaataaagcttttgcttgatcctcttctggtaagaagtccttctttccctggtccttcaaatctctcctgtagtgttgatttctttctgtgctatactatagttccttgggtcctagcttgttttctaggctgtgaatttcatgaaggcaagggctgtcttcttctttgtaatttcagtggcttggcacatgttaagcatataatagaaggtaaattgagttaattctatagggactatgtcattctgctttgtaatttcagtgacttggcacatgttaagtatacaatagaaggtaaattgagtgagtactataaagccctcaatatattaacataaaatctttgtttatttaatttttatagcacttttcattatatctgaggcataaagtagctaaagtctcagggatgatgtacatgtaacacacatgcttcaagatttccttctttcacttttgaaacgcctttcatctctcaccctaggctgttagagccctctaaataacggatcctattggctggacaaggcagttcacacctgtaatcccagcactttgggaggccgaggtgggtggatcacgaggtcaggagatcgagaccaacctggctaacacggtgaaatcccgtctctactaaaaatacaaaaaattggccgggtgtggtggcaggcgcctgtagtcccagctacttgggaggctgaggcagaagaatggagtgaacccaggaggcggagcttgcagtgagccgagatcgcgccacagcactccagcctgggtgacagagcgagactccgtctcaaaaataaataaataaataaataataataataatggatgctattccatatgactgaacttcctgttgtccatggaagagaatcatcaatcctcatccctgggaaatctggctcggcataaaaactttctcctgcaccttggtggaagaaattcctgtgctgtttctaaaaatgagaaagaaaaagaaaagaaaacattctctgttgttctcattcttttttttttttttttttgagaaggagtctcgctttgttgtcaggctagtgtgcagtggcacaatcttggcttattgcaatctccacctcccaagttcaagcgattctcctgcctcagcctccagagtagctgggattacaggcacctgccaccacacccagctaatttttgtgtttttagtagagacggggtttcaccatgttggccaggatggtctcgatctcctgacctcgtgattcatttgcctcagcctcccaaagtgctgggattacaggcgtgagccaccgcacccagctattgttctcattcttgaacaatggggaacagcatgattctttattattatttgtgtatctgtgttgtgacctgtcttctggttctcttccttcttgacaaagactggatgtgccattctcggtcagctcccatgaagccagctctgaacacctccttgcattctaagtacagccttgtcattagttacacccctggcattagtgactgagattgcacttctcaggaccttttgtgagtcccaaaaaagagacttctgcatcagttcaaagggtggcatttctggagctacaactattacaacctttgttgttgaagataacctgggatttctgcttcttgaggcctgaggttagagatgtttcagtttcctcaactcaaaagcggaaactgaaataaatgggtaatgaaggcctttcttgtccttgatgtgtgaatccattttctggacattcatttctgtgactgtcttgtccttttcctcaacaattcatctgttacttttgcatgggttattcatctggttagtattaacattcttttgaaatcatcttctatattaataaacacttcacaaatctattggtgaagtcgccttagaatcttggcttaatgggattatagtgaataattctttttctttgattctatctctgtaacaaaaattgctgtggatttatgtatagaaaactagatatgttgtaaaaaggtcagggttcaagtttagctctgtgaccttggacatttcattttatctttctaggccttagtgtgttgtaagcggaggtaaatatcttgcatctggggttcttgcggcggggattcaaggagagaaagtatttgggaagtgctttgtaaacgatattgtactatatgacaagcaagttgttattaatagaggcctgactactcccaattgtttctgcttggtcagttagttctagatgagtaaattggagaggacagaaaggaaggaagtggcactgggcggggagccgggtgatctggaattcatccgggtgctgttcggcggtcagtcggtgacttaacgtgaccttggcaaagtcgctttgcctcatgtgcttctgttacgtcattggtaatatgaggtgggcgaaagaaaagatgatccagagacttttttccagtttataaaagcatgtgattattagagtttaaattatgagattattatttatttaaggatatcattgagtttagattattaaatcataagtcttaccaatagtgggcccaaataatatacatattttgaatatataatttcaatgaattattttaaagaaaatgccaaaacttcatcttttaaccactgaaaaggaactaatgaagtctcctattcactacatttttgtattgtatttggaaggaatgtgtgtatttaaagggaggctaaggattaacagatgaaattctgtatgagaaaccaattgtgtctacagcacctaaagcacattctgttgtgatatattctctagttactttaaatttgtttgttttccttcatttaaccaaaaaatgaataattgtaaagaatcaggcactatgttaatcactgtagttaagataattcctattataagacatggttgatctagtgtagaaagcaacatggcttaaaaattatacagggatgcctcgtgtcattgtactttgcagatgttgcatgcgtcgcatattgaagctctgtggaaaccgagagttgagcaagtctattggcaccatttttctaaagcacgtgctcacttcaggtctttgtgtcacattttggtaattcttacagtcttttaagttattctattattataactttcatggtgatctgtaatatttgatgctattattgtaattgttttgggagtgccacaagccatgcccacataagacaacaacttaatccataaatgttgtatgtgttctgactgctgaaggaagagaaacaaatttaaagttactagagaatatatcacaccaaaatctgtttccagtgttgtagacataattgacttctcaaacagaatttcacctgttaattcttgtgtgtgttctgactgactgtctgttccccatctttctccctcttctcaggcctatttcctgagacacgaagatattaaaattaagccaattagtcaccctaaaatggcccttaaatgttcaagtgaaaggaagagtcacatgtctctcacttaaaatcaaaagctagtaatgattaaacttagtgaggaaggcatattgaaggctgaaatacgctgaaagctgggccacttgccctaaacagttagccaagtggtgtatgtaaaggaaaaattattgaaagaaattgaaagtgctactccagtgaacacaggaaggataaggaaatgaaacagccttattgctgatgagaaagttgtagtgatctggatagaagatcaaatcagtcacaacatttccttaagccaaagcctaatacagagcaaggctctctcttcaattctgtgaaggctgagagagatgaggaagctgcacaataaaagttagaaactagcagagggtggttcatgaggtttaaggaaagaagccatctttgtaacatagtgcacaaggaaaagctgcaagtgctaatgtagaagctgcagcaagttatacaaaaatatctagctgagataattgacaaaggtggctacactaaacagcagattttcaatggagacttcatagtcttctattgaagaaaataccaactacaactttcatagtgagaaagaagtcaatgtctggcttcaaagcttcaaaggacaggctcacttttttgttaggggctaatgcagctggtgactttaaatggaagccaatgctcatgcaccattctgaaaatagtagggcccttgagaattatgttaaatatactctgcctgtgttctataaatggaacaacaaatccttgatgaaaggccatttgtttaaaggatggcttactgaatattttaagcccactattgagacttactgcccagaaaaagaaagatttcttttaaaatattactgcacatttacaatgcacctggtcatccaagacttctcatggagaaatacaaggagattaatgttgtttttatgcctgctaacacaacagccattctgcagccatggatcaaacagttatgatccatgaatgatcaacagccatcctatagctatggatcaaatagctatggatcaaagagtaattatgactttcaagtctttttatttaagaaatatatttcataaggcttacttgctgtagataatgattcctctgatggatctgggcaaagtaaattgaacatcttctggaaaggagtcatcatttgagatgatattaagaatatttatgattcgtaagagtaggccaaagtatcaacattaacagtagtttggaaggagttgatttcaatcctcatgaataactttgaaggtttcaagactttggcttatgtctataatcccagtgctttgggaggcaaagacaagaggattgcttcagtccaggagtttgagaccagcctgggcaacacagtgagaccttgtctctacaaaaaaatttttaaaaattagctgggcacagtcatgcaatcctgtaggaggaactgtcaaacacttataaaaccatcagatctcctgagaactctctcactataatgagaacagcatggaggaaaaactgtccctacaatccaatcacctcccactaggtttctcccttgacatgtgaagattatggggattaaaattactgatgagatttgggtggggacacagaaccaaaccatatcacagggtttgagaggatttactccagttttgaaagaagttctactgtgggtaaaatgctatcaaacagtatcatattctataaaaaacttttgtgaaagggagagtcaatcgatgtgacaaacttgagtgttgtctcattttgaggaactgctaaagccatcccaatcttcagcaactaccatcatgatcaatcagcagccatgagcatcaaggccagattcttcaccagcaaaaagattacgaattgctgaaggctcagatgattgttagcaattttttagcaatgatgtgttttcaaattaaggtgtgtacattattttttagacataatgctcttatacacttaatagactgtagtatcatgtaaatataacttttctatgcactagtagccaaaaaatttgtgtcacttgctttattgcaatattcactttattgtggttgtccggaacccaacccactatatctgtaaggtatgcctgtataaggaagataaaacacaattccaaaattataggataagggattaactttgctgaaaagatagagggaatataaaaacagcatatttaaaatgctttatagattataagtgtttcttatgtaccgttttatttaaatattaaacagactttgtcaggtatagaacgaaataccatcttttggtaatcagtttggaatctcctgcaactctcaaagcctgagcaatgtagagaaaatactaataacatatattgttatttaaataattaaggtggatagttatatgtaatcaactctttaaaatttctgaaagttttgcctaaaatgacttagactagttttttttaaatttaaatttttattttttaacagagtcttgccctgtttcccttgctcaggctggagtgcagtggtgcagtctcagctcactgcaatctcctcctcccgggttctagtgatcctgccacctcagcctcccgagtagctaggaccacaggtgcatgccaccatacctggctaatttttgtatttttgcaaagctagggtttcgccatgttgcccaggctgatcttaaactcctggactcaagcaatctacctccctcattctcccaaaatgctgggattacaggcgtgatccactgtgcctggcctttttacatttgggcatgaatattaccctattagtcattctctttttaaataagaaggctataagaaagttttcaacttacataatgtaggtatttagttctatgtatattttcaaggtgaatttctctaacacttatagcacatttgtttgtgatcacaaagctaggagaaaccttagttccattacctaactttagaattatccacaatagccaagatatggaaacaacctaagtgtccatagaaaggtaaatggatgaagaaactgtggtatatatataataaactacaattcagcctttaagaaaggagagcctgacatttgtgacaacatggatgaacttggagatcatcccattaagggaaataagccagacacagaaaggaaagtatgcatgatctcacttatacgtggaatattttttaaaaagtcgaatacatagaaatagacagtagaatggtggttaccaggttattagagttgtggtgggaggtgctaagggagggagggtaaaaagtttcagttatgtaggatgaataagtttgaagatctaatgtacagaatgagggctattgttaataacattgtattgtattatatactgggaatttgctaagagcagattttaggtgctcttacaaaaaaatgctatctgagatgatggaaatggtaattggcttgactgtagtaatcatttcactatatatgaaaacatcatgttgtatactttaaatatataatttaaaaaataatctaactttacagataatgaatataatatgccttttttcataaaataaaattattttcataaaagatgtgtcttgctcaatcacaaaatcaggactataattatggtctctgagaccagttttcttgccgctataccacagtcagagtaaagatcgcagcaagtagaacttcatttgatatgggaggtgcctaaaattctcttggttgctgtttttctgtcagcacaatatttttacatgaattctttgaaaaataattaatgtggtgtttaaagttactactgcttgttgatgaaaagagtttcactgtgtaaaatatttgattaaatttattctgagccaaatatgaggaccataacccatgacatagccagaggagataccaagaacatgtgcccagagtggtcgggctacggcttggttttatacgttttagggagacatgtcatcagtcaatacctgtaagatgtatgttggttccatctggaaagacaggacaactcaaaggggcagggctcccaggtcataggtagattcaaagattttctgattgacaattgcttgaaacagttattatctgaacacctggaatcaatagcaaggagtgtctgggttaagataaagggttgtggaaaccaaggggttttatcatgcaaatgaaacctccaggtaccaggcatctgagcttttatcagacttaaaaaggtgccagactcctcttagtgaattatctcctggactagggaaaagatcagaaaagggaagaggattctctacataatgtagatttccttacaagagacagctttacagggccatttcaaaatatgtcaaaaaaatatattttggagtaacatacttcaatttctttcagggcctgctaccagtcatgttggaattttattgctacaaagagtctattttgtcaatcttaagatctctgtttgaatgttaatgctggtcagttgtgcctgaattccaaaggagcaatgtataatgaggcatgtccgacccccctcttcccatcatggcctaaactagagttccaggtttatttggaatgcttttagccaagaagggttctataagttgttggaggccttagaattttatttctggttttcatattgtacagtactaacatttcaaggaagtttgactcttttgtggcctcaaatgcctttaataatgtatctgctcaaacatgttaagtagttaaacataaaacaaggagatatggtggtcagagttattgcttccatccttgcctcagtttcagtgacaaatctttaaaaatgaaatgtatctttttattatgatgtgacaggactttatttggatttgttttattgctaagtaaaattctaattttactttatatgaacacattaaatatagtgagccttaaatttcaataactgtggctacaatttaattttttctaagaaaagcccaattttctggttttatgaatgtgatctttgtttatatgttatattacttggatattgttaaagcattgtgtccatttttggactgcagtttagaagaagctcataaaaatagacagagtatgtatataaaatgagcactttaatggcaggttaagagaactgacgttgcttaacctgaaaaagagagagctctggaaacgtgctaattaccaccctcaggcatctgaagtgattttgtaagaagtactgtagtttttctttccacttagaaaggagagatttgggttctatcttgtgttagaggtgatgggagcatctcagggattcagcaagggtaattgcagttttcatctgttaatatctcttaagagaaggatacaatgaaatgattaggtatgatgaaataacttactccagcatgggacattgtctctcaggccttcctcctaaagatgaggaactagaagctcagagagtgctggagagagaacttacatcaagatcttgcatcaagccttacatcagggcttttgcatgtctctgcactacttctgaatacttactgagtgatctaatatttcattagagttgactacacaaaattaattggaatgggaggtcaagctcaggataaattgagaaatgcacctctttccaagtactgcaggtgatggcttattttgttagagtggtgactttctgctagtgtggctgaagaggaacagatgtgttgattttgattgatttgcatttagaaattatgcaatatttgtaacgtgtcctagatcattgtgctcttcttttataaaatagaaataagcgtgtaggcgtggatatattgcaccccaccatgaccgaatagttattacttggaatttttcacacctagcagtggtgctgatgtttcaagtatagctttttgagagccatgattaccactgactcattccttttctatgacttgaaatcgtgtaggaaagggaagagtagataagtttaaagagatttccttgttgcagaaaacactaaggtataacaaaatgaaagagttgcaaatggcatggatgatgtgttgcccaaaccctcctctgagagatgtaaaacttgaagccaggaaaaagacatggctggtatttggagataggtgaggactagaaaccaggaataagaaggaaaaacaaaactgaaagctgcaaatgggttataaggatttatcgggaaacactgatggcaggtttttagtggctaagacaaagttatcacccatatctttatacagaaagagggaagacaactctttcatgacatataactctctttaaagcattaacatacggaacttttctgaaagggtcaaaggggactaatactgaaaatggaagtgaacaatgtgatgagcactctgaaagggtgaggtgtattgacaactaaggtcttctcactggtattttgtggtttctttttgaaaaatggaggtgattctcaccttttgggggaagatctgttgctatttgaccatcattggcaagtatctaactgtttcacatctccagagaaccaaaggtaaattataaagctgacaggaatataaaaattcatcatttctgctcagtgtatgaatttggattaatatttaatgattcattaaatttttgtattttgtcttcttcccactgtcagtgagtaaggtttaatggaattgaatgaagtctatgtttactcacttttatggcttctgtgtcctcaggataatgtctgacgcatattaacactcagtaaatatttttattattgttgttgtgtatacagccattgctattcttatttttggtattatatgatattggtgtttagaagggacttagaacctggtgtaattcctgtattttgtgataaaagactgaggctaggaaagggcctgtataaacttatacagctacataaacaaaacttggttatactgacttcatttatctcctagtccagaacaatacatttttgagtaaacaactttgttagaggaggtcatatatagtatatagttttgatgagcatgcacattatctgagattcaatactttaataaccctcttattaattgattagttaattcattaaaatattgatttgttaattcaccaatatttcttgagacttattgtgtgctaagcactgctttatatagagcagtgaacaaaagccaatagagttgtctgagtttatgaagtttaccttctgtgatgggagagagactatcaaataaatagaacattttatgtcagatgttggcaagtatcatgaaaaaaaaaagatcaggcaaggggacaggggattttaggagacattagcggattaatttagaattttacttaggtaggtcatgaaagacctcactgaagaggcaacatttgcacaagcacttgaattaggcaagggagcagcaatgagcaaacaatggtctatttgggagagcagcatttcagatggagggaacagcaaatgcaagtcctctaaggagtcgtgtgcttggcatatttgcaaagcatcaaggaagccagtgaagtcagtgaaagtgagaatgttggagatgaactttggtgaggccacagtacatctccatcttcatggcccatgtctcctgaccagtggcttctgtcacagtcaaatctcagatatgcaaggcaacactcctgggactagtcagtccaccttctccctattatagggtgctttctgccataaccagctccttcaggcaagtaacatttgagccttctgccaggttgaaataataagtgcctcctgaatactaaactggggatgggagttgaccttcagtgagtgcccttgtatatcagaaatttgggacagtatcaataatttccccttagagaatgtgcatttctcttctgatgcaagagcctcagattgctgatgggagagacaagaaatgcaaagtagtttgcaagaagtgaaattctttctattctgtttccaaaagcaatgcaagtctaatgtataccttcgaagagttgttgtagactcagaccatctttcatttaagagagctgtgtgtttttctacaaggttcctcagagcccctctagtaacctttggggaatcattgcattgctaaatcaccacattagcctgctgccttctggaaaatgctgatcccattgcttctgtcagcaggagaagtcagcccttgggctggaaccaaccatattgagaactaactgagaggcgggggagggtggggaagcccttaaaaagaagttcagatcttcagggtagtgtggggggcaaacaatcctaggaaatgctgtactaaatagaaagcacctgtttttattattgctaatcataaaatcacttttaaaaaaaatgcattacagtttataaagcttttccctatcccttacctcatttagtctcctcttcaatctagtgtggccttgttatataaaatgatacaaaccagcacatctgtatcacccgaatcttgttagaaatgccccacacagacctactgagctagaattcacatttaacaagaccgctagcccctttaagtttaagaacattgctataaagcctacagaacaataatttcttctgattacggtaaggaaatagagaattagcctcattgggtgactaagccaaggtcacccatttagtaagtagtgaagtcaggcttcatacccaagctttgtgcctcttgttccagcagtctcttggctgcagtcacttcccactccacaatcccttcatagcatgcctgcaatgtactagcttttgaaagaaaaacaaccctttttctctgaacccacctgctcttattttctccaccagctgttctgggctcctccctcatctgtttgctgattctagaagtgcaaacacactgaaaagctctgcagccattgcccacatggtgccctcaatgagtgaatctgataagaattgctagcatcagtcacttgctcagagcttctctgcaaaaaccttctggcctcacttataggaaagggtaagaattcagaacaagacaacagagatcatgcagctggaacatactggtgggtacaaatggggttttccactattgcttactgttaggaaatgattaaaaaaaaaaaaaaagctgagcttagcatcacagaaaaacacatgtgcagagagcttcatagcccaccattaaacagaatctttctccgtcacccaggttggagtgcagtagtgagatctcagctcagtgcaaccgctgcctcctggattcaagtgattctcctgccttagcctcccaagtagctgggattactggtgcatgccaccatgactggctaatttttgtatttttagtagagatggggtttcaccatgttggccaggctggtcttgaacttctgaccttaagtgatccaccctccatggcctcctaaagtactagtatcactggcattagccactggcacccagcccttaaggatataaaacgtgcagaaagtgagtgcctcatcctcgccaactaattgacccaataagtaggcaaaacttagtctgctgggtaaacaacccctcatccataggaatcatactttgagtgagggaaaattctaatagaattttaaatatttgattgataaatcctgaactagaattccttaagtaagtaaagctcactgatctcaggttgaattctcacattttattagttagtttgttaactgaaaaaactgacataagacatttcctgtgaacctactacatacatgaaggtcatcagagtaggtgataggaaagtttctggtatgagtgatatcttccctaagagcctgcagtttaacagaattcacgtatatgtacatgcaaaatgataatggaacacaaagggacatttctcccttaccttccacctcaaagaatgaagtcttaatctaggaggtggcatttgaattatttatggacagaaggtaagtttgggacattcagagtctgcagagtagagaaagtcatgggcaaggtgaaaggaacaatgtgaataagacacaacgaaaaatgctaggtttgtatttggaatagcaaataatgtgttgaatatgacttgtaatctatcaactcagagataaatatgcttttgttttctttttttctgattgtatatatttaaggttacatgatgttttgatacacatagacacagtgaaatgattactactgtcaagccagttgacacatctgtcgtctcacatagttatctttttttttgttaagaacacctaaaatctactcccctagcaaatttttagtatatgtacaaatattattcacagtagtccttatgctgtacactagatctctacttatcctacacaactgcaactctttaccctttgaccttcacctccccatttctccccaccttccaactttggtaaccagcattcctctctctgtttctatgtatttgactgttttttagtttccacatataagagtgatacagtgtatgcctctctgtgcctggcttatttcacttagcataatgttctccaggttcatccatgttgttgcaaatagcagggtctccttttttgaaggctgtatactattttactgtatactattttactgtgtacatatatatgtatatatatgtacgtatacgtatataccccatctctacgtacatatatatgtatatatgtacgtatatgtatatatatgtatgtgtatatatgtacacacacatatatgtatatacaccacaatttcttttccattcatctgttgatgaacacgtagattgtttccattatcttggctattgtgaataatgctgaagtgaacatgggaatgcaggtatcttgataaagtactgatttcatttcctttgggtgtatacccagaagagggattgctgggacatgtgatagttgtatttttaattttttgaggaactttcatactgttcgtcataatagctacaccaatttacattcccactaacaacgtataactgttctcctttctcaccacccttgccaacattttttatgtcttgtccttttaataataaccatcctaacaggtgtgaggtgatatctcatcgtagttttgatttgcatatcgtaatgacgttgagcaccttttcacatacctgttttatatttttatgtcctccttggagaaatgtctattcaggtctctcacctattttaaaagtgagttatttgatttttgttattgagttgtgagttccttatattttggatattaactccttatcagatacatggttcacaaatattttctcccaatctttagtctgcttttccattctgtttattgttttctttgctgggcagaaatttttttgtttaatgtagtgacacttgtttattttttcttttgttgcccatgcttgatgtctcagccaaaaaacaataataaaaatcactgcaaaggaaaatattagtaagtctttttcacatgtattcttctaggagttttacggctctgtgtttagatctttaattcatattgagttgagtattttgtagtgtaagataaggttctgattttattgttttgatgtggatatatagatttcccaacatcatttattgaagagactctcctttcttcattgtattttcttcccctttcagaaattagttgactatatatgcctgggtttatttctggcctccctattctattccattagtctatgtgtcggttttcatggtagtactatattgtttttatcttggtaatataatttgaaatcgggaagtgtgatgcctccaactttgtttttcttttacaggactgctttggctattcagggacttttgttgttccataaaaattttagaattaattttccaatttccatgaaaagtgaaattataagagggattgtgttgaatctgtatattgctttgagtataaaaattttaacattattaatatttcaatatatgaacaagacatatcttttatttgtatcttcttcaatttatttcaccttatggttttcagtatacagatctttcacctctttggttgaatttatttctaaccattgtatttttttaatgctattataaatgggcttattttcttgatttcttttttggacaggtaatatttagtgtaaagatatacaattgatttttgtatttttttaatcctgcaactttactaaaaccattctaagagtttgttgtgaagtctttagggttttctacataaaggatcatgtcacctgcaaataggatagtttatatttggataccttttatttttttttttcttttctggttattcttgctggtacttccaatactgtgttgaatagaagtggtgagagtaggcatccttgccttaagccagaccctagagaaaagcttctggttttctcccattgattgtcatgtagactattcataaatggcttataatatgttgagtaaattttctttgatgcctattttttgtgagtttttatcatgaaacgatgtcaaactttgtcaaatgctttttctgcatttattaaaatgatttttttttttttttttagacagggtctgctgactctgtcacccaggctgctggattatagtggtgtgatcttagctcactgcaacttccactctgcaggctcaagtgatcctcccagctcagcctcccaggtagccaggaccacaggaaccacaccaccacacctggctaatttttgtatttttagtagagacagggtttcaccacattgtccaggctggtcttgaatgcctgagctctagcgatctgcctgccttggcttccaaagtgctgggaatacaggtgtgagccaccgcatctggcctgatcatgtggtttttaatcttttatattgttaaagtggtgtatcacattggttaatttacctatgttaaaccaaccttgctccccagggataatctcacatagtcacaatgtataactttttagatgagttgtaaaacttggtttactagtattttattgaagatttttgcatcgatgttcatcagaggtattggcctgttgttttcctttcctgtgctatatttttccggccttcatatcaggataatagtggcctcataaaatgggtttgtatgtattttctctacttctattttttaaaatagatgaataggatggatattaattattccttaaatgtctggtagaattcaaccatcaaggcatctggtcctgggctttactttgttgagaggtttttaattactacattaatctctttatgtgttatttgtatgttcatgatttctctttctttgtgattcaatcttagaaggttgtatgtttctaggaattttccatttctcttaggctatcaaatttgtttacagataatttttcatgatagtccttcatgtcctttttatttctgaggcatttattgtaatgtttccactttcgttttttatctcgtgtctttttttaaattcttagtgattcaagctaaaagtttgttaattttattttttcaaaaactcaactcttagttttgatttttaaatagttctagtttctatttgatttatttctgctgtgagctttattactttttttcttctgctaactttggacttagtttctttttctttttctagttttttgaggtagaatgttaagttgtttatttaaggtctttcttctttttaatgtaggcattcactgctgccaacatcctacttaggagtgcttttacagtatccatagtttttagtgtgttgtatttccatttttgtttgatttaagagagtttaaaatttcacttttgatttttttctttgactcatcggttgtttagaagtatttactttaatttccacatatttatgaattttctagatttttctccttttattggtttctagtttcataccattgtggttggaaaagatacttaatatgatttcaatattcttgcatttacacagccttgttttgtgaccccacatttaatctatactcgacaatgttccgtgtgccattaagaagaatgtgttttctgttgctgatggatagaatgttctgtaaatggctgttaggctcatttgtactgaagagtaattcaagtctaatagtttatgattgatattttgtctagataatctatccattgttgaaagtgggtattgacacccacttctattattgtattcctgtttatttcccccttcggatctgttaatatttgctttatatgttttggtgttcttatgttggatacctatatatttatcattgtggtagactcttgatgcattgaccccttcatcattatataatgaccttatttgtcccttataacagtttttggcttaacgtctagcttttccaatataaaagctacctctgctctctttaagtttccatttgcactaaatatcttcagtctgtgtatgttcttaaaggtgaaatgagtctcatgtcagcagcatatatttgggtcttgtcttttttaaataatttatccactctatgtcttttgattgacaaatgtagtccacttacatttaaagtaattattgatagataaggatttactattgatatttcattaatcattttctggatattttgtagatccttccttcctctcttgctgtcttactttgtgattgggtgatttttttttttttttttttgtagtgttgtggtttgatttctttcttatcttttctgcatctactataagtttttgctttgtagttaccatgaagcttatgtaaaacattttatagttatacctgtatgtctactttaagctgatacccactttgatcacaggcaaagctttatggttttaccatttccccacattttatgttgttgatgtcacagtttatttctttttatattgtatatcaccattaacaagttaatgtagctgtagttatttcaaatactttttttcctttcaatctttatagtggcactataagcaacttacacacaaccatttcagtattatggtattctgattttgactatatatttacattttcagtgagttttatgctttcatatgtttttatgttactaattagtaagccttttgtttcatcccaaataagtctctttagcatttcttataaagcaattccagtggtgatgaactccctcagcttttatttgtctgtgaatgtcttttttctccctcttttctgaaagacagctttgctatgtaatgtatttttggctggcagttttatttctttccacattttgagtacatcatcactctcacttggcttgcaaggtttctactaagaaatctataatggccttattggtattcacttgtatgtgatttgctttttttttcttcctgcttttaaagttctttcttagttcttaattttttattgtaatgtatcttggtgaactcttctttgggttgaatttggttgaattcctttgagcttcatgtacctgcatgttcatttctttccccaggtgggaagtttttagccattatttttctaaataatggttttctgtccctttctctctctgttcttctgaaaatcctattatgcaaaaaatagctctcttgatggtgttttatatatcacataaaattttcattcctttttttcttttttctactcttactatatgatataaaacaatctgtcttctagtttgcttattatttcttctgcatgatctattcttcttcaagctctctattccattctgttgttcagtcattgtattatttagctccaaaatttctgtttggttattttctaatgttttctatcattttgttgagcttataattttgttcttttattgtttcctaattttttaaactgttttttgtgctctcttgtttgctgaacttcttttaaaacgatacatatttgtacatattcatgaggtgcatgtgatactttgttacatacatagaatgtgtaatgatcaagtcaggatatttagggtatacatcactttaagtatttatcatttctatgtgttgggaacatttcaaattctcccttccagctattttgaaatatataatacattgttgttacctgtagtcaccttactctggtatcaaacattagaatgtattccttctatctatctatgtgtttgtacctattaaccaaccttactttatcgccaacatccatataccccttccatcttctgatatctatcattgtactctctacatcctggacattgacttgtttagctcccacatatgagtgagaacatatgtctttctgtgattggcttatttcacttaacatcacctccaaccaattcagtccacgttgctgcaaatgacataattttatttttttatggctagatagtatttcattatatatatatcccacattttatttatccgtttgtccactgatgaatttttaggttgattccatgtttttgctattgtgaatactgctgcaatacacacgggggtgcatgtatccttttgacatactgatttccttttctttgaataaatatccattggtgaaaatgctggattatatagtaatagtatttttagtttttcagaaatctctatactgttttattttttactgagcttctttagagaattattttgaattctttgttataaaattcatgaatctccaattcttctgagatcagacaggattgggcatattcagagtggtatggccatagacaatgtccaattctttaaggtcacttattagaagtttattgtgttcctttggtttcatattcctctgattcttcataattcttgtagccttacaaagccttacaaatgtagcatttgatgcgtgcattctttttccaaactttatagactggttttggtaagagaagaccctcacctgtggcagaggttggggggtggttatagagggatgcatgctggggcgtgccatggcaccaggtgtagtggtgtggggcaccatgaatggaagtatacagtagctccaggtcaaggggtggatgtggtgtctcattggctcagaaagctgggggtccatgacattggcaattaggtcgttcttggtggcaagagctgtgtgaggtctgctatggctgtgagggtcctcagtagtgtctctgagtttggtggcaaggggctggggcagaaagtgatggggaccatagtcagtggtgtgcgtgtgctcagctgtggcggctggctgaaggcatgtgtgtggcagcaaaggtcagttgctggctgaaggcatgtgtgtggcagccaaggtcagttgctggctgaaggcatgtgtgtggcagccaaggtcagtggcaagcttgtgcatcgtggcaagggctggcagcaaaggaaggggctaggactgactgcatgtgcacatgttgtggcagaggttggcagtgtacacatgcatgatggcaggtgtcagctgcgggttgggacaggggtcaggctgactacatgtgtgtaggcagtagtgggcctgagctggagatatgcacacctaggcagctgcaagggccagttctgggtacaagaatagtggtggaggcaggagctggggggtggggcctgctacttacacatgcacaggtacaggggcagggttgggtgcatgccctagcctgctgcaggggacaaccttgggtgtggacatggtggtgatggctgggcccctgggccggagctcctttagagacagcagctgttctttgtttcctttaaattaggccaacccaattctgactttgactacctctccttggtggtgaattatttgtcagtcactattggaccttatcccacctaccaggcagagtcaaagttctgcctgggtcttatgagccttaacccatttgtggtcattggccactgttatggaatatgtgccatgtgtggggcgtgagagtcttcactgccaccaagaactgccctttgcctggggttcagatccccaggcaagtcacatggccatcactccccagaatgctactgactgtctccaccctgcttcctcttaatacccctgtgtatatgtttttagtcccaaggcaaatatttgtctcatctagagattcttttttttttttttttgatgtgagagactattttattaaaaataaatcagagggctgggcacggtgactcacacctgtaatcccagcactttgggaggccaaggcgggcagatcacgaggtcaggagatggagaccatcctggctaagatggtgaaaccccgtctctactaaaaatacaaaaaaattatccagttgtggtggcgggtgcctgtagtcccagctactcgggaggctgaggcaggagaatggcatgaacccagaagccggagcttgcagtgagccgagatggcaccactgcactccagcctgtgtgacagagggacactccgtctcaaaaaaaaaaaaaaaaaaaaaaaaaaaaaaattagagaaaaaagtcattgtcttttttttgtactttaagttctcgattacatgtgcagaacgtgcagttttgttacatatagatattcttaagaaatctctttccctcatatacctccatccctgagccttacacatctccttgctgagtatagtcttttctaagacctgtgatctccaaataacttctgtttttcttattgaaaaaatacctgagtcaaggaaatactaccttaagtaacccacttcaaatagcacaggaaaaagagaagaacaaatgtaagttaatatcttaataaacaatggcactacattcagaacaaccggggcatgaggtcggtgagatagaatggtgggtgcccaaactggacactttttggggttgtggtgatggggagtggtgtgggatgtcttccattgacttcagtgactctcctcgctaagatcatacaagcctacatttcagtctcggttccaactttctgaccctttttatcatttataaacttgcctctgtgcctgtctttctctcttctttgttcagagcaagagttggctctcctttcattttaagccagtcaaggtttcccctagatgctgtcacctcctgtgtcttgtgggatgctgcatcagcacctacttctaagacgctgatattttcatcctctctactgacttctcagctaatcgacatgctcacatctatcctatatgaatacgaaatcagcacatgaaaagcccttcttttcaccttccaactctttctagctccttccttctccattcttcacaacatccctgattgcgccacgctttgcctccagggctcaggagtgcctgagagacagcctgttcagtgtcagtcatggagacagatgggctctgccacttacagtatattctcctggagaaatatactgtaagcttttctaagtcccatgttcttaatttaaaaaatgataacagtgaggacaaccttaaaatactattgtcaggattcaaaaacaaagtaagtaaatctttttatcacagtccttatatataatagataggaaagatttggaagtattattatttttctcaaatattgcacccttagcctgaagtccgattctctccctcttccatccttccggttttcctgggaaatttctgctatctatttatactctcctccgtgctggtacctgctgtcacctccttccctacctttccccttgtctgatgtgcccccactactctctcacgatacctaagaaactgttttacagttatttgaatttttgtctccctctcagttctgctttgcgagctcttggagaacaggaactggggtgtaaatcttttatccctgtgcctttgttatttggttgtgagcactcaaatgcttgttgagtataattttatttcacaaacttttatagtgcttactgtgttctaaacactttagagatattaactttgtaggccaggcacagtggctcacgcctgtaatcccagcactttgggaggccgaggcgggcggatcacgaggtcaagagatcaaaaccatcctgactaacacggtgaaaccccatctctactaaaaatacaaaaaaattagccgggcgtggtggcgggcccctgtaatcccagctacttgggaggctgaggctggagaatggcgtgaactgggaggcagaggttgcagtgagctgaggtcgtgtcactgcactccagcctgggtgacagaacgagactctgtctcaaaaaaaaaagatactaactttgtaatctttacaacaacactatgatgtggatactattatcttcattctacagatgaagaaactgaggcacaaggaggtaaatatgcccaaggccacataacacaagtaaataggggagttgacatttgaacaacaaggtcagtctccctcatccacgttgtgtttattactatctgccctgggttaatattattatagattccttgcctgcttgaaggattgtaatgaagactatgatatgaatgaactttgtagactgaaaaatattgaatggataaagaaaaagtgttatctaaatataagtcatgacaactaaaaagagagcattataaacataacactttatagaaatttgatgatgatcatcaaaatacgcttttaaaccctgattttgaatcactgaaaagagagactgctattcttatatgcttttcaaaggtaagctgaaactgaaaaatagtttaacatatgtcacctctggagtgtggtcccacagtcatttttctgcagggatcaattctacttgagaacagctgtttagagcagatgaacttcctaaaatggccctggagagaaaaaagcaaacgggcagctgcttgacctttttccaaatgaaaaaaaaacaaaccctgatcagttggtcttgattggcatgttcagagtcaaggagctttagatctgtttttataacaaatcactcgtgatgattactcactgctcactaacattgtatcacagatcttctggtgggtctgatgcgtatttccgttttaaccccgttaacacaggcagcttggacagcatgtgccctctcagtggtgacctttggggaaaagcaacagagagtgtttctgcagatcgcctgtgtcagaattacctggaagggttgaaccatgcaggttaatgggatcaaacttaaaactaccgattcataacctttgggagaggattctaagatgttgcatcgagagcaggcactcccaagatgactcttaggaatacagggactgggtatcatggaagggagatgctggtctcttacagcatcatacaggatgagaacgactctggaacttaagttgacctttcacaaaagaattccagatattctttcttctgctggttatgatcagttaattgatgcttcctattgcgcagggaatggaggttgagttgcagccgaacagaaagatattcctaagtctgttttggctcagtttacatcagtgatttcaattctgttgcctgtgcctttaggaaggaaagaaagaaatgaattttctggatgaccaacatttgaattgcttgagagtgataaaaataagccccgcagagtagcatttaaagagatgatatattaggcagggctttattcaacacctgaataatgatggctgccccctagaaaaaaatttttttttaaactttgtaacagctgcttaatagagcggggaaatgtttctgttttaagccctgttaggaggtgctggtgcagacaagtgtgtcctctttgacatcttgaaacaattttttatgtcattcatcacaccaacataaccatgatttgaaaacactatcagtagctagtctcttataatcacataacaccgatgctgccaccacagcacaccagtaactgtaagccaaggagcacttgtagaaggtgtttagagtccatttacttgtctgagaacacatataaattataattattgtctagtaggtatattgtacgtaatgctgcaagtcaaatctgacactaaccgctcagagttagcactgactccacaggttaaggacgcaatccccaacaagattgcactgatttcagacgctggctgccagttcgggttccttgggctgctttcactgctcaccaactgaatacaaatttggaaggggatttcccatgaccctctcaggttagataattcattaaaacaattcacaaaacccagtaaagtattaggattatagttctattattagggatacgattcagaagcagccaaacgaagagacacatagagtgaggtttctaagagtttcaaatattgagcttttatgccctctccccatgacagcatgtcacccttctggcacattgatacattccccaacaaggaagctcaccagagcctcaaggtccagagtttttattagggttttattacttaggcatgaccgattgagtcattggccacatgaacgaagtcaacctacaacttccctctccttctgacccatggctcaaagttgcaaccctctaattacatgtttggtctttctggcaggactagcccgcatccagagacacctccttaactcaaactcaggtgtggttcatgggcccagcatgaatcacagacactctgatgatttgggaaatttcaaaggtttcgagtctccatcccagaagcccaggacaaagaccaaattctttgttgtataacactgtaattctcagaggatgatatttcatattaaataagttatctattgggacctcatacaatgttgaggaggaatgaatcttagaaatcatttagtctaaacctctcacttgacaggtgaggaaactgagatccagaggtgaagagaatctcccaagctagttattagtaaacagcagaggtggagctggagtcagggttagatttaggttttcttatctcaagacctcagatttgggacccggacggaaattttcatgcaaaatttacatgggaaacaatggggattggaaaaaacatgcatgactgtgtgtgcaccagctgtgtgcgttcaggggcttatagcagataatattgggtgtctgctgtttaccttgcttgtaccagggctgccatatggttaatgagggttctttagaccactgctgggagaattactgaaacataaaacttgagatgtgtgtcaccatttctcccggtctaaggaaacttattataaaagagaaatcaagagcccagattctgactgtctgactcagtcaactcatgagaaaatgatgggcaaaccattctacctgtcactgtcttaacatctccatttttataaaaagggtgggcagagaagaatggcttcccaatctgacactatggaatgtctatgaaacattgtatgtgtgtttttttcttggggcacaaatttttaaaaaatgcagtcattctatggtgaccctcagcatgttgcctttcctcctcttctgcatgtaggtgttggctgactagatgatttttatgacctcagccagcttctggagtaaatatctgggtgatgagcatacatcattgctccctgtatgcccatctgtaaagcaagaataaagatatttccttgaaaaaaggaggatctgggtgatatttgggaaaggaaaaaatagaaaactttaaaaaatgacttccagttaactgactttttctctttcatgctctttctttattcatttctaaatccctctggtcacagggatttttagagattggtagaggcaaggcagaggcctcaatctagccactatcatctacttcttgtcttcacctgccgcctagaatctcacgacttgtattcttccagtctagaactttctcctggacttcagaaccaaagcacctcgaactctactgactccagctgagctctttgtcttctcctcagtcactcccttctgcttttctcaccttgccaaatgacaccacaatctacataggcactcagagtggaaacttagtcattcctaaggcagccctttcctcacctagtctgactttatgtcaccccttttatcgtctctagtttacattgttatatccctttggttctgctgtctcagttcacattcctcacctcttatcttctgcagtggaggcctaactggcctcccttattctgaccctttatcatttttaagaagacattaattctgtgctctatattatattgagccaggtggcttatagacagaaacagtattgaataaataaaatgtttacaagtatattcccaagctgcctatattattgaacaaccaaataacctgaagacttgttcagctgagcccagcacaggcccttactaaatgtctttatgtaaatacattatttagtctcatttagagtagcttccaactattcctattctttgatcctggaagctcatgagcctgggctttataggtagggacacttttgtttattattatgagtctagcatctaatgacctggcaaatagtaagtgcttaagttcttgtggactgaatgaatgcaagaatatacttcctaatggatttgggagctaggaggaccctcagagaaaacttaatagaatgtattcatttataaatgtagatgctatggttaaaagagaggaagcaagtcacattgtgaaccacagcttgtctggctgggctgttcttatgcctctcacgtttcctattgggtttcctgctgtgcaatcactggtctttttcattgcggaaagttttcttctgtccgctccagtcctcacaacacagtctgacctctttggctttcaccatgtgatgacctgaataacccctgcaaaaactcctttcttcataacctccccccactaccacctcccaaccgaaggccaccaccacctgctttcctgctggagtccgttgggtttatagctcttccagctccttggacctctttccccttgtgtcctgggcatagtcccttgtgccctttgcaccatttccttcggcagcagtcatcttgtttttcacctggttatggcattaatcttctaatcattccccactttttctagctctttgttcaaaataaggtttggaacagtggtgtccacttccagacttttctgaggacccaacaaaattcctcccttgacagtatctatttctgactccctacggtatctgtttctgacttttacaaactgctttcttcacactgaggcaatgcgaaacatcgataagctattttttccagtaaaggaaaaaaaagcccttagtatagaaatctttcaccaacatgggagccagataaaatgtttgtttttgttatttccacttttaaaatgtgatgttttactatcaggcatacacctggtgtcagggagtagaagagaggattttatgctgccccagctcaggaagaattactctctccttccctgccactgaaacataaagtcctcggctcccaagtctgaagccccatggcctggttagctggctcccttgataatgtgcagctgtatggagaagccacaaaaagcagccatcgtgatttagaagctttagaataataaggtgtttggcctttgggtgtgatccctggttggcagtggtggacgggatctggggcctccctgtatgagaagatgaatctagatgtctatctatgatttttttttttggttggcaggctggggtgggggacggtgaggagaaagggtcctgctctgtcacccaggttggagtgcggtggcacaatcacagctcactgcagcctcaaactccagggctcaaaccatcctcccacctctgacctcccacctcctgagtagctgggattacaggcatgcaccaccacacctgactaatttttgtattctttgtagagatgggcttttgccatcttgtccaggctggtcttgaactcctgacctcaagtgatccacctgtcttgccctgccaaagtgctgagattacaggattgaaccaccatgcctggctagatctctttgtgatctgaagttggagcagaactgcttatctttcgtgtcaactccacattttctgcctatcttcctgtgcctcactttgtacattcttgcatcccagacttaccctgctgcttctatttcccatctaaatatgaccttccgtgcctcctctatttgctgcatacccttactccaccaaggagcttctcactatctactcatttctttttcgcttaaaatacttcctattctccaaagctgggatccagagcggagattctcaaaagtgtggcccccaaatctgcactgttaacctcaccagggaactacttaagaatgaaaattcttgggcctcacccgcataacccctgagtcagaaactctggagtaggcccagcaaggtcttcaggggactctgaagcatattaaagattgagaaccactgctctggagtgaattccaggtcttccacattacccagtgagcactgtctaagggcccattgaaatggaccttacgaaagataagctgggcctgggctggctctcaggaaggccctggattctttaccgccatgcactgaccctgtttttctttatcccgtaaatgtttatggagaacttcttactaaatgcaagggaatatggtgggcttcggggaaattgcagaaataacttagctatgaattttgcacatatataagctgtggggaaaggagggaggtttaaggtatgtaaacaactaccaggcaaaaattgtcatcgatgagaaactgagaaagttgagtggagggagaaattgtttcctggttagagcataaggacatgaacgagtttgagtctttcaacaacagtcattaaatgcaggtggaagagctgagaaggggatcctcactgacttcaaaaaagttcagagttggagagaaaaaagtgacagtaatggtggccctcagtgcaagaagcagaccaggatagtggtttctaagcatgagctctgcagtcagcttggcttcacattctgtatctgccatttattagctgggtgaatttgagtaatttactcaaccatgtctttacctgtgttcctcacctgtgaggtgggaatagtaagagtacctacctcacaagggttttgtaaagatgagcacacaataataagtgaaaagcatttggaacatttagcctgtcacatagtcaaggctcatagtaactagaggttagtcattttgtcattgagtgttgtgatagcaacttgtataattgaaaacccaaaagtgaggactatattgtataactgttcttatgatgttttacttatgatagagtagctttagaaagcatttagacagtaagcccggctaggcttactcactaccaatacaattactttctatttgtagagaatatagtgccaggacttaatctggaaatgactccagtgtttcctcttctgatgaatggattctcagtcagcctgccccagacgtatggattaggactgccaaattcagaacttctaatgcctgggagtccgcttagggtaccagctctgtgtgagacggaagacaggccaggatctgtcttttgcatcatcatatgtctctgggtggggcagcttgcattgaaaaatataataaaaggttgaggtcacattgcgtccattggtgccaaagcattctgctcaggcatagaacatatggctattttgttttttcagtttccaattttagagtttctattctttggagccttttgtatctttctgttagaagaagaaaaaccaatatattgaactagctagtaaaatgattagaaaatattcatattgaaacaactggaaattctgttcaaagtgaaaaaaattctctccctgtgtatgtataaaacgctctgggccagaactctgacagcatcacggtatgtcctcaagtttgcctgacacaacctcaggagtttttctttggcctactcatctgtataggtgagatcaggaatagggggaaggctacggtcatctcaaccctgaagttcaccagttattatcaatgtggggcttacttttgcctatagaactaggcccagttaactctcagtgtgggagttgggggaggtaatagtttggaaggtgaggaaggaggaaggtcactgtttgacaggccgtctttattgtatgtgttgaggtgtggacttttcatgctacgtaaagtcaagcaatctttgtggcacatgtttaggctggggttaggacaacagtcactacagggtgagcaaatccatatggcagatgagtgacttactagacactggaggaacactgcgcctctatctcaaactcaccgaattcgttttctagggctgctgtaacaaagtaccacaaactgagcggcttcaataacagaaatgtattttctccccattctggaggctggaagtctgaggctgaggtatcagcaaggatggatccttcttagaaatattagggatagtctgttccattccatgcctcttccttagcttcaagttgtttgttggcaatttttgccattccttgccctcactgctgccttcatctttccatagtgttctccctgtgtgtatatttgcatgtaaatatccattttctgaggatgccaatcatactggattaaagcccaccctaatgacctcattttaacttgattacctgtgtaagggccctatctcaaaatatggttacattttgagttactgtaggtgaggaattcaacatatgaattttggggagacacagtacaacccacaaactcacatataatgaatccattctaattcacttgcgtacattattacatggaaagagttagaaagcactgtggaccacaaaacaggaagcttgaggtctacctctaatttgccagctctaccactaatttgcaatgtgactcagacacgattttaaggcctctttccatttcataaagagaggagttggtgttgttctcttagatttcattcaactctatgctcctaggactctgcagctctttctctgaagttctcctgttctgtctaggaagtgtgatgttgggtgataccatcttacttacttttttgtcttgtagtgatgtgagctgggccaggggttgctccaacagattccaagcactcatcgcaagaggggaggaagaactgagtcatgcttttattttaacttaatgctaaatgaaactgagaatactcatatggtcttctggtttggtggctgtgtgatgggttcccagtagaggcttctttctcctctacattctccatttggacaggctttgtcaaaagcgtgtctctccagtttcagttgacctaggatatgtcaacctgagtgagtctgaccacctggtgtggtgtattgggtttaagaccctattaggggagtataggcaccagtggattttgctaagtattcacagccaatgcaaatggtgagccatgctgtgcagacctcggttgtttccactgatctgcctagctattcttgagtgcctcgtgaagcacatcagggaattgttgacttgaaaacattttaataatgtgttttgattcctagtttgttctttaatgtttcctatctttaagaatcctttgagcattattcttcaaatattgtaaggtgaccttttgtgtatcttggacaaggcacttcagctctctgagcaacagattcctcatctataagacaggcataaaaacctgtattctgctcccttcttaggctacaaaaatggagcagatgaaatggtggataatgaacacagggttttaaggatgagagccatatgtctctgtttatattgttttggggtgataattaatgatatccccttgtactctcaaaaatgtctgagtgtgcataataaattatataatcctcttatatcataaaataatgaatgtaaggattcttggttttatcatttatgtcactatgtaaattatcttaaattttgttttcttagcctcacttgaaaaaaaaagtaggacttttttttttttgcttactttgaaggacagaataagagttttatacccacactctttcacgtaattgctgtcattggccacagtgcatcccaggcaggccctgttgccgcagtgtactgggaccatccaggtctagccagtgctcaggccatctacaggctttagtcactcaactgatttgctcctaccacttactctatccctaagactgtctccaaagtgatactggtttctgcatttgcccattttctttctgcacctaaagacaagtactgaagcccagtctatttataggattaaaaaccatgatcacacaggtagatagatgatggtaaaaagaataaaaacatggaaaggctgcaaagcttaggaaagggtatgatgttcttgcaaagggtttggcctaaaacctatccttctctacacccttgctgtgacagaaactgtaaaccccagtgggcttctgtcttctgcatttatggctaaacctgggacacacacagttctctcctagtttagagtacattttctcttttgggaaaaagcatttctccattaaagtcttgttcctcaactaaggctgagtaacaggttatattctttccttgaatgagcagttttcacctttgagaatttttagattggagagtaatcatttgacagaaacttttattcatctaactgcatgtatcttattaatattataattaaaaacttttttttacagtggaaagcaacttagggatcacaaaatctactgctctcatctcccttatgcagtagaagaaaatgagtactcagaagttcgaaaccgtcctttaattacagagtatgggccttatgcaggtctctaggcctagggtttctttctaacatactattcatagtcatttgtttatcattttgttttagcccagtttactgaatataataagtgtttagcaatgaacaatgcaattgtggatggactgtatagtttctaaatatgtgtcacaagaattgagtcagtggatagcatgccttttgctgcttttgtggattacagtggccagactttggcatcagtacttttaacattcatggtgttttgattagatacaaagcagctgacccaagtctatggtacataataatttgtcacaaggttaataactaccccatgggttgttctagggattacatgagatagggcacaaaaaaatcctgagtatgaatgtaaattccttgagttgcaacattggatgtaggaggaatcactcaataagagagtctagtcataaaacacttagcaataacttttgaatgagttagagtcaagaattagatgatttgaaaagctgtctgagtgtggtgattcctcaaggatctagaaacagaaatactatttgactcaacaatcccattactgggtatatacccaaaggaaatatagatcattctattataaagatacatgcacatgtatgcttaatgcagcactattcacaataataaagtcttggaacaaacccaaatgcccattaatgatagactggatataggaaatgtggtacatatacaccatggaatactatgcagccatagaaaaggaatgagatcatgtcctttgcaggggcatggatgaagttggaagccataatgatcagcagactatcacaggaacagaaagccaaacatcacatgttctcactcataggtgggagctgaacagcgagaacacatggacacagggaggggagcaacacacactggagcctgtcaggggggcaggaggagggagagcatcaggactaatggctaatgcatggggggcttaatacctaggtgatgggttgacaggtacagcaaaccaccatggcatacgtttacctatgtaaccaacctgcacgttctacacatgtatcccagaacctaaaataaaatacaattttttaaaaaaggaaaaggtttctggatgtagtttttatggatgtgggcaatttattataatacttaactgatttgtctctgtattacagtgttctttacgtttttcttgccagcaccacaggcctctttgtggttgcccctttctaatgctcctcaagacaacctgctaatataagcaaagagtaaatgagtgaggagagcaccttctcatgtcaggaagcctatggagttagatcacctggatttgctcatttcctggacaaaaactgcccttttaatcctcaatttcctattaaggactggttcaacattatcatttcccagggagagtcttcaacttgaagtgatcactcaatcactaaaagcctccaacttgaagtgattgcaaaaccactacagctgcacctttcttatgcatttcttttattgccttttggattggactttatgccttatttttttctccatttccaagtgtgtcttgcctagaatgtagcacacagtaggagctcataaaatatccactgaaattgagttgaacaggagagataaggcaaggaaactcagtggatcaaggccagctcttgccaagagttccaaacttcatctttgtacctgagctgcatatttctatggccttgatgaattccttggcagcagaatgttcaacaactgaaacatttatgaaaatttaagcaaatgggtcaataaagggaacaaaacgaagcccacacagtctactcttgtgctcttttgcttttaaagaagcttgtttgtgttatcacttcaacggtttgataaacaactgtgccttctcacggatctgtcccctgtgtttgaagtggtaaaatgtgatgattagtcatgggtaaaagctgtatgcatctttccaagctgcacggcaatacgtgtgcaggaatttgagtttattacacaatgtcatcatctgtcatggagcctctggaaaacacattatcataagaaaatgataatgaaaaagataaaccatggtcctgattttgctggattttcaggattaatgcactaaaaatcttactgaacgccagatgaggtttctggataatttgtttttcttctttgcgcttttctgtgttttctagttcttctctactggattcatttggttgacacaaaatgaaatattaaggtatattacaacgaggaccacattgcttaacttcataattccaaccacttcctcttccacgtatcttgagaaaggtaggagcatttttactcttcacatccatacactcacaatcagctttatcacttactagtggtaggattggagaagcttatgtgtactatgtccttcaggggcttcttatctaacatggggatactattacctgcctgtctgtctaatgggattatataatgcatgtgaaaatgctagactaattgcaaacacagaacaaacggatgttgtcaccattattgtcagatctctatgtatgtgcaaaagtgaaatccttggagacaagctgggagattttttttttttctttagcatctcttctgccaaaaatatatattgattgcagctggaaggaaaccgttctgagagagaaaataatgttgaatagaaatcagagcctgtttgatatttgacagcttggacatgtttcttcatgtttaatgataataataatttgacttttaagtgacttctctgacatgagagccccctaaatcaggaaagctataaactgatgcaaagctacccccagagagatgacatggaagggtaaatgggattgaccagtgtgtttggctgagggtactcatctgcctaagattttatgggcttcacaggaggcctgttctgtggcatgtgaatgacctgagaacaagtcacccaccagccttggaccccatttattgagattctactatgtgctaccctctggagtaggtgctttgacaaagttattacatttgaccttcagaacaattctgcgaagagagtactattgtaccattaatgtctgtaggaaaattgatactcaaatattccctagactacaattatcatcagatcttctaattctaaatctggtactcttttcattttatagacaactgcctgacaaccacataaaactgtattagtaactacgcatttacaaagcacttctacacaaattaccttacttgattgttactttttctgtctgcaagttttccaagtcatgctagtgtgttatttctgtctcagttctggtggcctacctaaaaagaacattgcatgatcatgaaccagaattctggtattgtctccttcaccagttagctttgttacttaaagccctaaaagagaagggaattgcctctactgtagctatttggtagaagaatccagaggagaacccaggcttcttgagaaccaggtctcccaacgatctttggagataaacagtactaaacatacaagtatttgtgcatttgttgcgatcattatttaattatttaaaaagtataattatgatctattccttctggtaatcaataagactctgactcaaaatgaaataagggaaaatgttggtagaaaaagacttagcataaaggctgggtccttattgatagtgaaaatgatacttagaggagaagaagctgtttaaagcttgcattagttgtagaaaccccagcttgaggcactgaatctgtaaaaactggagacagagtttgggctgtatttaaaagagtctatcaagggctcctctttgtagaggatccaagtcagacctcctagcctatggaaatcagcttgtcagagcaaatgaatgtattggagactgaccctgacctaggtagctttcaagtcatccctgagaaagagcattttagaggttgaattgatgagatggctaatatggttattgaagttattggaggctatttatttggattttgcaatgattcagatttatgaaaatgaatctgtaatgaaaatgaatggtggaaataagctaatacaggaagtgttcagctaccaaagcaaacctgccttttcaataagacaaggatattacctctggaggatgaataacatatcatttgagatattttattaaaagttaactgtgactctcttttgaaggcagtcgctattactccagggagaatgaccttgaggctacttccttctttctcttacctttccttttcttttctttcaccatttcttttggacatacgctggtgaatgaagactgtggaatatggagtgaggaataaggaagcccactcaggctgagtcagatgcagtaggagatcagtgaaagggatttttcattagggagtgggatgtgttgatgtgataaagcttcttgaagtagaattttatggcaagcgtgatattgtaacttgcccatatttatgcagcttttaagtagtaaagctacgatttgaactgggtctgtttgtcttgaatgcagaggccccagggaatttaccaggtctggctctcattggttttggatagcagaaggttgaaccttaacatgtcagtcattttatttgctagattgattacattttgtctggaacatggtaatctcagactctagtcagtcttcagcttaggaaatattttcttgattattatttctattccactacttaagatttgttcttaaggataaaaattacttgtaaagataaatctccagtatttactatttttattatcttccctttcatatctttcaccttttctgattcttgggagaatttcctctttacatcaatgatttaatttttactgagaccgagtctcactctgtcacccaggctggagtgcagtggtgagatctcagctcactgcaacctctgccacccagttcaagcaattctcctgcctcagtctcccaagtagctgggattatttttaatcccatgccaccatgcccagctaagttttgtatttttagtagagatggggtttcaccctgttggtcaggctggtctcaaactcctgacctcaagtgatccgcccgccttggcctcccaaagtgctggaattgcaggcgtgagccacagcgcccagcctatttaatttttttatagtgccagttttgttcttttccaattccagggtaggattaatttggctattttgttaccttgcttttctcagccaggtcccttaataattttagactatattgccataaattgtctttttatctcatcacttatcatcatccctaaccttaacaagcgtaccatttcatgtatttacttgagaacccagaacagacgttcccagtttttttcttaatattaaattattattttttttttaaagaactagggttttcttctgcactttcagaacaacttttccttatttcaattttatagcatgtgtccagcctgtgctttttttttgccccacccccacccccaaatgtttacttttccttgagcatgaatccaaccctggaatttccaaaagtgaggcttctctgttttcccttattccccaataatttccatgagagtgtaatagatttgtacaaagctcttcactaatttttaggaggtctattagtatggttctgcctaaataaggaagtatctcctgcttccaatgtagaagatacttctttggctctgaagaagataatttttcatcccttgtaagttgaaaattttctagttcttacttttccaaaaacagagtatacaatggtcagagctcttcctatcttcactagtgcccactcaacaactttacattacgtcctacttggaatttctttctttttttttttttttatactttaagttctagggtacatgtgcacaacgtgcaggtttgttacatatgtatacatgtgccgtgttggtgtgctgcacccattaactcatcatttaacatgaggtatatctcctaatgctatccctcccccctccccccaccccacaacaggccctggtgtgtgatgttccccttcttgtgtccgtgtgttctcattgttcaattcccacctatgagtgagaacatgaggtgtttggttttttgtccttgcgatagtttgctgagaatgatggtttccagcttcatccatgtccctacaaaggacatgaactcatccttttttatggctgcatagtattccatggtgtatatgtgccacattttcttaatccagtctatcattgttggacatttgggttggttccaagtctttgctattgtgaatagtgccacaataaacatacgtgtgtgtgtgtctttatagcagcatgatttataatcctttgggtatatacccagtaatggatatatacccaaaggattataaatcatgaaggatatgaacagatatttctcaagaggagacatttatgcagccaaaagacacatgaaaaaatgctcgtcatcactggccatcagagaaatgcaaatcaaaaccacaatgagataccatctcacaccagttagaatggcatcattaaaaagtcaggaaacaacaggtactggagaggatgtggagaaataggaacacttttacactgttggtgggactgtaaactagttcaaccattgtggaagtcagtgtggcgattcctcaacgatctagaactagaaataccatttgaccctacttggaatttctgtaccactgggaattacagtcttcaactttttctataagggtaatccactaatgctgctttagggaaaaagcaaatgtcatgggagagagaaaatcatcctagatggcttagttaaccatttccttattgtattttcttattgtaatatatgtgggaagggggatgtaagatttctgatttctgcaggttggagagggagctacacagtgggagcgactgatggtttctgctacttttctagccctgtatatacacatcagctggggatgaggccacatgctcatcttatacagatgagtactgatttctcctgggtgctgaaaaactgttgttagatattatcagtttagttttcattgctatagttctgtcaggtcatattttttgtttttgtgtattttaatgggatgtagggagaagaaatgccataagatgtatcaacactttatttttatgatgtcacactaatgtattgctacaaacttaccctcagtagttataattttctgggatcattttagaatagatgatgtccattgttgagctcatgttttcctatccgtggaaatctagcatcagcagctgaaaccatcagttttgggatgactttcaagcctgatttgtcctgtcccatgatccactcaaggcacatagggaagcagcttggcgtcctggccggaccactaaccctggaaggcaggggccatgtatgacttacctttgaatcctgtgtactttgcaaagggcctggcacctgggtttctagaatatatcaaattatggttttttgtttgtttgtttgttttttagaacaaatggaaagcctataaaatttccagagaaaaactcagtcaccttttcaggcactctgtcttcagcttctaatgggataactattttgatatgtagcaaatgaggttttttaaaaatcttaagtgcagtggtaatttcatactaattattgcactggacaaataaattattttcattgaaaacctaagttatgcaaaactatgatttaaaagaaaagcagaatttttatttattctcaagctaacctattatttcaaaataagccaagtgccctgctttctagggtaaagctaatgcaccctaaaactttgtttactggttagcacgctccaaactctgcgttgctctgctctccatgaggatcttcgtgcagaggctgcagcttgctcagcttcagaaagtcatggcagaagtaataaaactgctggtagcagcatttaggtacccaagggaacgttctcacaagccagcagctgatcttgagttgaaagaggcaagtgatgagctacagaagcaatgcagcagtctgatatgccaagttctgggtacctgaccactggcaggttcagtatcagctttcagcctgctaaggcatgggtccggtttaccacctattttgtttgtataaaactatatagaaaatctatttcaatgtaattttttaaacagtggactgattgattatgtagcacatttaccatggtttttctgtgatttttcaagaatcac

SEQ ID NO: 3013 - DNA, 2830 bp, Homo sapiens
cagaaacctggaagtggaaatctcgggcattcaccgtttgggtgaagacggaggcgggttctggacagacgtaggctgtcagggagtgtttacttcgcctccacttctgttcctccctgccctggtgctgctccaggtcacatactcgtcctgagccggcttcagcctgtccgcgcagaagtctcccggagccatggcctagtactcttatgtgaagtctagcaagctcgtgctcaagggaaccgaggtgaagagctgggtcctgcagctctggtgggagcctcctcagttcttttcggatgcactccacccccgcgaatccggtggaagccgtggtgcagagagccggctttgtggcctcccaggcttcgctctgaccctgtctgggctggacggaggccggaccgcggttcctggcgcctgtgcagagaggggcagcctcccgtgctgacgaccctggaaacaggatagacgggcgggtgacccgtggccccgtacccacgagtttgggtcccctgaggcatctctccaggcctctgcctggtaagaagaaaaagagcaaagataagaagagaaaaagagaagatgaagaaacccagcttgatacgttggaatctggtgaacagtaacaaactttggtgaaatttcaggaaccatagccattgaaatggatgagggaacctatatacatgcactcgacaatggtctttttaccctgggagctccacacaaagaaggggaaaatggctttgttggcctcaaatagctgctttattagatgcaatgaagcaggggacatagaagcaaaaagtaaaacagcaggagaagaagaaatgatcaagattagatcctgtgctgaaaaagaaaccaagaaaaaagatgacattccagaagaagacaaaggaaatgtaaaacaatgtgaaatcaattatgtaaagaaatttcagagcttccaagaccacaaacttaaaataagtaaagaagagagtaaaattcttaaaaaggctcagaaagatggatttttgcatgagacgcttctggacagagtctcagtcatagcctgccttcatctctgaagggaccaggcgacccatggagtgcctcggcagcctcgtcattgcatgcaatcttcacagacaagatctcactgcaaccacgtttctacaggagcacaggtgtgacattatactgatgacatcattctcagagaaaattcattttacatactaaggacacacagatacaaggaggcttacacaaagggagtggacctctcctcaacacagtagtgcaaggccctgccactttgcttcaattcctgaaaattccttggtaaacttggggctgctctattcctgacactttcaaaaaacagttattcatcctctcagcatccacaatgttaatacaaacccaacattcttcaatttgtgttttgttttttggaggcacagtcttgctctgtcacccaggctggtatgaagtggcacaatttcagctcactgcagcctcgacctcctgagctcaagcaattctcccatctcggccttccaagtagctcggactgcaagtgtgtgccacgacactcagctaattttgtttaattttttgtagagaaaaggtctcgctatgttacccaggctggtctcaaactcctgggctgaagggatcctcttgcttcagcctcccaaagttctggggttacagttgtgagccactgtgcccagccctttaattctttacttggggttcaggtgacaacatatttcttgtttacaaatcttacttaatctcactgatgctgtcattggcaaactgacccacctcgaatgaagcctcctccaacaagtctggaatctgtccaaatttaaattaacaggtacttctatgaattccctcagagaacacactgtggatgctttagagacctcttcccatgcatcctgaattatctgggttgcatatggtggccataagtagtccatgggcttctgatgtaaaaacaaacctgccccttttgaccctgctctgtacagcatcagggcagtgattgctgaccatatcctggaccctctggaaacagagggctctgcatccatgtccatgagccttcatgcccatctggccatcaggccttgggaagcagcaccccacagccttggcacagctgcagagacctccttgcctcaggatggagtcaaacctggaccccctgccattctcatctgcaggaaacactgccctccttcattctcaggctgtgttgctggaagtcacccgtctccgaggacccttgggatcgactgagtgaccagcagtgaagttcatccaccttctgaatggatgccatcatctgacatgatggagcgcagtgggatgctgctgccttccctcccttagctaggatgtccctgataaaggatgacacccaagcctcagcacaactggccaaacttgaggtggtcatctcagcactgatgctgggccaacaattagccccatttgtacatttttacaaatttttggcaattgtcaagaattgtccaccttccctccccattgaattaaagaaacttcttgcctcatggatactcagaatacaatcaaggtaacagatgcctttttttttaaccaaggacacagtacagatctcacagggacactccttatctcctgcagagttccagacactactgatggtgaccaaggcaacattcatcggaaaacacagtgctaggcttgtgaaagtgtccagtagggcttccactgcccctataggctgcaggcagctgctttagttgagagagagactgagctcctcaaagaattc

SEQ ID NO: 3014 - DNA, 864 bp, Homo sapiens
acggataagaggcattaattaggtaatgcagggagaaaagagcattaaggcagaggaaacactgtgtgtaaaggtcttgcaatggaaagagaaatggccttagaagcaaagactgaagatttctgaagaagaagcaatcatgcctcaataaagcaacctaagaaaccctgcctgagtttccagcctgctggcccatcctgcagatttagaactgaaaactacatcaactaatttgcctgcattcccactttaccagccagccctacagctttcaaacttgccagcccctacagtcatgctttattcccgaaggacacggtggatattttgtgtggcccaagaaaagcaaatgctggaaaaaagcactagaaactgccctttgaagtttgctaccaagatctaatatcttgacagaccaaatgggtacttggtgcctactgagaagcctttactccctttactcttcctcagatcaatgaaggacaaattgacttctctgaaaaaggttcggctttttgggaattttccctactttgtgtaatttttttattctgtagagctggcccagacagccctacaaatgtctcacttccaccacatttgggaacgcaggcctctgtaggtgacataattcatccactacacaaatcatgatccattcagcatttccatattatcttcatttgtcatattttaaaaataaatatacacacaagttttactatttgatttcaaaatatctggagaaaagcacactgatgaaaacattgttcctcttttaaaaaattactctattaaacttatcaccaaggcatggtcagaacattggagatggagaagcttgagagatggtctttattcttg

SEQ ID NO: 3015 - DNA, 1535 bp, Homo sapiens
cagaccttgaagatttcctgctgcagggatcaggaaactgagatgcttatccatcacttgtcatgtggcattacctaaagactgctttcaggatcatccactaccttgtatctctggcctgccccatgctcagcagagaaaatctgagcagagaatgtcaggtgcttttggcagaaggcattggcatacatggggtggtaagtataatatcaatgggatattggcagagcacaagaaaagagtccagtgcagtgaggtaaggaaaaagagaagcaaattcttcttaacactaattatttcttctccagcctatctaagattcacaagatttgggagcagtcaagtagcattttctttctgtttatgatttccctctgagactatcattgctttaggcaaatgcattcatgtgaagaatcatttttctccatgtctgagcctataataaatgtcaacccttttttggcaactgcaactaatgctgcagacctaccattactaaaaatgaaattacacatgttaggaccccagatcaatgtatttcaagggacatttaagatcactctggacaggcaatggaatctctccacctctgtagctatgagcctccttctggaaaaaaagataaaatttttacttgattttttttctctttctcttagtgcttggatcaagcaaaaaaaatgcaaatgaaatttctagccttgttaattcccctgaaatctagcatcctctctaaaatacttggtaaaactaagcacccaggaaacaaagtttaaagtctttaaggtgtgctcagtgtagcctgtaaggtgtttaataaatagcccttaaatttgcatagaaatcataggccattggagcaaaaagtaagctcaggcaatgtcacagaaaatgcttcattttacaggtgagagaaatgaatcccagagagaattggtttgcacaaaactacacgtccgtttagtggcacagcaaaaaccagaattaaggtggtctgacactcattccaataattttcatggttttttatgttttaagctttgatagaaagacttttgtgcattatctcatttaaagaaactaatgagatggtaagtcatttacaagtcagtcatctgggtaagagcaggggatcctctgggatctgaatgcttgggttcaaattccagctccaacatgtgtcacctgcatgaccctgaacgatctttctgtgcttcccttttctccacggtaagcaatggcatctatctcagtacccttaaaacgattgcatgaaatactggtaagcaatgacaactatctcagtacccttgaaatgagtgcttgaaatgctacaagcaagtgtctagagagtgcctggaccacagttagtactccataaatctgaagcgacatgatgtcatcttcacaacagctctcaaagatactcatgcagtgatgatacgtgtcaatcatttgacgtcaaatgtatttttcattccatctggcaaatcatatccctcttcttgaatggaattcctctgtcactctgg

SEQ ID NO: 3016 - DNA, 5088 bp, Homo sapiens
ttcccccttggaaatgccctggcttcacctgggtgctccagctcccagacaagacttagtggagacagggtgttcagagttagaacccacagagtctgggttctaactcacatggctttgggcaaagagcatgttccttccttacctccctctccaggaacatcagagggggtaatttaagagcctccctcctgtctttccacagtgtggtaggcaatgaccccgatatctgctaaaagctgcaagatggtcctgataaatttcattctgggttggccctcaggccacctaacagagtgcttcagcacacatcctggaggccctgaccttcctgtatccagacccagccttgactctggatccacaaagaatctctgagagtggatgattcggcccttaagcctgagaggctgagagtgggtagggctcagtgcctggagcagggaagagtggaggaggaagctcaggaggaagtttgcctgggaacctggcacaaatgttactcaggatgcacagtggggatattttcgtgtgttcagagggcagatatgcggatgactcaacgttttgcccacgtagtgcctcttgttgcttggctgccttagctgattgaagtcatcagtggataatgtagcaggtgcaaatgaattggctactgatggtttatacaaccctggaggacgcccctactctcggcctaatatggacagaaaatacagttattggactacagcatcaaaatactacagccctgtggacgatgaatcagagcatctccctcacccacagagaccacagtgttccacaagaagggaagatctgcagtagcaattcctgcggcggggggaggcttcgtgtctccccgtcctaattgctgtcagttgccctgcactgagtgctcacgaacaaggaaggaggcactgcgtgtggtcatcccaactcctcacagctgctgaagagaaaactctcatccatatatggtgttcaatgggtttatatgttgatgactcccatcatgtatttgcagcccaaattctgactcttctgtcctctgtctagaagatatatctatctatgtgtcctttacactccctggattcaccatggccaaacctcctttgagatgaagtctcaatctgttgcccaggctgtagtgcagtggcgggatctcggctcattgcaatctctgcttcccaggttcaagtgattcttgtgcctcagccttctgagtagctgggattgcaggcatgcgccaccatgctgggctaattttttttttttttttttttttttgacgtggagtctcactcctgtcacccaggctggagtgcaatggtatgatctcggctcacagcaacctccacctcctgggttcaagcgattctcctgccttagcctcccaagtagctgggattacaggcgcctgccaccatgcctggctaatttttgtatttttagtagagatggggtttcaccatgttggccaggatgggagaactaacctcaggcaatctgcccacctcggcctctcaaagtgctgggattataggtgtgagcaaccgtgccctgcctaatttttgtatttttagtagagatgaagtttcgccatgttggccaggctggtcttgaactgagctcctgacctcaagtgatccgccccctctcagcctcccaaagtgttaggattacaggtgtgagccaccacacctggcccaatgttccctttactatcctcttccctcaaactttgctctttctctgtccccactgtctcacttggtggtagcagccactaagtacccaatccagaggctctgagaagacgctaggtgtaccttttttttttttttgagacagcttctcactttgtcacccaggctggagtgcagtggtgaagtcatggctcactgcagcctcaatctcccgagctctggtgatcttcccaccttagtctcctgagtagctgggactacaagtgcacaccaccacgcccagctagtttgttgcatttttttgtagagacagggtctcactgtattgcccaggctggtcttgaactcttgtgctcaagtgatctgtccacctcagcctcccaaagtgctgggatttcagttgtaagccacctggcctgagatttactttttaattttaattaatagactatttttcaagagcagttttaggtttatgaaaaattgagaagatgctgggcgtggtggctcacgcctgtaatcccagcactttgggaggctgaggcgggtggatcacctgaggtcaggagttcgagaccagcctgaccgatatggttaaaccccgtctctactaaaaatacaaaaactagctgggagtggggacaggtgcctgtagtcccagctactggggaggctgagacaggagaattgcttgaacccgggaggcagaggttgcagtgagccgagatcatgccactgcactccagcctgggcgatagagcaagactccatctcaaaaaaaaaacaaacaaacaaaaattgagaagaaagtatcaatagccatatccctcctccccactagtttcccttattattaaccccttggatgagtatggttcatttgagtttgttacaattgataaaccaatatggacacatttttattaactgaagtctgtatttacattagggctcactctttgtgttgtactgtttgtttgtttgtttgtttgtttgtttgtttgttgagatggagtctcgctctgtctcccaggctggagtgcagtggcacgatcttggctcactgcaaagtccacctcccaggttcaagcaattcccctacctcagcctcccaagtaacttggattagaggcacccaccaccacacctagctaatttttgtatttttagtagaaacagggttttgccatattggccaggctagtctcgaactcctgacctcaggtgatctgcccacttcggcctcccaaagtgctgggattacaggtgtgagccaacatgcctggccttgtgttgtacattctacatataggttttgagagacattctgtatgttattgtaatggtgggtatatttaatgccaagtttgttcctaaagcagatagtggccttgtagtggggtacacatagtgtgtcccccgagaagaggagcactcagaacatatttgtcagtcccttccatcctttctccctctgcctcaaggaacacctactaccccaggtttggttcctggttggccctgaccccggcttgcctgtgtcagatgggagctgcctgtggtttgtagattagcccttatcttaaatgccaagctccaggtctgacctcacacagagctttgggctgatctgatgatatttggtgaggaacagatgcacttcttgactataagacctgtggttcagtctcaggtctcaccctttgtcaattttatgcacttattcattgacttagtttttacagctggggctccacgaccagccccagatgatcacaacagctgggaggcagaagtgacttggaacagctgaagtcctaaaaaagagccttaggtctgatttccattcagtcgtgttggcctcccttgctagttagctgagaggaaggaggactttctttctacccactccaactctcataaggcccccagtgatatctgtgttgctggagtgggatggggtgagagagggagagggagtagaaagagaaacacaagaaattcagggattgagccatattcctggtcctcacattggcactactgaaggcctctgttagcctttcaactcttggatgcctcgatggttcactttagaaggaaaagggaatgatttggaatgcctgcacttgttgcagggtgatttatccagggaaaaggaatgcactgttcacatttcttagcctttttttcttttaattgaagtgatgtgagcaattaaaatgtttccttccaaaaaaagccctttaaaaattctatgaaggtagccagatttcaattatgttcattatgactagatttagatgtgtattttgtataatgtagaggcataggacatctatgtcatgaacattctagaaccatccccagaaaaatgcagtttcattaggcacacacataacatttgcatgtatggatgggggtgagtcttggatcttttgcagcccacctagtgatggccactaggatcacaaactttaagaacagctcagtgaccctaactttcatattctgatcctacattgtgctaaggtgtgtgtgaagtgaccaaatttaatagataataaaattactaggctgtgtgctgctatctggccaacgcttgctttggacatccttgacaataccctctaccttgcctcttcaagggttttaacctctccatgacattgtcctctatgggagggctcatgcaccccaccccgcccaagaacttccccttaacattttacaaatgctgtagaaaaaattttgtgtggctgggcgccgtggctcatgcctgtaatcccagcactttgggaggccgaggcaggtggatcacttgaggtcaggagttcgagatcagcctggccaacatggtgaatcccgtctctactaaaagtacaaacattagctgggcgtacttagctgggtgtggtggtgcacacctgtagtcccagctacttgggaggctgaggcaggagaatcgcctgaacccgggaggcagagttgcagtgagctgagatggtgccaccgcactccagcctgggcgacagagcgagactctgactcaaaaaaaagaaaaatggtgtttcagtgtaaacctatgcattgtctacagcaaagctgtcagggctatcagattctactatgcattgtctttgagctattttgcaaggctctgtaaattggaagtaaccgatagatatgtaaattatgtcttgtctgatagtgatttaattgacttcctccccttttgggaaaaaaagcaatttaatctccatttgcaattcatctctacattccttcactcagtaagaatttgtgtgtttttgacttttcctttgaactattgcctggtttcttggtatcaggagtaaataaattcttcaacgtg

SEQ ID NO: 3017 - DNA, 2029 bp, Homo sapiens
gaggctcagccgctcgcggtggagaaagcaggccgcggaggaggcgggcgcccaggcctgcccggacaggaagtgggcccagctttcccactcctcgctccgctccttcctccgcgggaagggcaggccccggaggcagcgagcgccccgggggtggccgggcagccggatgctcccggggttgcgggctgtggccccgggggctgagggcggcgcgggtgcggcggaagcagggaagccgcgaaccggccttctggctggccacagcgccctgcacggacgatcagtgaatggagattactcaagtatttatcgagaacttgcagtgggctaggcacagttcaggctgacctttctcaaagttgaaccttcgtcttgtgaggaacagaaagatcaagaactctgaagcacctcgactttccacctgtgaagatgtgttcaaatttgcaacgtgcggccacacctatgaggttgaactttatacaattggtttctttataggtttagatggttgaatttaagttacccccactgctattattattattttgagacagagtcttaactctgttgcccaggcaggagtgcagtggcgagatctggactcactgcaacctctgcctcctggcttcaagcaattctcatgcttcagcctgtagctggaactacaggtcactccctctggaggaaaccagctgccactttgtgaggatactcatagtcctgtggaggcatatcctccatatggctgagacctcctgcgaacaaccatcactgacttgccagacatgagtgtgccaccttggaagcagattttccagccccagttaagccttcagatgacatcagcccctgctaatctcttgactacaacctcatgagagaccctgagccagaactagccaggcttacccctcatggttacaaagtggctgcaacagctccaggtgttctatcctttaacacagaataactcaaacaacaagacccaatattcagacaagaaggaaagggacttttggagagtgaagaaaactttcctagaaacctcaaacttctccccatgccttattggccagattgtatcccatgcccatttctaaaccaatcattggcaaagtgagtggaattgacgtgattagattaactttaccaagaatgcatcctcagagaggctgagaaaaagtccagcctcctttgaagagcctggctacctttcacctgaacaaaacaagaattctgatgaaaaatggagaatgtatgtggagcaggcacccggagtgtctatgccaggattttttttcagtgcgtttcaccggttatatttttgtctctttaccttacaagatatgtggcacgtttgcctaaaacaagccttgctttctgatttctgtgcactaggcacttaaaccttgcaaatgtcgcttacctaacagtcactgtcaaggagtacctggctaaagaatctccagctagacaaagtagaagtgtctgtgctctggcagttgaatatattgtatcaggctcaacagcacctttcaccaaaggatgagacttcacaaccattagatcttcttttattttgtttttattaaaaaaaaaaattttaacacaccattgctaacttgaagccattagatcttcttacccccaataccacaaaagtttagtggaatcaggggtataccaaggcaggtggagtaggggagctgggagtggtcagcccccagggcaggcaatgagggattgtgaatctgtgaagaattttaaagcaatgatacagctctaaatgcaatgtactatcctggacttagccctggaaaagaaaaaagatattagtggaaaaactggtaaaattcaaataatgtctgtagtttggttaatagtattataccaatgttaatttctgtgttttgataaatgtaccatggttatgtaagctggatgaaagatatgtgggaaatctctctactatttctgcaactctcctgtaaacctaaaaatgtttcaaaataaaagatttaatgct

SEQ ID NO: 3018 - DNA, 1375 bp, Homo sapiens
gggaaatagccagaaggggcatttggctggtctcttcctactcaggtattggctgctctccgtgtgtgtggagggggagttcctggcagctgctgatgcactgggagccaggatcagtctagggacagactctcatgcatgcactatcccagtgctcactcattctttcctctcttcctggggctccctctgggcccaccacaaccacgaactctttccagccttcctccacccagaagaggatcttttgggcagttatttttccatttgcacctgtgtcagctttggctatggggaaggaccaaactcttaaggaatcaaccatgcaggcaaggagacacttttgaacaaggtaagatttcaggcagaaattatagtaggtatgcagctgcccatcccctcatccatttatctccccgatctttcaaccagcaaatatctattgagcatctactctgtgctttgccaggcactaaattctgtgatgaatggggatgcaatggtgggcaagacacaatttttccttcaaggatcttataagcctaacggcaagaatcctcctaagagagacattcgacaatccaggtttctggaagtggccactaagctgaaatggaatggttagccaatgggtaaggaaccatgtgtgcagaggtctaagtgagagagagcagagctttggagaaatccttccccactggccaccaggccaggctgcgagcatcacagctgcagttttcatttgcaaagcctgaggggctggttgctcagtctcctgggctccaagcgcatgatgcataaaaatgagctattctctttccaactgcacagtgccatcctgccacagggctgcagaactgttacctctgaatctggatgctgagcctgagatgttcaccacagtagtgaatggtgggttgattgtaaggaagaaaaccttctaagccatttttgtctggtctcaccccggctcccacaggacttcactatgaccctgtacctgcggcattactggaaggatgagaggctagctttctccagcgccagcaacaagagcatgaccttcgatggccggctggtgaagaagatctgggtccctgatgtcttctttgttcactccaaaagatcgttcactcatgacaccaccactgacaacatcatgctgagggtgttcccagatggacacgtgctgtacagcatgaggattacggtcactgccatgtgcaacatggacttcagccactttcccctggactcccagacctgttctttggagctggagagctgtaagtatcagcattcctaattccttcactttctttcctctctgatctttgtgccattttagtaatcatgagactgagcactgcccgcc

SEQ ID NO: 3019 - DNA, 3096 bp, Homo sapiens
acacgatctaatcctttacttctggtgttgttccacttgatgacaggcctacccttgtagcagtgataaggagtgtgaagttgggaggtattgccacagtccccaccaaggatcatcggcctgcatggtgtgtcggagaaaaaagaagcgctgccaccgagatggcatgtgctgccccagtacccgctgcaataatggcatctgtatcccagttactgaaagcatcttaacccctcacatcccggctctggatggtactcggcacagagatcgaaaccacggtcattactcaaaccatgacttgggatggcagaatctaggaagaccacacactaagatgtcacatataaaaggtagggatatctgtagttctggggtttttttaaaataaagaaatagaagaaaaatatagataattaattccattggttttagaaaaaattacaaggaagtttctttaatcctagctagtcattaaacttgttatttaggtggcaaataatggaaacagaccataatagatttatgtgataagaggcagagccaattggtatcaaccaagacttttcattataaatggtaacaacatagaagatagtataagtaaaaatattttatgtgcttctgattgcaaaatagaattttttttttctgaagtgtcagggtaacatctattggtcatcatctctgcagggcatgaaggagacccctgcctacgatcatcagactgcattgaagggttttgctgtgctcgtcatttctggaccaaaatctgcaaaccagtgctccatcagggggaagtctgtaccaaacaacgcaagaagggttctcatgggctggaaattttccagcgttgcgactgtgcgaagggcctgtcttgcaaagtatggaaagatgccacctactcctccaaagccagactccatgtgtgtcagaaaatttgatcaccattgaggaacatcatcaattgcagactgtgaagttgtgtatttaatgcattatagcatggtggaaaataaggttcagatgcagaagaatggctaaaataagaaacgtgataagaatatagatgatcacaaaaagggagaaagaaaacatgaactgaatagattagaatgggtgacaaatgcagtgcagccagtgtttccattatgcaacttgtctatgtaaataatgtacacatttgtggaaaatgctattattaagagaacaagcacacagtggaaattactgatgagtagcatgtgactttccaagagtttaggttgtgctggaggagaggtttccttcagattgctgattgcttatacaaataacctacatgccagatttctattcaacgttagagtttaacaaaatactcctagaataacttgttatacaataggttctaaaaataaaattgctaaacaagaaatgaaaacatggagcattgttaatttacaacagaaaattaccttttgatttgtaacactacttctgctgttcaatcaagagtcttggtagataagaaaaaaatcagtcaatatttccaaataattgcaaaataatggccagttgtttaggaaggcctttaggaagacaaataaataacaaacaaacagccacaaatacttttttttcaaaattttagttttacctgtaattaataagaactgatacaagacaaaaacagttccttcagattctacggaatgacagtatatctctctttatcctatgtgattcctgctctgaatgcattatattttccaaactatacccataaattgtgactagtaaaatacttacacagagcagaattttcacagatggcaaaaaaatttaaagatgtccaatatatgtgggaaaagagctaacagagagatcattatttcttaaagattggccataacctgtattttgatagaattagattggtaaatacatgtattcatacatactctgtggtaatagagacttgagctggatctgtactgcactggagtaagcaagaaaattgggaaaactttttcgtttgttcaggttttggcaacacatagatcatatgtctgaggcacaagttggctgttcatctttgaaaccaggggatgcacagtctaaatgaatatctgcatgggatttgctatcataatatttactatgcagatgaattcagtgtgaggtcctgtgtccgtactatcctcaaattatttattttatagtgctgagatcctcaaataatctcaatttcaggaggtttcacaaaatggactcctgaagtagacagagtagtgaggtttcattgccctctataagcttctgactagccaatggcatcatccaattttcttcccaaacctctgcagcatctgctttattgccaaagggctagtttcggttttctgcagccattgcggttaaaaaatataagtaggataacttgtaaaacctgcatattgctaatctatagacaccacagtttctaaattctttgaaaccactttactactttttttaaacttaactcagttctaaatactttgtctggagcacaaaacaataaaaggttatcttatagtcgtgactttaaacttttgtagaccacaattcactttttagttttcttttacttaaatcccatctgcagtctcaaatttaagttctcccagtagagattgagtttgagcctgtatatctattaaaaatttcaacttcccacatatatttactaagatgattaagacttacattttctgcacaggtctgcaaaaacaaaaattataaactagtccatccaagaaccaaagtttgtataaacaggttgctataagcttggtgaaatgaaaatggaacatttcaatcaaacatttcctatataacaattattatatttacaatttggtttctgcaatatttttcttatgtccacccttttaaaaattattatttgaagtaatttatttacaggaaatgttaatgagatgtattttcttatagagatatttcttacagaaagctttgtagcagaatatatttgcagctattgactttgtaatttaggaaaaatgtataataagataaaatctattaaatttttctcctctaaaaactgaa

SEQ ID NO: 3020 - DNA, 1667 bp, Homo sapiens
gagtgacagagaagactggcagctgcagagcaggacagaccagattggccagtacaacagcagagggccatgttgggctttgactcaggaatcctggtggaggcaatgatgagagagaagagataaaacacactaggtaagccaaggtagttgtcaggatagaaggagacaggcaggccagatggctgttaaccgtgtggtgtgtcccaactttccagcatcaatttaatggccaaattaaaatcagcagagccaagtgttagagttattgctgcctgagttataacagctgccctgggaatcttgtctgaacaacaagttaactgctgttcccagttatatctggtctttcccacccccaaacatacacaaaagatttttgtcattcttggcactggacaacagaagtgataagacatgccagcagaactctaaaggcagaatgtccttccacctgttttatgctgtaagacaaacttccaagtgcgaggcagtgtggagggctgttgccttgaatggcagctgaatgcaccagcgggatccttggcagcaatgcccaggcactgaagtcgggcattcaggagagctaaatggagaaaagaaacttgagcaaactgcttcctggaacactgagaacctgaatgggaaattaagaagaaccagattctttctattcttccaccagccaaggtgatgagcacaaaaggatccatcttatacagtgcttgccagcttccataatactactcaccacgatgttgaaatcacctgttccagaaccagtcctgtcctttgacaagaaggatttaattatcagtagtggtggggactggctggagagaggaaaaacacttcaaggactctgccacctttcgtagatggagagtgcaaagtttgtaccatggaactccttctctaacagttactctgtggcagtgcctatttcaaacctcccttaacttctgattgtatagatgtttgtttcatttgttcatctgtttgttcacttagtcagagatgttttaagccttaagagaaatagtggactagaaaatgccttggaaaagtacaaagttcaatccaagtaaactgtttttaaactaggaatttatgaagcctaaaatataaaatgtatatacatggatatgctctgaagtgaggtagaggggtagaaatcaacattgtgatattgtactatagttttgcaagatgttaccattgggggaaaatgtttgaagggtatacgggatatctctgccttatttcttacaactgcatgtgaatctacagttatctcaaaataaaaatttaattaacaattgattacaattaacagcattaatttcttatcctgtcattttccttctcctgaaattgcagaatagccaaacagaaacctacccatgaccaccatctgagattctttggtgcccgtattagtggacataggcaggtgtatcaggaggcatccagtcacgcatactggaagatactgactcaactgatttaagcaaaggaaaatacagtgtattatataatgagacatcttgagtagggtagtcctagggtcagttgattcagcagcttgattgataatcaagggcccaaattctttcccactttctaccctgccatcctcagcctatcagtttcgtcctccagctggc

SEQ ID NO: 3021 - DNA, 996 bp, Homo sapiens
gtttgaggtatttttcaatgaagacattttctttgcagaaagaaatttcagagcttccaagaccacaaacttaaaataagtaaagaagagagtaaaattcttaaaaaggctcagaaagatggatttttgcatgagacgcttctggacagcttggtatctgagaccatctgcctgctgactggcttttctggcacaaacattctgcatgtaggcccagtgtgttcctcgactccatatcaacccgttcaccctcatgttcccttggttcctgtccccagtccagcgagcagaactgattacagatcttgacaacagaaggtacagatttaaaataacttgcctgttcccgtggaatttatccactagtgaaggaggacaagtggacaaggggagagggtaggtgggcgctccttcccttttcctcccattccactttatacaaaccccagctagaccactgggagagcaacggaggttaagaatgactgcctctaaatattgtcatttggtccactcttcttccatcttgtatacaaggatatcatgactttggtttaaagcactactgaaaccaagataaactgtggcttagcattcccccgatggatcagtctagtaatcttatcaaaaccaagattacctaaaagcactaaccaaaggaaaagctccctcaccccaacctatgactgctcacatttttcagattgaatcatttcaattgtattttaagatccattgactctttaccacctccaagctgctcctgaacacaactgattattttaattttgaaaactttctcacttctagaatttccacttgagcctttgttattattgtagtttcttcttctctgctgtgatttcctatccatttattttaagggtttttggggttttgattttagtaagaattacaataactactttaaaaatccgcactaattccaacatctgggtcatctcgaagtcagtctctattgattgcctttttctt

SEQ ID NO: 3022 - DNA, 1110 bp, Homo sapiens
cgcgcagaagtccggggctggcaagcgcttcctgcgcagcgcctaggcgacctggagtttgtgacgctgtgatggtctagaggctggagattcaagatctgggtgccatcattttctggttctgttgatgaccctcttccagtttttcttataaggctaaaaattcacaaagcatatatcaatgaatcaggaggatctagatccggatagtactacagatgtgggagatgttacaaatactgaagaagaacttattagagaatgtgaagaaatgtggaaagatatggaagaatgtcagaataaattatcacttattggaactgaaacactcaccgattcaaatgctcagctatcattgttaattatgcaagtaaaatgtttaaccgctgaactcagtcaatggcagaaaaaaacacctgaaaggtctcatcgtgttgtccaggctggagtacagtggcacaatcatggctcattgcagccccgatctcccgggttcaagtgatcctcctacctcagcctcctgagtagctaggactacaagtgtgtgccaccatgcttgcaattcccttgactgaagacgttctcataacattaggaaaagaagagttccaaaagctgagacaagatcttgaaatggtactgtccactaaggagtcaaagaatgaaaagttaaaggaagacttagaaagggaacaacggtggttggatgaacagcaacagataatggaatctcttaatgtactacacagtgaattgaaaaataaggttgaaacattttctgaatcaagaatctttaatgaactgaaaactaaaatgcttaatataaaagaatataaggagaaactcttgagtaccttgggcgagtttctagaagaccattttcctctgcctgatagaagtgttaaaaagaaaaaggtaagttttagagaagacatttatgtaaattatcatatttgaaattattttaggtgggtttagaagcatattttcttatttagttcaaaggtatgcacatgtatggaaatatgccattatcacattatacttattgaaagactagaagcaacctaattattcaataaaatgggattaagtatatgtatatttttg

SEQ ID NO: 3023 - DNA, 1715 bp, Homo sapiens
atcacctagtggggttcatgtctaaagttgtagcctggtctcaattgatggtaggatattgagataaaaccttgggataccctcatggaaatctgcaatgaagccattgatgtcttttgtggttgcagcttgaataagacactttggcacattgtttggacataggaagcacacataaatgttagttgcctttatctttctttgtcctatatcatgaaaggcaaatacttatgatttccatgatcacaaacatttgcctttcactgctctttatcagtatctgaatttagtgtctgatcttttttttttatgtagacaacttttaatctccttcctctgcttaaaatgcttacctactttctctccaacaagtcatgttaatcaagtcgattaaaacctgaatattatctctataaggatacctaatatcaacctaatcttgtgtatttatttcctgtgcttgctattggtttttctttattctcaccagatcttaaccaacacttaaggcctctaagttcccatctagtgcaaaaagataccttcagccctactgtgtttgtttgaattcaaattactattgcttttagatcagtaccactcgttaggttttaatgattttgtgtgttagtgatgatgtcaccaataggttgtaaactcctgaccatcgggccttctgtgtatttgtatccctcacaatgctaaatccaaagctcagcgtatactcattaagtgcttgctacttaaagagtccacgtgtgggtggaaaaatgattctgaagtctctctacagccctaactcctgcacctttttgattaatcagagttgggaggtgcctctctcaccactcttctcttccagacatctttatgacctttcttttgacattccactattttctctctgccatcaacgatttgctcagctctgcatcaatgagatctttgtgattataaaataacatgaggtatgcatggaaagaatttgttgcatatcactataaatgagatgttgctcatatgaggtaatgtgatatggcaagccccaatcactggaatgttcttggtgtattattgaacacaacaaaaatggaacagttacaccatgcacatatgactttgcaaatttattctcagaaatggtgaagtagaaaccctaaatagctgcttataatttgctgtgttatatataaatacaactaagtgtagacttatctccagcaactggtttagtaaactggttatcagctatctaaggatctttgctattatatgaatacaaaatttgaaaatgcttggttgaacttttcttttgtgctccttaaaggtagaaatagtaagcaagaatattggaacatttatgaagaaaataaatgtttcacaaaaaatctgtatagaaaattggactgttgatataaaattgctatcactctgaatattttcatatcattatctcagagtttttgaatatatcattttctaagttattctaaacagcaaatgggaatcatgtacccagttaattgacaatttaattagctgaactatgatagtatttttctgatgagtaacttggaatattagttaaggcaagctgatgtattgtctgcatttattctgcaggcagaactgtgtttttacttctactgacgataaaaatttttttaaccccgatttgtgacaaagaagagaactgttagcttcggggcggttcc

SEQ ID NO: 3024 - DNA, 2189 bp, Homo sapiens
ggcaggcgccaggccaggtcctgggtggcctctgtagtgaaatgcagccctggttacctccagcctccatctctcctggggagattaacattattgaatctctacaacatcctagaacaccctagacaggaggtcttttttttttttttttttttttttgagacagggtctcactctgtcatccaggctggaatgcagtggcaaaatcatggctcactgcggccttgaacccccgggatcaagcaatcctccagcctcagcctcccaggtagctggatcagcagatgcgcaccaccgtgatcagctaattttcttcattttttttgtagagttgaggtctcactaagttgcccaggctggtctggaactcctggactcgagcaatccccccgccttggcctcccaaagtgctgggcttacagacatgagccaccgtgtccagctgacaggaggtcttaacatccttgtttttcggacgaggaaactgaggcgtggagaggtggagacttacacaagatcatagagcgaatagagggcagagctggagtctgaagtcagtctgaccgaccatgaaactcacatgtcatcctgacaccattccaatcctgtgaggtccccctgcttctggtaggcagctgcagaaggtgaagatgcagcactgaggaggcaggaggagggctgaccaccagctcccggcatgtccccagcaccaagtggcccagagagagcccaggatgcgcacgcaggtggatgctccgcgtgctgccctagcgggtgcctcaggaccctttgacatttcagtaccagaaatcaaatgtcgcttcagaagcccggccctccaaagatgtcacaatccaacctcccacacgcacagataggtctggaaacttgaatctctggaatatgcaaaatgcccccttcaccaccaagaaaggaccatcctggtccctgatccccgggggcacaacactgctgtgtgacaggggcatgacagctcccatgaaggagtccagaaccgagacctgtggagagaacatgagatgcccaaggtcacgaggtgagaggctcaaggtcacagagtccatcataagactcagatcttatattttctggggctttgccagggctgcctgtcaagacattctggctgtgttcctccagcagatctgaaacctgacccaatgcatgtatgctctcagccaagagccagcccaggtaacaggtgctgggcatgtacgtctcgctggctcaagtcataagaaaaccaacaagaatgctctcgtgtgctttctgctggaagcccagaggctgagaggaggagctggaagacaggtggtaggctggtttaatgagctctgtcctgccccacactgcccagaaaactggctcttcctgagaggtccccaggtgccactcagtggtagctcctgagaaggtttaggaagcatctacattgcacagcataatactgaacatcatctatgaatcccctagccccaaacttaagaagcaggataattaccaagtagttgaatttcccctgggagacacagccttatgtatgtggatgaggaataagcaggaggaaatttgggagagtgagaaatgtggtcaaggtgttgaaatggtgaccaagacgctgtctaaggttcaggctgaggagcctgcagctttgagttcttgcttggttgtgggcatctgcctaccttgaggcagctttattcagacccctgacacatcaggttaacagcatcaccattgccaggcagttaacatttaccaatgccctctcagagcctggccaagaatgcagaggatgtagaggtgaaatgtccagagggtgtttttcaaggaacccagcctagaggggagaactgagagtaaacagatcccacagcacacaataccccaaacaatagaagaggggtacgtatgaaggacccaaacataagactcagcctggagcagttgaagtttaacagaggaggggatttttgtgctggactttgaaggatgaataggagtgtgcttagaggacaaagggagggtgggcccatcccaagtagtagatagaaaaggcatgaagttacaaagtttgaagaactgggcatgtttgcaaacagttcgtatgctagatactggggaggaagccaaaaatgaataatacatgtttctgctttgtaggcgat

SEQ ID NO: 3025 - DNA, 1348 bp, Homo sapiens
cccagtgccatacgcccgcactcctcagcccttgggtggtggatgggactgggcgccgtggagcagggggcggcgctcatcagggaggctcaggctgcacaggaacccacggagtgggtgggaggctcaggcatggggggctgcaggtcccaagccctgcccggcgggaaggcagctaagcctccgtgagaaattgagcgcagcgccggtgggctggcactgctgggggacccagtacaccctccgcagctgctggcccgggtgctaagtccctcattgcccggggccagcagggctggccgactgctccgagtgcggggccgccaagcccacgcccacccggaactccagctggcccgcaagcgcctcacgcagccccggttcccgctcgcgcctctccctccacacctccctgcaagctgagggagtgggctccagccttggccagcccagaaaggggctcccacagtgcagtggtgggctgaagggctcctcaagtgccgccaaactgggagcccaggcagaggaggtgccgagagcaagcgagggctctgaggactgccagcacgctgtcacctctcaatacaatttcatctctctctctgctatggacacagatggcttcactccatcctgtattcttcggaccatgataaaattccagactctcggtagtttttgcgttccaagaagtagagcctagagtggtggcctataattacagttactcaggaggctgaggcaggaggatcctttgagtccagcagtttgaggccagcctggacaccacagcaagaccaccaataaataaataaataaatggaacatgtttccctgtcatggtcattttcatccattcctctggtagaagcatcagattccttcaagcaagggtttatgttggggtctctcaatctctgcgttagcacaggcatccagtcttcttatggagggggacggggaggtggaatggagaaacgagagaggcgaatcagagacctcactgccttctgcccattggtgctgcccgtggacggctggcacaggggagcaccccatgcttctgccttcaatggtgcggggaggggcagaggacaaggaaacgcaggaaactaggagtggggcaggcagacatgcttcaaaggctggagccaaggagggtgcagggagagttgggagttcctggaccaggcaggggtcacctcctcaccacagccagaatagctctaccagtgcccatgccatctccagctccaaacaccgttttttctgtttcctaattcattaatttctttctttttttttggagatggagtctcactctgttgcccagcctgtagtacagtgg

SEQ ID NO: 3026 - DNA, 1604 bp, Homo sapiens
gtgtgtgtggaagggagagagctgtgcgagcgtgggggagagtttttcgttggaatatacgttgcacatttatggcgattctgagtgtgagggcagacttctgccaggctcagcacagcattttcgctgacaagtgagcttggaggttctatgtgccataattaacattgccttgaagactcctggacaccgagactggcctcagaaatagttggctttttttttttttaattgcaagcatatttcttttaatgactccagtaaaattaagcatcaagtaaacaagtggaaagtgacctacacttttaacttgtctcactagtgcctaaatgtagtaaaggctgcttaagttttgtatgtagttggattttttggagtccgaaggtatccatctgcagaaattgaggcccaaattgaatttggattcaagtggattctaaatactttgcttatcttgaagagagaagcttcataaggaataaacaagttgaatagagaaaacactgattgataataggcattttagtggtctttttaatgttttctgctgtgaaacatttcaagatttattgatttttttttttcactttccccatcacactcacacgcacgctcacactttttatttgccataatgaaccgtccagcccctgtggagatctcctatgagaacatgcgttttctgataactcacaaccctaccaatgctactctcaacaagttcacagaggattggccatttgatgatggagctccaccccctaatcagatagtagatgattggttaaacctgttaaaaaccaaatttcgtgaagagccaggttgctgtgttgcagtgcattgtgttgcaggattgggaagggcacctgtgctggttgcacttgctttgattgaatgtggaatgaagtacgaagatgcagttcagtttataagacaaaaaagaaggggagcgttcaattccaaacagctgctttatttggagaaataccgacctaagatgcgattacgcttcagagataccaatgggcattgctgtgttcagtagaaggaaatgtaaacgaaggctgacttgattgtgccatttagagggaactcttggtacctggaaatgtgaatctggaatattacctgtgtcatcaaagtagtgatggattcagtactcctcaaccactctcctaatgattggaacaaaagcaaacaaaaaagaaatctctctataaaatgaataaaatgtttaagaaaagagaaagagaaaaggaattaattcagtgaaggatgattttgctcctagttttggagtttgaatttctgccaggattgaattattttgaaatctcctgtctttttaaactttttcaaaataggtctctaaggaaaaccagcagaacattagcctgtgcaaaaccatctgtttggggagcacactcttccattatgcttggcacatagatctccctgtggtgggattttttttttccctttttttgtgggggagggttggtggtatatttttcccctcttttttccttcctctcctacatctcccttttcccccgatccaagttgtagatggaatagaagcccttgttgctgtagatgtgcgt

SEQ ID NO: 3027 - DNA, 4313 bp, Homo sapiens
taggctacagtgtagtggcgtgatctcggctcactgcagcctctgcctccgagcggggtccagcgattctcctgcatcagcctcctgggtagttgggattacaggtgcatgccaccacacccaactgatttttgtatttttagtagagacagggtttcaccatcttggcctgactggtcccgaactgatctcaggtgatctgcccacctcggcctcccaaagtgctgggattacaagcgtgagccactgcgtggcctgagcactagggcgcaagagaagccgtactggaatattacactactcagcacaagacaggtttaatctttttcttgggggacaagattggaaaattgaggtctgagcagacctgaagagaggcatccagcaactctgagattaaattcatcattgatcaattcgttattgtttggaattgacgtttagctgtgttcctcactcagatacgtgcatgatagctgcttgctaatttggtcttagctcacatttcacctagaatgtatggtctccctctcccctgcaaaatatcccactgttgctaatctgtctgcctcataatttccatgagattgagcatcttgtttgttttgtcaccactatataacagcatgttggaaacaaagcagtaataaagctagaaaaaccaagcgaatacactggattaaaaaaaatactgtttcctagaattaaagaaataaatgaggccgggcgcagtggtgcctgtaatcccagcagtttgggaggctgaggctagtggatcatgtggccgagatcgcgtcactgcactccagtctagcaacagagcgataccttgtttcttacttaaaaaaaaaaaaagacctcatttgttaactgttaaacagaaaacaagaaattccctatacctgtatgcattatagagcaaataagagcatcaaaaacaatcttagaaatctttcagagaaaggtcacctacaaaggaacattgatcagataatagatttttttttttttctcagatggagttctgctcttgtcgcccagactggagtgcaatggcacgatgttggctcactgcaatctccgcttcccaggttcaagcagttctccagccttagcctcccaagtagctgggattacaggctcccactaccattcccagaatttttgtattttaattagtagagacggggtttcgccatgttggccaggctagcctcgaactcctgaactcaggtgatctgcctgcctcggcctcacaaagtgctgtgattacagggtgtgagccactgcacctggccgataacagatgttttaatagtaagataaaaagtaaaatttccagtgtgtcgaaggaagaaaattacagcctagaattttatcttcatgtacattatttaagtgtgagggaatagtttcagtgacattatgtcattgaagaccttagaagatttccctcgctaaaggagataaagcgactggcacaacatgtatttctctgagtaattagaagtgttcttttctggctgtactgaagggactttcatgatttcttcgtttttgtactcttagttttataatattgcatagtagctaaggcctggctgtagcagttataaactgttctgcaagtgcgggaagtaatagttattcctatctcaaggatgtggggtttaaatgggttagtgcacaaaaggacatttattaaatttagtcataatcatctcaaggacatggtaagtgaaagagtgtacataaagtacttaatgtaatgtttgctacttaatgttcaataactcaaagagaccaccaccactactacattttacttttattagtaattaataataattaataattagtaattcagtggtaattagtatactaccaaagaaagtacttgagcagaagagccaaaattcaaaccatagaatcattttactgtgcttttattctacctcaaacactaatctccaggccttggataaagggattatttctctgaaggggaaagttatcctctttttgcccaagtcacacttgtgtcatttcttatactgtaaacatgtggttccaattctgaggtattttcccggtttgtaggacccaaaaagaagttaggcttgagaaattttaagtgaagagaacaattctagttcagagtgattggctcttcctaaaagctgacatttgactgaaaattttgaggggagggaaagaaacaataccttttacggcatgtaataggaagaagacctggattttagttgctgctctgatgtcccaacttgggtaaggcaacataacataaatgtcagtttcttcagatttgtgatgaagctgataatccatgctcagcttcctttatgggtctcttgcctatcaaataaggtacagtatgtgaagatacattgcagattatcttatgcattgcttcaggggatgattaaaccatcctttattatagccagagtctagtctaagggaagaaggtcattctctataccagtgaaggctccatccaaaccagtgtttgggggcatagtcataattgaaaaatgattgttttccttatctgtaagacaggtaaatggtattaatcctcaggtggttgtgaggattaagtgatacatgtaaaaaaaagaaagctttggatagtacctattataagaaactcagtgttgctgcaatgtatgtattataatggatttgaaatttgccctaaccaagagtcacagacagaaaaaaggaagttaatgtatctcttgatcactatcaagatgtggtattgaaccttcaagatccttttcagggaatatgtgagatcaaaatttttatactggcactatgatgttatttgccttttcctcatattcacaagtgaacagtggagttttacagaagctatataatgtcatgacatcactgatgggtaatagaatgtgtgcttgtatattccgaaactttcagttccaatttcttcgatcaatgtaatcctcataagtaaaagttatttgaggacctcagacatttttaaaaatgtaaagggggtggggtcaggctcagtggctcatgcctgtaatcccagcattttggaaggccgaggcgaacggatcacttgaggccaggagtttgaaactagtctggtcaacatggtgaaaccccgtctccactaaaacaaaaagttttctggatgtggtggcacacatacctgtaatcccagctactttggtggctgaggcatgagaatcacttgaacccagaagacaggttgcagtgagccaagattgtgcccctgcattctagcctgggtgacagtgagactgtctcaaaaaataaaggtgtacagggattgtatatttgacaacttggtatgtaggatgtgctacctctaatgttccatgctgttacttagttttcactcactactatattttggagatttgttcatattgctctgtgtacatttaattcttcagtgtgtatccaccacatttaacttattcacttacagaactatgcaagaatttctctggtaaatttcactaagtacttatgtacttttcagaacgattgtgagtttacacccctaccagcaggactgagttgagtacccatttcctcacatccttgccagtacttcatttgcctaatttttgccattctcataatgtggcaattgttcaattttgcatttcttccattttatttttttgcatctctgcttttcttttggttagctttgccagttctgcctattatattaatctcccagaatcagcttttagttttgttaaatctctgacatgtttcgttgattcctgctttcatcttaaacatttcttcgttgttaatttgtgtttgctataaaataagcaacatcttaaatgcttgatttgctttcgatgtttattctgtaataagatatttaaagatataattttttccctaaatgctttattagacttttctcataagttttgactggtactgttttcattgttatttaattttgtgttttttaacttctttcatgatttccttttaactgaaggttttcttagatatttagtttgctggtatattcttttaaaattgtatcattgctttctttctatattggattattgtcagagaacatgatttgcatgatattaactttttggagtatattgttgcatctttgtggcctagtacatagttaatttagtgaatgcttccagttgtacttgaaaagaatgtatattttctgattattgagggtaaatttctctatatatgttttcctgtttaataaatatgtagctatgtgctta

SEQ ID NO: 3028 - DNA, 625 bp, Homo sapiens
agctaatccacacaaatgctcctcctcctcagccttaccaaatacaaaactttaggcattaatactgcctggattatggaatcacactttgaaagtgctttaagtagatttctgtttttcctacaggagaactgcttatctgtgcagcaatctatccgagggcctttgggccattatgctgtgaatgtgacatctgcagccaagctctgcagtcagagtctatgtaacaatcatggaagagtattcgaaaaacacctgagtcctccttctatctgcatatgcctgaaagcagtgtcaggtccctcagctgcaggtctgttggagtttgctggaggtccattccagaccttgtttacctgggtatcaccagcggaggctgcagaaccgcaagtattgcagaagagcaaatattgctgaacaacaaatattgctgcctgatcctttctctggaagcttcgtcccagagggcagccgcctatatgagttgtctgtccacctctactgggaggtgtctcccagataggctacacgggcatcagggactcacttgaggaggcaatctgtcctttctcagagctcaaacgcggtgctgggagaaccactgctctcttcagagctgtcagac

SEQ ID NO: 3029 - DNA, 4356 bp, Homo sapiens
aagaaatgttaatgtatataggaataggactagcgcttcctggttcattttcattgcttaggggtaatcatgatttgaccagatctttctgattgatgagtctatctgatgattagtgaaccagctattcttaaggaaatacgttgttaccatatttccttgtatgttgagaagtatacctgaaagttataatagcttcagaattagtgtaattagggccttccttactaaaaatacctttgcaaacaaaagaaaatggtaacacagatactcccatcttgacttagcagtgacactgcaggaattttttttcataaaatattctttatagttattgtcttatataaaaggaatgctcttatgatgaaactttgagtaaattacagtgctgacttatgagtatttcttactgtgtccttagctaaaatcaatgaaactgatacatttggtcctggagatgatgatgaaattcagtttgatgacattggagatgatgatgaagatattgatgacatctaaattgaactcaacattttacattccatcttttctgaagattgtcctacaatttggattttgatcatgacaaagaagattaaaatttcattagcatgaatgcaatttgttaaagcagactgatttgtttctaagatatttttggtttttttaaaactgataataatgctgaattatcttaagtgagatgttaagcccactttgttcttttaatgtaatggagcttatgggtagaagaccatgtctactaattacaaaaaaaaaaaaaaaccatgcattgctgcttttcctaccacttccagtaagaaaatgggtgttttgaagaaatcatttgccttgtcctcacggaatctgattaagccctggcctcttgattgtatagagtcattgtgtatattccagttacctagatattcccttgagattttgatacaatttgagggaggcagaagtctgcagttgaagaaaaaaaataagtctgtttgtcatatttaagtagcctgtggctatttttatactgattttgatatcatgttcttttcatagtcgtattttgccaccgtaaacataaaaaaaaaaaaaaagatttccaaaatgccgttttcagaacctgggttttaatagcagtattgaatttgtaagcttagtagttgcagaaattgaacactaggtggcactcagttatcttaacaggggaagtactgatacaattgttgacttttcttttactatgtgtaagaaataccccaaacatgaaaagattgttttgatcatatgcatgtatgtagaatatttttgcagagcagaaagattatgttagaagtgtgatttttattttcagaagtcatatacatgtaagctacaattttgagtgctttataaacacttaagatatatatataaattttaatttcatagcaacttgtaaaaaataaaatacttgttgaaaagcctttttcaacatatccctaagctaagggaagaggaaggaataacaactcagtgaaaagatggtctccagtttctgaatgaaaaagctacagctgagaaataaaataaaatgtcatgctgcagaatatgttatacccttattttgtgttaaggatatattttattatgtgaatggttttgtttttgttttttgtttttgttttttgcttgtattgggaattagctttactggtaacttccttatttagtttttagtggtcaactctaataaaatgaaactagggctgagctagttagccctcactagccaaactgaaactctatgcaacattaaaagaagagatccatcatgtagcttgtgacacttttattttattagtcaccggggaacttttcagtgatgaaaatacacagggtaataaaccttcacatggcttcaaaaggaaaacaagcaaatcttctctaatctactcttactataatttcctaagtgtacaccaaactctggatttaaaaatctgaagtactatagaacattaagttgaagaatggaaattaagagtacgtattcatggtttatatttcttattctatggagttcgtgaacacatctaggtggaatgcatctgagactaagggctggtttttaatcctcataagaaaccagccttgaagaattaacaattctcttcattggtattctaaacctcctaagatatttaggcttctgtacataaaagtgtttttgctaaatttacagtatatatagatcctttcatattattttactaagaatgtttgaactttgcatatttgatatagttcctggtaggaatagcacagctcaaacattagtttttctacttacctcctctaacacgtggtttgtctggagagtttctaaaaattcagctataaccccagttcatgtatttactggtgattgttcttgctgaggtagtaacagcccaatcttgggctgttaaatcctaggaaatctcgaatcatagtgattaaaatagttggggtaaagttgtagcttatatgcaatactacttggaggaattcttctactaatttgtatttaatgtggaaattgtatagtttcattgatttaatcataaataatggaaatggtctccaagaagttttatttttcatttttttgcttatacactctgattcctataatacagtgctataagctatgcacagaaaataaaatgtttgaaatccaagaataatggttcttactgctaagagggagtaatagttattactaatgattttgattgggttgcatttttgttgcaatgtttattccacttgcagttagaatatgaatatgttttatcactagtgtggctaaataaccaaacatttgtgtaaaaaaaaaaaaaagccaagatttcattgtttgttgaatatttcttaagcatctggcccctaaagagaccgcttcttaccaagcctgtaaactatgcatgatggaaattcttgtattttatttaggaatggctgttggtttactcaccacatctgtggaatcatggctataaatgtttgcttacaaactctttgtgacttgtaatttaacttaatctcatctaatgtaaatattagattatgatgttcagtaacatcttccataggtataaactgctgtcattattgatttcagagtaactctgagtaatcaaataggtaaaagcatgttttgagtaaaatagctagatttatactttacttgtatacagacttaacaacaaccggtattgactggattgacagctaaagtatcagaatgaaagcaaggtttttttgatgttacctgactgtcataaagatgaaaatgatttgtattggtatgaaatgcttatctttattctacttcgtaagggtaagttttatttatactctttggactcccatgaacttttgcacactgctttgtgtttttggtttaccctaaactaccatcctttttatctttgctttttttcttcctattcagaaaagagcaaaatgtgaaaagacacaagactctcaggtatagaatgaactgagcaatttggagaatgtattggactttgtcctctcttattcccccctcctagccctgcaagttgctaggtacttgtgaggcagtgtactggagaggggagagcatggatcctggggtcaaagggcctttgcccccacccttacttggccctctacctgcaggtgaccactggcacattctcctgcttgtctcagcttcaggttcttcacctctaagatggggatgatgaaaacagtacctgtcatgcagaattgttgggaggattgataatttagatgtttatacatgtaatgtacttagatcagtgtctgctcttttcacttgatatccagtactatgtaagatagaaggtgcatgtcttctgtattctgtatttcccatttcttttgcgtgcagtctttgattcgtacaatagaaggaacacgtagaatgtatatttgtacattcatgtcaacatagtatttgaaattgctaccaaactcatttaatttggcataagactaacagatgaagtctctcatttgcttgaagatattttacaaaataccaactgttctatatttctttagaaaaagattatagttattaatattgatacctctgataatattttattcttaaatcttcagtgattccttttactatagattcatgacagctaattagtactaactgatttagaggtttcctttcccatcatatggaatgatgtaaagaaatcagatacaaactactgcaattagaaaataaaatatgaacaactttcaacaatgtatacaattgattcttttctaactttataacattttaaactatttattcat

SEQ ID NO: 3030 - DNA, 1294 bp, Homo sapiens
tgtacttcctgagggcttggctctgagatttgttcctacatactctctgtggggccaactgtaaaccttcaaggaagaatgggagttttgccacaaatcaggtaggagaaaggggacgggaactttacaacagagaagagtaggagttaatggccagaggttttacagtacagagtgagttaaaaaatataataaaataccactttgtacccactgggatggttaaaacaaaaaagacagataataacaagcgctggtgagggtgtggaggaacttgaagcttcataccttgctagcaggattgtaaaatgatgtagctacttttgaaaacagtgggaattttttcaaagtctcaaacatggaattaccacatgacccagaaattctggtcctaggcatatactcaaaaaaatatgtgcatacaaatacctatgcaaaaactcgtgcatgagaatttatagcaatattattcatagtagttaaacatggaaacaatgcaaatgttcactaggtgaatgtataaaatattagttgaccataaaaaatcatgtactacccaaacatgctacaacatgaatgaaccttaaaaacactatgccaagggaaagatgtcaggcaaagaaggcaacatcttacatgatgtcatttacatgaaatgtccagaacaggcaaatctggaaggtatattagtgagtgccacgggctgtgtatgcatgtgtgtgtgtgtgtgtgtgtgtatgtgtgtgtggcagctggggctggggaagtagagaatttggaatcgagtgagtgctaacagatgtgaagattctttacagaatgataaaacatgttctaaaagaacctttttagatggtggtgattgttacacaaatttgtgactatactacaaacagcaaaattgtgtactttaaaagaattgattttatgttattcaaaatatatctcaatataggcatatggaattatatctcaatatactaaaatatatctcaatatggtctggtattgtagtagaaagggtatagtctatacgttgagatatattttaaaagtaggttaaggccaatttgtgccacttccacccagggattcctgatttacttctgtatacagtgggaaacaattgcatattttaaaaacagggtattaacactgataactaacatttttgggggatccttaaaaattgccagcccctgatataagtgtcttatatgaattaactcttaatccccttaacagtcctatggggtagtctatattattattatttgcaattcacaaaggggga

SEQ ID NO: 3031 - DNA, 813 bp, Homo sapiens
ttctatcttggagagatttacattttaattggtagcaagcttgaaaagaaaagaatgaagatcttggatacttctaatcatcaaggaaagggtacaaatcaaactgctctgatggcctgatttgcacttcttctacagttgacgatggtcgtacttctccatgttctgagaccagtttaaacaaaaacaaaaaccagacaacaaccttgcaagggaaagaattcagagtaaataaacagtctttttctgggaagtaaaatatttccctaagatggagaaattgagatgagagctcatccacaagattacccatcaatgagcaccaatagcaaccaaatccactagaagactgggagcttttaagtcaagaaacttacatcagtatcatcattccaagaagcggtatccaagctgttttatcgaaagtgcgcatgggagataagactctgagaatttatagaaacaaacattagaaggcaggaatgtggagagaagaaagctacctgacaagggaatctcaggatacaaggaaaacaccaagaagacacctgcctgagggtcttatagctaatggactgcagaagacttgagtcatcattcaaattcagtagccatcctctgatgtccagttgaagattggtgattccagaatagctcgcattgccccagttgacttgccacacagcttctttcaggacttgaaaatgtcctagccacccccatcttacctcctacttccaatgccttttaagatagaaaacaaaaaacaaaacaacaaaaaaacaccagccacccttgtgggttagataatcc

SEQ ID NO: 3032 - DNA, 3217 bp, Homo sapiens
cctgtctttagaccagaagttttttgaattgcatctctaatgacctatcagatcagaagactggtaaacctggagcctcatcccaagaggtgatggtgtctgggtttattatggatcgcaggatgtaactatcaatctggagctttagggggaagaagaaagaatattttgaaccacaccaggagaattaccctagagaatataagttcacctgccaaaatgggaggctggcatctttttgctctatgagaaggctgctgagctaacaggtctgccttggcataaatgtctagaagagcatgtgtctcctggagtatggggacatttgtgtttccataaattggcagctgcttctggttagagacttctaaaaggtctggaatactggaatactggtatagtccaaaaggggaagatgaaaaggagccgtggaacattgtaccaggaagaagatgggacattactctccgcatgccctggagctttcggaagacgtataagaggatcttagtttccatagctccacatgaaagagcaagcagggctgctgatgtccactgtgggctccaagtgagggactggcccatgggcaggaggtgagggagacttacttgcttttctctgagctggtccacaggagcagaggagactggggtgagcctcactccagaatacttgtagagtatgtgacaccggttaccaaccttggctccacaaaaattacctgtgaaccttctaaaatacacataagaaattcttactgaattgaactgggacgagattccacgtatcaggattctgtaaaagctcccccagtgactcaagatgaagtccgggttgaagaccagtgatatgcaggaaatgtgtcctgtgatttgaaaccacattccatttgtcaagcaagacactacggccacataatggagatctacttccatatgaaccagtggatttcactctgcttaatggtaagacatgacgtggctaaccctggccatctgtgctgctaatgttctgatcttgcttgagattttgactgcaaatgtaaggaaccagacatatacagataggctgtttgcagaaaggtctcttgagacaatctgagctgacttgcttatcttgcagaaaaatatactgaggcccagaaattatttaaataaagtcctcaaatatggtaattttagaaaaaggacaagtgaaacctatatctgcccactactcccactactagcaccaacgttttgatttttatagttatttatgaaataaggtgtgtgccttttgtagaaacaaatagagcacatcctacaaggctgtcagagagctgggaggcaaggagcctggatttttatcatttctttgtagttgcctctgggactctgggtaaatgcacgccttacttggtataaagtaggcacagtaatagcatggtaatacctgtaatcatttgtcccatgtgtctgagcacctgaaggtaaaacaacaccgtcatcagaaacaattcagtgggtagagtcattcagaaagagagaggaatttttatctgcttttgaaaatgtcttaaggagaaaaagacaaagctttgaaggcattagtaatttaagtattgggatgatgtccagggactttttgctgtgattcacatcctgggtaggaaaaggtgatggaagttgtaggaatgtcatccaagtgcctgattgatttgatcgtagagaagaaagaagtggctattggagaaaaaagtgcagtagaaacaatgaaggaaacaggataaaaactgtgaatattgttcagcttcaaagtgtgttatgatttaaatagtacagctggtttggagatctttgggtgaacaaagatgtgaaatgacagcatgtcagagttgggtctgagtatggtactaaatggacgctgtaatgtcaatggctgagagaggtgtatggaacacacctgctccaaatgtgacacaagagaagacttggggtggtttatggtgtgtttttgagctcatgtgttaaggtgtggattgttgggacaggaaagtgcatggagaaagaacattgtctgggcagatttatagggaaaaagtgtaccaggaagccagcttcctgaaggccggtcgcaacatctagctcagagcaattgggaaatagcaggaggaagcaatgggcatcatatttcagttttcatggcaaaagaagaactaaaataaagatgcagagcagtcgtgttctgggtttagagaaaataaacacagaataatttgggcaagagaaaaaaatgttaactcaacttttggacccagaaacaatgatctactttagtgtatcaatttaacggtttggtgttttcaatttattttgaattagttaatggaagtcatcgtaaatcatcagacaactaatgcactttcatcttacactgtgaaccatcatatgcagctgtggatgggtatcggagattaagagacaggatgtgtgatatgtgcagaggggctccacagctgcctcttggatggcccattaggtccaactcaatttttggggggtgaatttcttcattctctagttattggtccacacagagaaattattaaccccaatgacactttaattaaagatttattttccctttaatcctgtggggcacctaggatcttggcgccaagatcctaacttttgtctccaccaccttgtgtatagtgagctgactgtaatatgcattatttttgatataagaatgttttgtaacctgtttgtttcttctccaaatgctacaaactaattttaacatcatggaatattggcttctgaagtagcagttctctctttgaactaatgctaatgcagtttatgaattacatggtactgcaatccctcacaaggcttttctttactataaataaaatactctaaacaagagccaaatattttactagacaaattctattaccaaaaaaaagacacaaagctctggtatgaatgcattagttaaatatatacgaaatagatggaattgcctaagaatgcacaaaatcaaacaaaaggtggattctgattacaaaataacttttttttttggtggaagagaaagcaatgtaaaaagcatgagtcacattttagattctaacactccttagtagtggcttccttttcagtctcatgataaacaacttgtctatgattctctttcttcctttagtaactagagacaaaagtgc

SEQ ID NO: 3033 - DNA, 3573 bp, Homo sapiens
tttcgatcacggcttctactacatgtgcttgaaatgaatgttgtgtgtgaggacctgtgtggtttgggccatgttgtgcccccctgccagtgtccttcggtgttgaaaggaaaaggtatttctctcccttccatgtatgttctgcaaattgacgaacatttgcaaattgctttgagatgcgttaatttaaggtgtgaaataatagatcttgtgcgaaggctcagccacatttctggcattgatggatttttctcccgtctggcctgtgatttggggaggtaaaaatagtccttttttccacatttttatctttttttttttttgctgacatcattcttaggaagtggtgtgcacatgccgtggaactttacatggaacatggagctctggggagcaggagtgctcttggagtgaggggtggtctgcggtggcccaggcaccccctggctgtccgtgaaatggctttgaaatgagcaggcactgttgagggcctcagtggctttttggtatttggctgtcttttcacttatgactcttgggtaatggcaagataacttttggggaaaatgttagtttaaaaagaaaaaaaatcaggccagcactttcactcattcctgtctgagctggtcccttcctttggccaaagctgaactaaaccaatggccttctcagactcgacttccagacagaggagccgacattggggcaaatcagttggtggtgtaatttcctgtgatgttaactttgggaacttgaacttggagtgggagctagcattttgacatgtgtccctctaacaggacttgcttgtgtggaaacagacccccacatacatggctgcgccattgtctccaattctggatttttccacagatgacttctcgggtgatctggtggtaaaggcacaggtcttctagccaggccttcttggcctccagcaagggcaggatcacagcaccccaccagacctgactggccaccaccgctgtagctgtggctgggcgagtgggggggccatgggaattgaaagatggggtggccgagatctgaaatgcattcagttgcagtggcctggatctgcacggagccgttctttctttctcttagacatctgcatggtggtgacctcatagaattctaagaaaaaaggggctttatgtaggaattccatagagtgtgaaggaatttggacaggggaagggggagggaagttgccattcagagcctgcagtgcctgcattttccccgaattgtttaaccctcatgcttcagaattaggctgaggcttgcggggtgggtcatgttgacctgggtgaacagagatccctttaagaagaacttctccatgttccagaggcgcgttcttactgcaggtgagtggcagtatgggaattagtccacaggccccttctcgaatgcctgccctctcttgttccttgtcctcaacgtctttgaaacttgggcttgttgggaagacacctgcaaaaggatggatgcacatgaccttcagctctaatgaatcaagctgctgatgaggaattcactgggctcccaatccagagagcttcgcacacacccactggggttgagacgagcactgggtttatttattgtggacttttggagtctgaaggactcttgccacccatctgtttcacggaacagaacctgaggctcagagggagcaaggcgctcccccacagccgcattgagagcctgagcctgggcacccgatggagtgaatgaggctggagtcccagacctgcctctcatgagcacgtcgcccactgagcctcagcgtcatcatctggaaaacagggataatattatgacctcagaagcttcgggggaggaagtaagtgaaataatgcatttcagatgctcagcgccttttaagtgcttgatgctcattccccaagattacatgagagacatggaaaatctttaatgaccaaggacccacccagggtcactcagccgggacccttggtccgtggcccagagtgtctccagtgcccctgcattgaggccctaaacaaggccagaagcaggtgccggggacccctctggattccaccagagcaccttcctaggatcatggctcccaaaacggaagggaaggagacagcgcagtttgcaaagaggcaggatttaagcaccagggtggccctgtggcgcctcaggaaaatgtttgcctgtcagtatctgctctcgttcccacctgtccccacaaagcgaggccataagtcctcggcgtggcattggagggtctctgaaggccctgagagctgtgtcagccacggtgtgttatgaagcaaggcagatgttttgttaattatttacacagcgtcggccccgcagaggactgcgctgacaggagcggctgtcacaggcctggccgtggggcagaagtgagcagccgtcttcccctggcagtcctcctgaaaaggtctgcatggcaaggcctgagggagtcctgcacattttatgcccccgccccccaaagccatttgggtttcccttaaactggcttgttttcctgagccggtggagagatccttgtcctccggaagtggctatcgctctggggcggcttctctgccagctcgtcacaccctagacccagctgtagtctgtgtggtgggagagggtgtcaccaggctctggaggtccactcctctgtagtcacctcatgcacccttgggggtgatctgccttagaaattcaactttaggattagaattctgctaagaggtaccatgtgacaaaaaaggtagtgtaaaaatcacaaagaccaggacaggctcatgcctataatcccagcactttgagaggccgaggcgggcagatcacttgaggtcaggagtttgagaccagcccagccaacatggcaaaaccccatcgctactaaaaatacgaaaaattagctgggcgtggtggtggacacctttaatcccagctactcgggagcctgaggagcctgaggcgtgagaatcacttgaacctgggagacagaggctgcagtgagctgagattgtgccactgcactccagcctaggcaacagagcgagactctgtatcaaaaaaaaaaaaaaaaaaaaaaaaagagttctgcaaagaatggcacctggcatcagagctttccctgaaaggccactaaggatgaggaacgtgagctccggggaggcgaagggggcaaagccacctgcctgttgcctgttttacataaggaggttttgcataggagtcattttaagatacatgaagtagccagaatagataaatccacatagacctaaagcagattggtggtttccagggcctttggggaggggagactggggagcgactgattaagggacatgggtttttattggggtgacgcagacgttttggaaccggatgaaggtggtggttgcacaacattgtgattgtaatacatcccatccagcggtttgctttaaagtggttaaatatatctgagaaaaatgttaaacataaaagttttggccaggcacggtggctcacgcctgtaatcccagcactttgggaggccgaggcaggcggatcacg

SEQ ID NO: 3034 - DNA, 7428 bp, Homo sapiens
cctgacctcgtgatccacccgcctcggcctcccaaagtgctgggattacaggcatgagccactgcgcccggcccaggttttctctgagaggttcttttctggattcctttcaatgcctaaatggaagatcctttgatatttctatcatcctcattttcctcctaatgtaccatcctgagacaatctatttcaataaatttgagagggcttgaattgtgtggagatttctgcatcacagtgaatttgactcaatataatgtatttgtattgagtgctcaacagatacaactatgagtaaagtacagtccttctagtctagtgagattgaactaggtatgaacataggtgatgcaagatagaaggtgatcctttagttgggaagataggtgactacacacaatggagacaaagaaattagttttcaggctgtttaattagtttgggactttacataggacagcatgcttaacagggaggaatcagatttggttcaaagttaggagtctaagactttgagaacatatgagggtgcttttgaatattcactgaaatagaatcagaaggatggttggaggctagggaaactaaaagtctttgacatactcatcatgatgtgtcttcaggacatttaacatgaagatgcccagtcaagagttggtgatgagagtctgagcccaagagttacacatatggggttggagatagacccttgtaggtcactggggtacaggactggtgattaaattgtgtgcgtgagtgggctttgcaaagttaacacatacagaatggcaaaagaaggtagttatctctttaggtccctcttccttccagtggactttagggttgaaattgctttaaattttacattaccaacagaccttcatggcacttattttaacctatcttatagatattagtttttatggcacttattttaacctgtcttatacatattagtttttatttatttacttttataacaatgaatgttctctgaggtcttagaatatacattatcctttttggatccactgtagcactaacattaaaatttgacccaggtagagcagaatatttgttgaatgatctcttacttctctagtaagccagcttcttggacacctccttattcatacaattctcgtttcatttttcataggtataatcaggattaatagtacctaaaatcttaatatgggatccacagaatgtaagtataggaaaaataaacacacatgcattaatggagcatttagatataaatatgatgtcatcatatggtttgtttcctcaatccttgatcttcatgaggaaaaataatgttgtgagctcataaaactcttctgcctaaaaatgcttgtttctcaaatataaaacacacataaggcagtctgttctttggttagaatttgtagatacatttaaagcatatttgcatatcagcatttgccaaccctggagttgtcaagttgctgtatgacaggttaatctgttagctgctgtaaatattccagcaaccacatgtgagcttctttgcatacatttctgttttgttgtgggcttctattctgtttggtctgggtgcctatatttgagatagttcaaagcactacatgataaaagaatccctcatctggatcagatgtccttttaggtatgggagatttagtgattataatatttatcttgttcagtttgatatcataaagggatcatgataatataaaaaggaaaaatgttcagtgtcaaaagagaacagggggaaagaaatcaaaaggaaaagattgaaaagaaagcatgacaagaaagtggtagataaggccttttgtcctgatgggcacttacttcctgccccagaaaaaaaaaagagtgaaagtcaaataaaaaacagcagtgaacttttttgtttgatctgtggtacgctcttgcagttaaagtgctgaactggttgcacccttgccccttagctcacagttgttcagatcgacaaaaaaattatacaactgccaaaatatcctccatggacatagcttcagaatcatctgaaaacctgtatcaagatatttcatgtttgatgaaatatcccgaatagaaactttttatgccttctaagaagattcaagattcactaagttctacaagtgtcaagggtttctcctgaacaaagagtgtttgttgaaataattgcattgttcacacgggtttatacactaaactgttcactcatttagacagtcaacaaatgtattaaatgcctattctatcccagacactgtgctgaagatacaaagatgttgtcctcactgtgctcaaagtggtggagaaggcacagcactaggtggggatatcagtcctctgatgaggtttgcaggccctgagggctgtgaaagaggacctgaaagacatttgacacaaataacaggatggggtgaaacttcccagaagaggtggtatttttgcaatgtcttgaagtactcctggtgaagacattggagttcatcaggtttagaaaaggggtggaggcttactctagaaaaaggggatgccatctgtcaaaccactgtcaaaacaaggtttagtgctgacgtgttagatcttttaaacaatcagaaccattcattttttttctctgacgcctgccatcatctggtgatgggtttcttttctttccttcaaataaaatttattttccccctttattgtttcttgtcaggctgaattgatacacacacacacacacacacaaacgcacacatgtatatatatatgtatacatacatatacataagcatataaatatgtacacatgcatggatacatgcatatgtttacatgtgtgtatgtgaatagacattttacatatgtaaatatatatatatatttgccttgtatgattctttattacaaaataaatgatagagggacttaatgtaggaaataggaagttttgtcatgtactctaagcttttctactctcagtattttgggatttgcctgtcagatatttaaagaccattaaaaaaaaaaacttatatttttacaatgaagaatcccaaattcttaatcttaccacacacttcaggcttccctcctcttctacaacacctattgttacaattgcatttttctttttcaagttgtggcagccaaaactgcacacaacatttacaccaacatgttttctgttttactttaatagccccatttatgacaatctgtgagtttacttgtcttcaaaagtagctcagtaagctggaaattataaagaactatctgtgataactttgtggtcctatttctgagtaactaacattcaccctttacttttacttgcactgattggattttttaaacaccataaacattgtatttgtcccccactcccaaaagagagcaccttcatattgcttccattgctatgtctgagataggattcactttcatgtctttattcagggcacagagtgctagtcccatctggatatttttcaagttccgcagacatctttaagaattatgactgatcctaccaaaagatcggaacagcatattggcaggttacagggtttttatgagaatatatgagatcatctagtgactttacttttaaggtaggtagagtataagtacatagagaggccaggcgcagtgcatcatgcctgtaatcccagcactttggaaggccgaggcgggcagatcacgaggtctggagatcgagaccatcctggctagcacggtgaaaccctgcctctactaaaaaaaaaaaaaaaaaaaaaaaaattagctgagcctggtggcatgcctctgtagtcctgtagtcccagctactcgagaggctgaggcaggagaatcgcttgaacctgggaggcggaggttgtagtgagcaagatcgtgccactgcactccagcctgggtgacagagcaagactccatctcaaaggaaaaaaaagaaagtgcatatagaaggtaataataaataatagagattcgaaagactaaaatgaagaaggtttgtgttttaggggtaagcactggtattgagtatttttacttcatattcagatatactgtaaaagtgctatttttagtttacaactaaatttgcttagttatagtataatggtttgttttctggagcataatttatgtgttttcagaggctgaatggtgtttctcttttgcattttaattatcattacctggaaaatgtgattataaacaggaaacaaaaatgctttatcatcttatttttgttacaaattaatatttatgctaaagaaattctcttgaaatgtaaccttcgtgttttttatactttcaaacctcttacaaaacgtgaacctggagaatatgaaaccatgcatttcttttttctgcaccatatcaaatactcagaaatttgaaactgtattatctgagcatttgagaggcaagaccaaattgcagatctagagtctagattaataaatggtaaaaagatgcttgattaaaatttttatactcattctttaaaaaataaaagtaagtgggtatcaaagactaacgaaaaacagaaattacggctcttctcactccttcagcttcattttaattgttttaaatgagaatctttgacggcaacctctaattattttgacatttatgccttttgactgataggagcacagggtaaaataaaaagcaataattgctagaaccaaggaaataatattgttaatgaaattttaaattttagtctttacaacttttaatgctttttcacgcatgttctcatttttaagtctcttttttttggtcagatgggtttaagtattcactaatttacagacaaagtgacattggtaaatgtcgtttgaagaagtactcatctgagaggtaaatagaaatttgtcaacttatcctttacatttatgtttcaggttttacaattgaattactactcagttatgtcttcccttaccttttatttctggtcatcatttctagtcaatgcatcttaccctctgtaccatatggtctaaacatttacctagttttaataatgtttagagttactgataaaaatgggttctaaatgcagggacatgtaggatggagagaaaattttaaaacatgtttaattgaaattattactgatattaagtatcaccatctgtcataacacatggacagcatattgtctacaaaagctactttttctagtctgtaaaatgaatagtttttataaagtgtttgcaaattgattaatatcagattcatcaatctgttgagccataggaaaagatcttctcaatagaacaaactagcaaagtgcatggacgataggataggatacagtggaaaaataactgtttcgtttacatgggaaggtgcacgtgtaaagcctactggcagggggcttagaatttctaatgttcccatggagatcaacagggccagctgcatgctaaccatgtcatacaatctagaaaatagctctcaaataccaacaacactgcatctgatatttgctaagagaccaggtgttgttacaggtgaataaaataatgttccacagcatgatgcctatgttttattagtggcacctgaggagagcagcaatgttagtaactaacggaaagtcaatttctgtttcattttcctgatttgtgtatgtgtgttaaggtgcagagctatgctaaaaagcataactaatagcacagttattgattagatccatgtttgccctttcataaaaaacaattttttttgcataagagcagttataattgttgtactaaaagatgcttcaaaatacatgtgaatggaatataccttctatctcttagcaggtgttcacctactcattctgagtattcactcagttatgtcttattgggccaatgatgattaatgttttttaaaacaataaatgaacttaattattaaattttccattagttcttatttatggtgacatttatacccagtgttcaaatattaatctttcatttaggttgaatatggtcccagtgttggggagagctatttgaaactgatttgtgaaaactttactacaatgatataatgatccctacttttgcccaaaatgcaatataagacaaattttttaaccttagattcaactcactggaattcagccctaagagttctagagttcataactaaagaattgctcagctttaaagtgtgcttgcatgatcctcagtgaagcgttgtaatgagattccagttagaatatgactttgtttcctccaagcagctattattatttaatcatcttaagaaatagaggtccttatgttagtctgcatttgaggtgtataactacattttacctttcttcgcattaaattttgttctggaaatatgtctgaaaatgtagtgttgataatgtgtggtgccattagaaaagtttgtattgcatgtaattttgtgaaatcatgttttctttagaagactaataatgttatgtgagaatggattctaaaaatggcactaatgaggacaaattattttgtgttgactattgaaggacccaaagaaataatgattcaaagataattttataaaagccaaagtaacttgtagctaatatataaaatacttttgaccaggaacttttaaagtggatgctatgaagatagagagtgtttttacacattgtttattgattttaatttcactttttctctccttagggtgtgattaggcccactgggggatacgctgtcatgctacactggtcaatgtcttccatatacggacttcaacccggagaggtgtggtgggcagcttctgacttaggctgggttgttggacattcctatatctgctatggacctcttcttcatgggaacacaacagttttatatgaggttcaaaacattatttgtggctggagaacgatgtgatgtagagaccctggaatggtccaaaaatgtcttcagagtacctgtcttagaccattggtggcaaactggtataaagcactaaagacctctttatcttctcttctttgtttcttatatctgtcctccctctaagtgttccctgggaaacaaattttcatattaaatggatcaactataaactttggaataagcagacaaccaccacaacaataactctatctgctgcttcttttgagggatggctatatatatgagaatgggtacattgtctagaagccatttacctcctcacaaagtacagagattttaaaaaatttgactcactgaaagcagctatgagccatgggagccctacaacctttatatgtacatattttattttagtcccacttagttcaatgaattagatcaacctttttatatacatattttcagtattctcaccttctctgcatctggggcagaatatcaaatttgggttaaaaattagtgagattactttgcaaaaaattag

SEQ ID NO: 3035 - DNA, 2185 bp, Homo sapiens
gggaaacaatttggagtctaactcctgccaagtaggcgcctcaggttttccattaaaaccccagaaaggcctccgcttaggctcaaagaccatgtaccaggactaagattcatcctaggacttggggttataacagtaaacagaacaccctggcattacaacagtaaacaaacagttaaaggtgtagttgggaaatttatattctagttgggaaaactgcaataaaccaataagtgttatgcagaaaaatcaagccaggctgtggttgggtaggttagtcagagaagaacttactgggtgtggaggagggggtcacattttcagcatggactttgtagggggattgaatggcgaccctcaaatggtggttctcaaaaagatgcgtctaagctctaacctctggtacctgggaatgtgaccttatttgaataaagagtctttgcagatgtaattgatttaaagatctcaagaggagattatcctggatgaaccaggtgggtcctaaatcctatggcaagtgttcctataagtagcagagactcaaggaagaagccatgtgaagacggaggcagggactggagggtgcatctgtaagcccaggcatcagaagctcacagggaggcaggggtggctcctccctcagggcgcccagaagaaccagccctcccaaggccttgattttggatttgtgctctccaaaactgttagaaggaaggtggattcttcaagggaactggagagaagagaagcacattcatgtatttccacattcagcctccatctcacgagttacaccattcccagcacgtcaccacccccagacctttggttaccagcctgggggcagaggataaggacgtcattcaaaaatagagagattctcaagcctccagagtgcgggggcccagccgagcatgctggcggcttccagggaggtggccacgccccaggggaagtggttgcatggaggaagaatctcagaggaggcttggacgtggtagagcaacgctagtcctgtgttaggactggctagtccgtcctgcagggatgaggggcagagcctcagcagaagtccaggccagtgtcccccctccagcataagagccccccactcccacagggcggaggaaccactgtggtggcggagcttatttcccagcagccccgcgggatgagacccaaacgagaagttagggtgagtttggaggacataaagtgagctggcttcccgtatactggctgtgtggagtaatgttcacggcaacagatttccatctcctcagcctcaggcccaaccctgctaccccagccatactcagaggctctggaaatcttacctggaggagactcttctgttaccaccaagccaggaagtttcatggcttgggaagaccaagaggaagtccacctccccctctcctgcacctggagtctcccatgtgcacggaggccacgcccccaccccgccctcaggtggcatcagcccaggatctgaccctggactggctcacactcagttgcctctggccagtgcagggctcagccagggatggcttctagctgacagtgggaggaattaattcatctgaccggaatattcttttctcttctgggctgttggtttttcaagtgcaacaaagattccatacagctccaaggaaggagccaagaaaaacattctgtgccaaagtgagatcctggaagtgaaaccccggaataaagctgaaaaacgggctccagttgggtgccaggaaatgcaggactggaatgtgacttgacttccggcagcgcgcaggtgctcccgggtcacctgctttgaggtccagcctcctgccctgcctcaggtgaccacatgaccactgtggactttgccctgaaaccttctgggaggagaagaggcctgaccttggcgctggggtccagtgggcattgctctggtccgaggctgctgctcttgacctctgctctgcggctgttttccattggagtagaggctcctcctgtcctgtcctgcctgtggagggaagcaaaccttcccctggaccagagagaggagaaagcggagacaggtagcaacgctgtggactggtgatgacaggctcttcagctccctgcaagtgaccgggcctggggaacaggtgagtcattgtttaaacctctgtgccctttgtggagtgtctgcctg

SEQ ID NO: 3036 - DNA, 7515 bp, Homo sapiens
aaagtcagtatgtcctattcagatccctgctctgccacttactattgatcaaactttaattatacaacctctctacatctcagttttttcatacatacaagtggcatagtaataatagctacattatatggttgttgtgaagataaaattagtcaagtaatttaattaactggaaaagcactggttctagataagtgttagtaattatcattattatgggtagagagtatggtatattggttaaggactctggctctggcattagacatctatgttcaactccaagtttttgctacatataggaggttggagaaactattcagtctctctatatctcagtttctacatcggccaaatggcttatgagaattgtaaaggtaagaaagactggatgacgccatttaatctgccttaagtgacgtagaaaaagatatgatcgtatactattggggtgataatttatggcctcggaggaggtaaaagggcatattgcacagtctacttgtgagcaatcactttgctgagcccacagtgatgatgtcaagttgaggccaaactcaagttagccaagtgaacctcacttagccaagttaactctgtgggtcaggtctattcctcatatattcacaagagagaacaccagcagtgatctgcaaatgctgcaaataatacctgaggagtgaaaatagtaccataacaatgttttgcggttgccttctgtttctatgttctgggccatctctctcattggctttaaagaaagagaagtgtggaaagattgcacaacaccaccaccactaaactgaaacaaatataatttctagcaaagttgaatttccacatgatcatgtttaaaaatcacaaaagtaagtctgggtctaaaaaagtacttgagcaatttaccccatttgagaactctctaggtttgaaatctcatattgaagcgtgactgctgtggcttggttttccacatttatcagtgtgggggcactggccatgattcttctttcctttgtcctccccaggcattggcacagtctttggacatgaaaatcatggagaaggaagaggctgattgttatccatgattaggcagtgcagatatagctcaatattccaaatgggatgttttggccttggagttaagttccaagagcattataaaataatcacctgtataggaagtcctgacttaactctattaacaacttcgaaagtcacatacctgaagatgatcctgcatgtccatagagcctaggtccctcaaaagatggtgttgcaatgacagaaattgagacatcaagagaacgtttagcagaataagttagttaagatgtaggtgtgtcgaaagtttcaggtgtcagtaaacatcaaaagaaaatgtagcagtagctagaaatttccaggctgaagatgaaggttaaagctaaagatagactatttttgtcatctacatggaagatgatggctaaagctataagagtgaatgacatcagcaaggaagaaaatacaggaataaggaagaagagatggtgaaatggctactcgtaaggagtgggagaaagaataaatgagaagaaaatgaagaatgtgtggccaagaacataggagaaaagccaggaagatcaatgtcttatcaacagacagatttgagcagcaggtactcaacagagcttaagaaaaacaaatattgagaacagagtaaggactatttcatttggtgaacaggagatttctattgaactagaatagctaggtaactacattttcatgggttaagaagagaagaggagaaagaacagtgaggaagagaacccattgtattattgaggaattttgaagtcaaataaaaaagagatgtgagtggaatgacataattctagagataagtgaagctggagaatgttacatgcttggaaggaaggagtgagtcttagaaattaagggagcaagttccttcaagacagatgaaacgtaatgagcaacagaatgaactagatatgataatgatgcaaaactcttctttgttacatacaggctgggagaagggtccacacaaaaattctgagatggagatgatggctaaagttagagttcacattggatgactttgaactcagtaaactaggtgaatttgccagaagatatgaagctgtgggaacttggaagcccaggacactatgatattgattacagggaaatagttcaaaaatatcacaagattacaagcagctgtaagtgtcttgactagcgaaagaccttggatttgtagagcatcagtctatgtatgtctacaacaatattcatcaattttattaatccaagactgggtattagaacaggcagggagttaggagaacttggtattgacaggggcaatgtcagtcagcaacatggcagcatgcaaagaactttggtctgtgagatcaggaatctaggttctgggttcattcattacattgtcctaggctaataactttcttctttcactcttatgtcttcatttgtaaactggagatgctagactatgtaatttcaaatatggtttcaaatggaaagaaaatcttattcttgaggcaaagtagagttgcagaaagagcaacatctttgtggtcaggctttactctctacttctgccactttatcgcctgtgaccttgagaaagttacttctttgcacctcagtttcctcatccataaaatggtgaaaagagtaagttatggggaaatgttaaagataaaatttgaatagtagtcatcaataattgcaataattgtttatttgattatattgatttgatttttttttttttttttttgagacagagtctcgctctgttgccaggctggagtgcagtggcacaatcttggctcactgcaacctccacctcccagattcaagcgattctcccgcctcagcctcctgagtagctgggactacaggtgcatgctaccacgcccagctaacttctgtatttttagtagagacgggttttcacaatgttgggcaggatggtctcgatctcttgaccttgtgatctgcccgccttggcctctcaaagtgctgggaatacaggtgtgagccaccatgcctggccctgatttgatcttcctaaagccatatactttaaccataatttaatgtttcttgatgacttacaatcatcaagtacaaaggatgattaatgctataacattgtgacattcttgtgcccagattgcttacacacttattgagcccaagaatcttctttgtgcaagttgtcaaattatcattgtactataatcaatatgtctgtaatctgctaagatcttggagagtagacaactaaatcatataatatgtacattaaataaaagtaggtgcttatggaggccacgagtattaggtgtgcatagctattttgacttctaagaaactttctttgcttactttcagattctgaaatgtgatccaataagtaggacactgaataaacactctaaaaagagataaagtcatattcaaacacaaaaactgtcaacatacagtgattgtgtgtaagattggtggaagagagttcactgactctaacagaccctaatactgcattgagtacctctgtaaattttcattctatttttatgagtgaggaacggtgagaaaatggtatgacaatgaggagttgaaaatggaaaagaagattttattttctactaattatatattgtctatgatctcacatttaaaaatatgcattggcttagtcaataattgaccctggggttgatttgtttttggaacaagtctcagcaaagtcccttaaaaagtaagataaataagcaatgtttatacagctttaattatgttaatcattttaggactgaattcacaaactgtcagggaacagcaagagagtgagcagaccacttttcctccgaccttcccttttcctatctgattgctgtctcccatatattcttttcctgaggcatctgaaattgctgatttaggtggagtagaagatttaacaaagctaattgcttctgttgttagacagacagacatgtatctattacattcactatattagaactacgaattgctttaaaaagtcaacagaaataaacataaaaagtgtctctaaccctttctacttttaatagaggtacttccatagttgtagggaagtttgtacctgcgagtacaaaacagagaatgaatctgaatgatgtggtctgactgctaatgtttacaagctgaagaggagatgctgtgagatttccctgtggatgcagtcttgagaaaaggactagcgaaattactacaatcctagcacgctgaattagttgaacaggctaatcctcacaaatggataggatttaagatatgattgtgagattgttatccaattgcataaatctatgtataaatgcaggttcagatttatagacactgaatataacagaaaaagacatagatattttcatctaggaacttttatgtacattttaaatcattgtttagtatatatttctctcaatagaagtagcatgctgaaatggaagaatttgttgcaataaaatacaaagccaagctattatattactagctcaatagcacaatgccttagatatttaaatttgtgcagagggagttagttatatataaaactctttggccaaacccgccacatatacagttgggaggacaccagttaagtatgggtgaatagagaagtttagaatcttgcattaaaaaaaacttccttacaaaatgtgcacacgagaatcactaaaatttcaaggatcctttttacttaaataaaagatgcaaaaggtattgtggtagtaagtgtgcatctgttcacccttagaacagaatttcaaatacttagtgttttgaaaaattcctttgccaacctactttattaccccatgtaaatgaatcatttgattttctgtgtaaattgcttgtaaacttgctttccatttaattataattcaagacagtttagaacacacacatacacatacacatatgtacacatacacacatacacacacacctgggttagagaatctgagcatttaagagctataaggaaattttgagatgtttggtcgaaatccagcctcaagttagcagacgtgaaactgggatcacagaatctgagtccttgtcccaattcacagtgcacaaaatctggcaagaactttgacgttcaggttcatagtcacctttctatcctatcaccctcctttatcatttcacaactattgtctgtgtttcaccttttggcttggtattatgccagcatgcattcccttctcctatacctagagagggtcatggcgatttcccatatttcctccaacacagcaaacagactaaacacatatggtccaaagtccaacctcatggtgtcagtctaggccttatttcttcagatgattctcttctcagatgaaaatcactcactggttacaaaatcaatgttgtaaaaaatgaactatttttttcgtgacatatctgttttgatcacattcccaacggatccataaaataacacaaaataacatcacatgcactacttttgaagtctgtactgagttactggtctgaaacattatcaattgcactgtggtatgcatacagagcttccggcagagtgtgtatccagtgagtcatttgagaaatggggtgtctctgccaggcattcttttagtagcccatgtaagatgttactgaagagctggagagaagagggagccactctacctcatcattcacactgaacctaaatgaagagatcttagattagactcacctccatctttcatattaatctagggtaaatattgaaataaatcattctgtttctttagtcctaatttatcttttcctaggaaaagaagaagaatctagcactgtaaaatacacctgggatcttacctgagataaaactacaaactatagtaggctaacatagtcaagactttatatttccaaaacactttaaaatatattatctcatttagactatattcaaatatttaacctcatatgtctctatttgggaactgtgaaaaataaggcctaaggagatatttttttttccaggccacaaatctaacaaatgttctatttgttatttttatttttagctattattttcagtcttaaatttcctggtactatacagtgctgacagtttttagactgtatgaagaatatggcatccccaattagggactattatggctcaacagaaagggtatatataccttggaaagggccaaaagctcatatgaatgctttgtcactagcatgcatctatcttgtgccaagagatctttttctagttatcctctagggtattaaatgtttaaatgttttctgcagccaccctgttctctagatcccatgtattgaaagacttacaggtccctaggagaatattttgtgaaggtcttaaagaaagctacatttgccttccttttctacttgtgagcctttttgattaaaactcctcccttactgatgtcatccagatcagctcaaggaaaacatttgacaggtccatctgtgtccacagtcacccacaaacatgggaaactgccacccatctgcctccctatgctttgttttgctcctgtcctggttattttgttctcttgtagctacaggggatattaataccctcctgtcttccagaaatgtgaagagaatggatctatgttagcttgtgctcctgagagaaagatgttatagaaatagcatatgctatcacactgttatttacacgcaattctacaagttttctagtaacatcctcacattttaatgaacatgtttcttaacttcctacctggattcactattaatcatttcaatgtaattatggctcatcaattattctgcgtttcccaaatagattgtttactcttaatgacagaaatgttataaatttagggacactttttggattcaattactttcttgtctattgcctgcattttatgatgtcattcactaatgttgccaagagttgaatatttgcattagttccttttttattttgaataacaacatacactttttggtaaaacaacaccaggatgatttcaaatcagggaaaatgcaaatcagaggcttaaagatgtgaagcaatccaaatattttcttaatcacattcctggggcattgtatgaaattccaatagcaatcaatgatcttatgattcaaacaatcctataaatatgataagaattcataatagctgtcaaaattcaaaacaaaacaaatatgtcagtgaatttcaaaaaggattatttgagtcaattttaatcattgcttttttataaagacatattatttgaaaccgatatgtacagattagagctcagtgtacaaatttacagccatgtcacatgaatttaaaatcttttaagatacacacatcgcaaggacaaaaaaccaaacactgcatgttctcactcataggtgggaattgaacaatgagaacacatggac

SEQ ID NO: 3037 - DNA, 4332 bp, Homo sapiens
gcagcattgctgatggcaaggcagttagcttcccagacaccacctctgggcgttaccatgactcatgggagtgacagatgtaatgaagttaagaatcttaatataagattatcctggaatacctgactgggacctaaatccaatgacaaccgtccttataagaaaagtggagacacgtggaggcaaaggtgctgtgaacatgaagctagagatagcagtgatgtggccacaagccaaggaagcccgggaatgccaacagccaccaaaagctggaagaggaacagggccaagggaggtggtcagcagaaatgaagcactgtccggatggtgtgaaagtgatctatgctgtggtcagaacagtggaaggccatgaactttgccggcgagtgcctttgttctgagtcaaagtgttcctcggtatgtgaaggacatcaggtccaaaggctgctagtgactgaacagataacgtgaattccatcaaagcttgacttctgctcatccctacctctcctcccgaagatagtacggaattgcaagggaagaattggtccacgtctgtgagaggaggcctctgaaacacgctgacttcacagaggagaaggaatgagctcaatttcaggcacctcctccggggcggtcaagagcagaatgaaggagaacatgtatggccctaggttggccttgaagaattagagaagctgctggtgccccgcccccaacctggcccaacagcagagcctccgctagggggagccgtggagacctgatttcctctgcgccgcctttcctaatgaataccccaggggagctcctggcagcaccctgtggaatggccccgcggagctctggcccctggaatttgcccttcacaattatgctccctgctgggagaagtataaatatggatggagcgtggcgtctttaaacatggcacaagagtagaggaacaaccaagtccaaatgataatattttgaaacgccacggggagcctctgctgctgttgagttagaattgcttctctttcatgtgattaaagaagcccttgtgggtttttgcttttccttagagacataccatggtttctccccccgcactacagcactgaacgatttttaaggtttctaagtgcactccatttacatttcctactcattctctaaatgaaaggcaggctaaaacacattaatgagcttcctgattactgcagcccttgagaaattaattaatgacaatgcagccacacttaacattcctcctcctttctgagtttggaaagcgggaggagctgcgctttaatccacgcccaaccaagagccaccatgtgtctttagccgaagagttggtttgccaggacacatttcagattgcctttcctagagaaaagccattccctgaataattaagagacagcatcttttccattgtctggaatttttttttaccctaaattaggtggtttaagctggtagatgttgggtatgacttgtttcttttcttttcttttctcttttttaagtaaataagtgtcaagcaccagcatttacctggcccttcccttataataatagccaacactttaaagttgcttgtcagggactgttccaactgctctgtctttctttgcctctctctgtgtgtacatatttacttattaaatctcacaataaccctggggtaggtggtattattatcccctatttacaaagagtgaagaagaagaacaagacatatccacggatctaccagctaaaactacctaatttaggactttaaaaaattcctaagccattaaaaaagatgccatcactgaagaacatacagtgagaaagtggaagagccatgatctgaactcaaagggattggctcagaatccatgccttagccagtaactacatctacagccagccatatgtacatttgtatcttgagttgtttttattttttaatctgtgtttattttattatttattttctattgtatatatttaaggtatacaacatgatgttttgatatacatagtgaaacgattattgcaggtaagcaaattaacgtattcatcaccttccctaccttctctagttaccctgttttcagtaagagcacctaaaatctagtctcttagcaacttttcaatatacaagactgtatgattaactatagtcctcctgctgtatgttggatttttaaatttatccttcccacataactttgtaccttctgacaaactccccatttctttcccctccccacccttggtaaccactgttctactctgtttctatgtattagactttttgttagattccacatacaagtgagatcatgcagtagttttctttctgtatctgtcttactttttagcataaagtactccaggttcattcatgttgtagcaaatagcagtatctcctttttaaaggctgaatagtattccattgtagggatattgtaatatatatagatatcacaatttatttatccattcattcatcaatgggcacttaggttgtttccacatctaggctatcatgaatagtgctgtgtttactgagatgttttccactcatcttcattccaggtgccttcagtgctgcttctgcctgcagagatgtcctccagtcaccatactttgcctccggtaggctggctgaggacagagaatagtcaacacacacaaccactgttagagcgtgggtaaaccccagagtgattttatagcatgcaggcatttcacatccagcagataggcattgggctttgcaccatgcatttcatcttgtttcctcctttcttatggggagagatgaaggaaatcctttgcaagaagcatattctcatgggggtgtcatcgccgctgaaaacagcggacagaggttagcaagactgctcctattgttacaataaggaccctgaggcttggaggactgctgacttatttgctcaggattgcgcggtttggttactttgccttcttgtttttgttttgttttttatgggactctgcaaacgtgtaaactgactgattccaacctgctgttctttcttctgcaccactctgtgcccatgtggttctggggatgaagcatgcacctaggtggctacccttggagagtcctttctggtctcagagctgacataagaatgaatcagccttacaagtgtgagtccccggtgccagggccttgaaagaattgcacaactttttggcagccccaggaagccctgaaataaagctggggacccaagtgtactctgtgggcatcctggtagcaacagcattcaccacataaaacaatgaagccacaaagaggaagccacccagagaagcagctttggctggacaatgtttccaagcaagagagagaaaacagttagaaaagaaagtggcttttcatgatgagcaaagcttcttccaggcaaactaggtctcaaaagtatcctttcctccgcacgaagtgctgtgggcctgtgagcgctctcccactacaacagagtggagctgtgggtcttggaggaggttgggaacagagggttttggacacagactagatacaggctcaagtctcagctctgccgtttcctaactctgtgacaggagtgtccaatgttttggcttccctgggccactttggaagaagaagaattgtttagggccacacataaaatatactaatgatagctgatgagctaaaaaaaaatcgcaaaaaaaaatctcataatgtcttaaagtttatgaatttgtgttgggctgcattcaaagccgtcctgggccactggttagacaagcttgctctgaggcaggctaggttatctttcagcctctgtttcatcagctataaaatgggaacagttggatctatgtcacaggactgttgtaatagttaaatgagaccatgtttgtatggcgcataagaggcgtgcaaagtgcttgatacatagtaagctcttaatagatagcagctgctttttagagttcacagtgctcccagtcagattcttccttctgctaagcactggacccgcggctccctctgagatgctctgccctaggcaaccccgaggcttgcaccctctaaagtcaggactctctgctcaaaggttggctctccggagactgcccctgaccacctgacccagagcagctcccatccttctaccccactctgcgtgtttcttggcatctttcactatgggaagctgtgctgtagattactgtgtttatttgtttattgtctatctccttcgcctagaagagcagtccattctttttggcaccagtgactggttttgtggcagacaatttttccatggacccagtgggggtggggag

SEQ ID NO: 3038 - DNA, 878 bp, Homo sapiens
ggtgttaatcgccatctgcagtgcctggaggtggggtggggagaagtgaagaatctcttcctttttaatagattttcaagatgggaaaatcatattgcaacccacaggcatttggaaacaatttgtgccgaagacagaaagtacacctaacgttaagctgaaaaaactggacgctcccagcaaactcactttgcagactcctggttgtcagaagaaaacgccagaggatttcacttggcattgacctcttactacttccagccacttaccctgggcagtagaaagaaggaacagaaagcagagtagattaagaggagcaagtacaaatggcgtgggacttcaaatcaccacctaagattacttctttgatttctgaaaaagtaggtcaaaggaagatgtcaggggcaagaaaccaattgggtgttgtgcctaagaacgtggaccctgtggccagactgcttggatcagtgtcctccctccaccactttgtagccatctgacctcagtgctggagcagaggtactgaatgaggaagtggagtcttgggatacctttggagggatccagttaatggactggctgccataattggtctgagacactggtgcaagcatggagatgacgacacagatactatccagagggatgaccaggtgaagaatgaccaggtgaagacacagaaagaagacccccttctacaagccaaggagagaggcctcagaagaaaccaaccctcacaactccttgatctcacactttcaatctccagacggcgtggaaataagtttctgttctttaagtcccccagcctgggatactttgttatgaccacctcagcagatggacacaaccaggttgcaaaagctactctctctgcc

SEQ ID NO: 3039 - DNA, 4036 bp, Homo sapiens
cgggcgcccagagggcaaatgaggggcggcggggtggcgggtgggggggagacgcggaatttcccagcgcgggggctctggcttaccctgcaaccgggcagtctctttctgtttacggagagaaaggggaaatggaaaagtcggggaggcggtggctggcgtccgctgcgccgcccctgggcaggctcagacgccgtgagtcaggggcagagcagggcggtctgagcgtgcgggcgacgcgggtctcactcgtccgctccgctctggactgcgcgccacgctctggggtccggcgccctggttcctgcttctgccgctgccgccgccggatcccagtggcccggcgtgctcggctcccacaggcctgcagccagcatcgcaccgaaccttcggggggccgcggctggagcgctcggccggcgtgggagcgccaaggccgcaggtaatccagggttgggggtctccggcgtgtctttcgggtcgcgtcccgcctgggtgccccggggattcccatgcagaaatggagggtgcccccagcagaggggaaaactctggcgtgggaagaggtgggggcgtgcccacagctgcgctcgcgggtcgccggctgcaccaggcacagctggaaagcaccttgcgcaagggtctcacggggtgcagactcgcgactcctcccccttcctcctccttcccgtatccgcagcgccagggcagtgctggtctgggcagtgcgcggggaagcggggacccgctgtcactgcgcctcccgctgccgacgccgcctggacggccgcactctccctgcccgagacccggtgagtgcagctcggaggctggaggacccgatcctcccaaatgctgggtgctttgataatttataagccttttaggctcccttgacttagagaaccaggaggaaaggagtgggagtgtgggttggcggagcccagagacttgtgaatggctggaactaaattcaagtttgtaacccggactctatcccatgactaaagaggtcatagcagaacacgaaggctgggcttttggtctaagaaagaatactaggagaaaaaaaaagttattttcacggaagttgttttcgagcgatagtgcatgatcaggactctgaaatttttctagctctgggcggagaaggacgcctagggattgtctccatagttaacaggggaaggccaccggctgcctgtaagagagaaacgttgcgatgcttgtctatttcacttttgggaagacaagattaaaggctgctcttgataaaaaacagggacagaaaggctcttgcagttgctttacatacctgtggcctgagtcgtttgtgccaaggagagtgtaatccacttccagctgacgcccccagctctctgcgacggattgaggtttgtgtgcaggacgtctggcatacggcccatgaggactttgtcgtgtaaagcaaatgggaacgttgaggcatgtagaggttttgaagcagagtgtcggtccttccttccatacgcctgaaacgcataatccggggctttttgagagcaaaaacatagtcagaaatgtgccctgagggagaatgtactattttggcacacatatgtatatatgtatatataatttttaaattttttttgagagggggtttcactcttgtcgcccaggctggagcgcaatggcgcgatctcggctcactgcaacctccacctcccgggttcaagcgattctcttgcctcagcctcccgagtagctgggattacaggcgcccgccgccacgcccggctaatttttgtagagacagggtttcaccatgttggccaggctggtcttgaactcctgacctcaggtgatgcaccctccttggcctcccaaagtgctgagattacaggcatgagccactgtgcccggcctaaaaaaatattttaaatgagaaataacacaagtaatagtcattctttgttaggcagaagcatatgctgttatgctggccattttcattcacacttgccaggaaacactcacattttgtttctgtatatggaggcagccaagagtattatgttaatgtttaggaagagaatttcctcgtgattttattgctgatttctgaaataattcagtgtaactaattttgactgtatttgcacatctctccaattccaaaagctggcataattttctgtttggttaggaagtaggaattttatgaggacttttattgtaaactgtgtcaagggaaaaatcatcttatactaaacgtctttattgccaaactagaataccttcacaatctgaactttctctagatgggcacagatcatgaataactcagaaaccattagcatattgtgtgcttaattaaggctggaaagtgctgaggctttttgcaggcgcagttagcaggcgaactggtcagcagggtttctggggaacgtagatttgcgtgacaggggccctgtgttgctaaggaattactgcaggcactgagaaaagtctcagcgtcagacactcctccacctcccgggtcctgcttccctccctctcccctttccaggcaactcacagtttaggggtgtggttgtgtgtgttcaagctcttgggttttacatataaatgcctgagacttttctgcagggtttaaaaactaacatcttgtcttacagctcttttaggatttgtcttttagaatctccagtcctcacaggaaaaccccccaattaaaaaaataaaagaataaagaataaaaagaataccactactactataaaaaaaaaaaaaatcctctaaaatttgtcttcccagatcagcagagtgaatttgaactgtgtggacttttttcctctttctttcttgagtcatgttagtactgagaactttttttttttctgtcaaatcatctgtttgataaataagtccaggagacttggatcctttcaacccctgaggccctaaattaggctgttttttttttaacctctgtgtttccagtaaattcgacaagcagaaactgcaactaaacggctcagtaaaaccgaagtcaaatgttcctccattaatctaagaagttgctctcctaactcagcagactccaagaacctgaatcacaatctccctcgaagatgtacaagatctcaggaggggaagctgccccctcactctagatttcacggtggtgataacagccatgaaagcatttcataggtttctgccttttttttctctctctttatgtcttgttttagatgcaatcttcttaccgcgaagaagccaggggaataggtagccacatcttgtttgcagataagaaaggaagctaacgcagtatctgcaaagccaggagtctgactcagtacttttctcactcatgcatacaaagcagctaaaaatgacacagcttatttaccatgcccctgacactgcactgagcactttatgagcttgaactctgttaatcctcacgaccacctcatgagactctccagaaagagcaacagtaatggagtacatgagcactggaagtgacaataaagaagagattgatttattaattaaacatttaaatgtgtctgatgtaatagacattatggaaaatctttatgcaagtgaagagccagcagtttatgaacccagtctaatgaccatgtgtcaagacagtaatcaaaacgatgagcgttctaagtctctgctgcttagtggccaagaggtaccatggttgtcatcagtcagatatggaactgtggaggatttgcttgcttttgcaaaccatatatccaacactgcaaagcatttttatggacaacgaccacaggaatctggaattttattaaacatggtacgtttctttccgatcagttgggtgctatgtgctcagctttcctactgcagcttcatttaatgcagagtggtgtttgaatttggcttagatgggctggcaggcatgattttaaaaaatgtaatcatcagtaagaagtacttccatgttaaagatgcaaaaaaaaaagtcttcattaaaatttctatttaaagattcttgatcata

SEQ ID NO: 3040 - DNA, 824 bp, Homo sapiens
cagacctccttctcctctgcatcccggtggtcctgactcagaccttctacattgtcacttagcattcacaactcgccattgatcaatgtcccccttgggatcctgtctcaccaggagaacaacagagttgtaccagcctgtgcccttggatgccattccaggcagcaattctgaagacagctctggggctcctcaggtctctctgcagtgctcctccttcccctctgcctccactgccccatctcaccagccctccccaccaacatttcctccaagcctcaacaagtcacccaagagtattctaaggtccctgctggtctatctgacaatatgcagataggccttggttgccttggctggctgtgaccttgctgacatctatagacagagaggtgggaatgaaagacacattactcctggatgttggtggagaaggtggtggttgcagttgctacgcaagagtcaccaggctgcagactctgtccacttctgagagtgcaatgtcccctgtgattggctgggatttctgagcttttcagcttgcatatggtgagaatgttggcacaccgcagccctgagggcctgggctttggactccggcagtcccacatgtgtgtgctacctctgccgctctctggttgtatgaagtcaagcaatgtctgtaacctcactgagtcacagcgctctgctctgtagaatggagatgggatcctctctacctcctgcagtgtctgtgaatgccataacacaagccagagtgctgagcaccgtgcccaccctagaagagggctcggtgtatagtagcagctcttaatgctcccagg

SEQ ID NO: 3041 - DNA, 8389 bp, Homo sapiens
tttaggtatatttctcattgttagattttttctattcaaattcctctaatactcgttttctaattggtgaatttaacccattttcatattaacggtgataactgctgtgtttgtacttctccctgccatctgattttatgttttctattcatcatgcttttcaaaaattattttcttgatacttgctgaattgttagctatatcccatttctatatttcctggtggtttctcttaaattattagcaaatatattcatcttgatattaagaattcatcagcatctaaaacctgttaccaccaacgatagtagctaacagttattatttcctgtgtgtctgacagtattttaagcttcttaccagtattaactcaataaatcttcacagtcaccttgtgagaagggagtcagttattcccattatttacagatgaggaaaccagtaagaaggtaagtaattttctgaaaggcacacagccagtgagtagtggaggcagaattcatactcaggctctgtacctagagacctgcttgcttcagcactgagctgttggaatatttctacttgtccctgcctagacaccctctccttccaggttatgctgaaatttactttctagattgttgtcttatctgttatgttttaagaagtctctaaacatttacattaaagacaccagcaatctttggacttgacttcaaattttactgatttatttttccttgacatgtagaattggcatgctttctgggtgctttcttacctgaaaaatggctttattttgccctcatatttgattgatagattggttaatagatatttgtgagtttcattcaacattttgttgacattgcttctttgtgttctagcattgagcattacagatgaaaattcctatatagtttttctctctggaaattcataaggtttggaggggtgatgtgtgtgttgttgttgttctcttattctttcactttagcctctcttttttgaatttctgttattgcttttatcatattatctatttcttttctttctgtgttctcagagaatatcatcactgagtctttaatactgtcagcttcagctgtgtgcattttgctcttcaactttcttttgaggctttaaattaggcaaatatatttttcttagaatttctgaaaactccttttcactggagcttattttaattatatggatgcattatcctcttaaacttctgtgaaaacaataattggagttttcatttgcattagctgtttcatgaaaggtcaagttttttgcttatttattttgatgtttccttttcatgatattcgtgtcttgggatttggttgtatattcacatttttaattagctacttgatttaaataaagtatcagtagttactttcagggttcttggtgattataataattactcacctaccaggcttcttccttgcatgcagctcactacaggaatctgttgtgcctagaagatttcgggacaagtggggaaaccacactccgttaactgcatacacagggaaggagctacgagggagatagaataatttggtctctactattaccttaagagaccttcccctgtcttcgatttaaaaaaaaattactgcatacaaagggtaggagctacaagggacatagaataatttggactccactactaccttaagagaccttcccctgacttctcttttaaaaaacctatgggtctctgcacccctgaacttactttctacacctatttctctcttcacccccaaaatccatattagaatgcccctgcaggctataaagcctttcataaaagtaaaatacccagtcttttcaagagaacaataaaataggcagtctcctacctcttgtcttactctaatataaactccatgaagataagtattgtctccatactgttcatgctgcacagcagttgcccttatctgcagggcgacgcatcccaagacccccagtggatgcttgaaactgcagagagtaacacacgtgattgccaccatcggaacacatttctgtgcacgtcttccacccacagatttaatgccttttccgtcttaactaagcactcatcatggactgtggccataacttttgcagttttagatgcaacagcaaaactaacattaatttttccttcttcttcacaatttcatgggtagatttgttcttaccgtagatcttagcaacctcagcatatgatgttttttcttttgagaactttcaccttttcccttaaagaaagcactttacagcttctctttgacatatctcaactgccatcatcactgctcttgaactttggggccattattaagtcagaaaagggttacttgaaaacaagcactgagataccaccagagtccatctgataactaagatggtaactacatgactaacaggctggtgacgtatacagcatggatatgctggacaaaagggtgagtcatgtcccaggtaggatgaagcagggtgacttgagatttcactattcagtgtggtgcacaatttaaaacttaggaattgtttatttcctggaacttttttcatttaatatttttggactgcagttgaccacaggtaactgaaactgtggaaagtgaggatcagaggataagcagggactgtggtattcatttcattgcacagtgcctagaatacagtaggtgtactataaatattttgtaaagggacaactttgctgaaactgaaaatatttatgttttacccaataatttttcttctggaaatttatgctacggaaatattcagagatgcttacaaagttttatgcatgagtgtccgtgttatttgtaattgtgaaaaatgaaaataactcaaaagtttaacagtggtcatctaaagtactgtatacactgtatatataggtcgaatagaaggtcatcctattcatttattaatgagaggtacaatctccagggatctgtaaaatctattttgtcttaaccaaagaacaaatttttgacatatcttgaataggatgactataaattatgactataaattatgactataaattatgactataacttttaaattgttataatttttgtactattatctgatatttttatttttatgtatgttcctaagtagtttagagatagtcacattttaaaaatctaagatcaaacaaatgaagcttatttttatgtattcatagtataaaagaccttcagtaaatagataatatttttgttttattctagaaaacagctccttgaacacagtgagctggcttttcacacattgcagttgttagcgtttactgcccttgccattttaattatgaggctaaagatgtttttgacgctgcacatgtgtgttatggcttccttgatatgctctcgacagatgctgtcttcgcaggtgccatgcctacaatggcaagcgtcaagctgtctacacttcatcccattgtgaatcatccactttacgaagatgcagacttgaggttggcagctgatgagtatttcttcaagactcacttggcgactcccaattcttaggaattgggaaaatttttacacacacacagacacacacacacacacacaaactcatcctcattttcgtactggaagttaaaaaaaaatgacaataaccatccagaaatgacaatatgtacctgttgcctctggagcaagcagacctctgaaaactgaaaaatgcaaaagccagttttttccaaagtgacaaatgtgtcacatatttatgatgtgtgcgtgtattccagtaaaactactaggtagttggaagagtaggtaggatggattttactcacagccatggtttgccaacccctgctctacaccacaagccccactctgatttaagaaatgatttctagatcttactggtggccaatgactagctttttgtgacaggtagaaaaagtacatgaaagttgctattatatagtacgtgctttcatgaaaatttagagtatttttgctagtcgattatgagaactctagtttccattgatgtctaaaagttttgctttccttaaatggctggtttaaaaaattattttggttattctagtagttgtcagggtaatcatttttaaaagtggatttttggcctattgttagaggcaaatgtttaaattatttaaaagttttaggtcttctgtctaggagccagggcttggagtcagacaccttagaagtgtacctgatgctctctctgttctactgtggtgaactggcatggaaaccactgtggtgactgagcatcccatatgcttgaaattctaagcaacatccaatgcataagtgatagtttgtcaggattttgtaagaattcccactacggtcaaatcacctattgtaccatattttggtgaccatccccatttctcaagattctgtgaaggtgcttttcctacctcttctgataccgtggatgtccattgtctaagtgttctacttgatacactaaatttcaattcatttatttgtcagagcttctttagatgaaattaagcattgaaagatgtgttttcactacattcagtctctgtcagaatatattctctgaaaactgtgtgaattatgagaagaaaactgtatatcctaagctgctctctgctacccagtacaactttagactatcttatacagtaatgagcagtatatgcaaaattaaattgctgtaagttttattacattcaaaatataagtaggaatgtggaaactgccatccccaaaatagttgatgctgttttgagtcatgtatatcagtgttccatccagtgagtattgagatttcaatttgctagtaagatttttttagtctattctattatcatttattttaaaatcttttaaactattgtttaaatttaaagggctcggacaaaaatagtttattctacatatagtcgaaaatctgccaaagaagtaggagagaaattgttggagttacatgtgaattattatgttttagaagaggcatggtgtgttgtgagaactaagtgagtattaaccctatgctatctgatatggtacatttttgagcaacaaatgtttcactttattacagtagtcctgattctttaagaatttttattttaaatttattaaaataatatcctggtaccttagtttaagttatttcatctagggacgtaaaactatactatcaatgaagtagaatttaattccaaacattatagtatatttaatatcctgatttttcaatttaacatcttccacttagcttttttcataatttttgaaatatttatgaaaatttttattagatatctgaaatatggatttgaatttacagcaaagtgagatattggcattctgtattatagctgaattatattggatttataagacttaaaagaaaagtgacaaaacccaaaatgacataaggaaaacattcctaattaaaattttttaatttctgaattttgaatctctaaaaatcataaaattctaagatgtgtaattgatcttatgaggactttgtttagactcctaagcacagatattagctgctgcacatgacaggaaattcaggcacattaattgtctcctagaacgacacattggcaatcagaagaacaaaacaggttctacagtcacttcagtatatcatttacaatgtgcaaaaggtttcagagatgcaaactgaaatgagaaagtatgaacaatactctgaaaaaaataagttaatagaaaccgattcaagtaggtccagatgttggatttagcagccaaagactgcaaagccactattacaaatacattcaaaggcttaagaaaaatgtattcaatgaattaaaagaaaacatggtatccattagtgaagagctatggaatctcagcagagaaatagaaacactccagcccccacggaaattctagagctgaaaagtataataaatgaaatgaaaatcatttaaatgtactcaacaattctgagatgaaaacagaacatttgaacagaaaatgcagtgaatttgaagatagatcaagagagaatagttaatcaaaagaacaggagccaaaaagattgaaaaataaccaaagtcacagacctatgtaacattaagtagttcaacacatgcataattttagtattagatgtaatgaaaaaaagaacatgacagaaaaaatattgaagaaatgttggccaaaaatttctcatttgataaaagctactaactgagagatctgctaagctcaacaaatccaactgggtgaagcccaaagaaaaccaaagcaaggaacattatagtcaaaacggtaaaatcaaagattaagagaaaatcttgaaaataagagaaaaaaattatatgctatataaacatctgacttcccaacataaatagtggaaattatcagacactggaatgataattcaaagtgctgaagaagaaaaatcaacaattctatatttaatgaaagtatctttttaaaatggaggccaaaaatatttttcagatcaacaaaatctaagataatttgttggtaacagatttatacttcaagatggacaagaagttctatcagctgatgagaaatgatgccagatggtaactcaggtatacaagaaatactgtgatgcgctggaaatggcctggttgcagtatgcttgaaatctgtgatgtggaagacccttccaatgcagctaaccctcccttatgtagcgtcctgctcaaagatgccaggccttacttcaccacagtatttcagaatagtgtgtacagagtattgagggttaactgagaaggaaactacccattacactatggcacaatgtggtgtgtcaaaaacaatcaccctttggcttatttacattaataaaaatcacaagctttaataacagacacttaaaaataagataaaaatggattgaaagtttctctgattactaaaaggtaaattacttttctgttcattgaatgtcagccttattaagcttgtcatataagttattaaatcattcatgtcatactgcataaacaaatgttcatttcagaattttaaagaaaaatgtatataaaagaacaatgaattttaataaatcaagggtacgtaagtcctttttcatccaactaggtgaattgcttcagattttccctagtaccagagtgtacctgctcaaactctttgaaccacttaagggagaagaacgcaagctctgaaatgacatccttaaaatgctgatactgatcacaacctctttacctctgtgagcaaattgtaacagtgtgtcttttaaggtgtttttatttcaccagcccttaagaaagatctctaataccttttaatactttttttttataatttcaagttgaagtgtttttaaaaacaccttgttttgtaacgttttgaatctcttgagatgtatttaccccactagatacatatttgccactggttagttctccatctaagctcaagaggttattcatctctctttagattccaatggtttttcttttaacatccaggtaaaatagaaactgctatggtatacaaccaaattttggggttaaacataatcagaaaagaaaatccagttaaatttatgaagtgagattttcagatcctagatcttgaataaagcaaacggcttttcatcttgatggccccaaagcttgttggtcatggtctttatttctggccactatcatcttcttaaataatatatttttaagccctcatttatttttggttttggatgaggaaagtcatgttttctaagtcctctcccctaataaaacctacccaacaatagtgctttgaaaagtggtagttatcttgaagatagatactcttgccaaatgcaaagataaacattctttttgtctgctttataaatatgaaatatgccagatctatagtattttaatgtgcatctactttaaatgagtcatcttggggtttttataattcccttacattcttgcccctctacacttgaaataacaaaatgccttaattttatagattagttctcttatagcagacaggcagctatatgcagcaaaaccaataaagttatttttcaactttaatagttgtaaaatgttataacagaatacataacagctaagaaaacatgccacattttattttagcattttcaaataatttgtttttggtgtaagcacaggataaaaaaggagagcgtcaaagaaaagagacttaaaaaaataacattcataaaaattaacaaagtatattttggatgatgtttttacaggaaatagtttaagttggtagaatttttaaaatggtactgtattagctaataaaatattcagtacatatatatgtttggatttatgcattaaaaaactaataaaattatttccaacttt

SEQ ID NO: 3042 - DNA, 8329 bp, Homo sapiens
tttatgatcattattatgagggattataaaagaatttatattgactgcctttacaaatctgatatggtttaactctgtgtccccaccctaatctcatcttgtgggagggaccttagggggaggtaattgaatcatgggggccagtctttcccgtgctattcttgggatagtgaataagtctcatgagagctgatgggtttatcaggggtttctgcttttgtttcttcctcattttctcttgctgccaccatgtaagaagtgcctttcacctcctgccgtgattctgaggcctcccctgccatgtgcaactgtaagtccaattaaacttctttttcttcccagtcgtaggtatgtctttatcagcagtgtgaaaacggactaatacaaaatcttattaactgttagaaaaataaagacgtatatgtgtgtatgcacaacatattcacacacacagatatcacaaggccagaagtaataaggtacagtgtgctacagtaatgaagaggatgaatgggtcatttataacaccagcagataatttattaaaatattatcatgtaatatttttcctaccctgttcactgaagatagcctttaataagttttttccttgttgaagacttgtgtatagggctggcaatatcaatgagaaaagagtgactaatttattcaaagccaaagtcagcagtttgatatgaaagtagaggaggatctggggagcaggacttatttagtgtgagtccctccaagggataatgggccctagaaggatttatttctaaataagtcctagaagggccctgtgtgtatgatttatttaaggagataggaacatagggaatgaacattctgaccttggtaaatgttcctggattctacataggcacagaagtagaaccatctgatctataggatccatgtagactggacaatgggcatcagagtgtaagctactgtgagtcagtaatatgcatggagggatctccttggccctgtatctttgaaccaacctgggaaaaagagctgcacttatatttgaaaagactgagggctcagggtttgatttgatttaaaggaattgaaatagtttgttattttttgttcatataagtttgtggactgtattttatatctactgcatgtagagatttactaggatttactaccatccccaccaaaaccagatctgcttcaaggtttggttgttgttgatcagaatggggcaaaacaatttcgagacaattgctgaaaatttgattggtattcaggaaagagcatggtctttcaggagtcactgacatagggcacattagtgtgttgtgatgagaatgactttgaaaacccttggaaagttataaactgttcacaaaaggaaggaaaagaggaatatatataccttctaatactttactgattctgtttgtgtctcttctattcacaaaataaaaatttggaagagattcatcaaagatgatcttttaagtccctatgttgattttggttttttaaggagaggaaaggtacttggaagccacagttgcagtaacctgtgtcaggagaacacttatcaccacccctagatatgacacctgaaacacagactaatgcaaggggacaggtggtagagaaggttgtttgaaagaagcgattgtgaccttccagatgcagaatttcgggacataaagatgtcatatagaagaagaaagcttaggatcctggagcatgccttagaggttctgcagcagtggcaggtggtactgaatccagaataggcaacagttagggatgactgagtccatgattcagacatggagatcatcatacttgcaagggaaatatttaagggattgtgtttgaatatttatgtaatactcatcatcataaaaaacacaggcaagtgtaacacccacagtcttataaagcagttacacaatcaagactgcaaaaacaattaggtaacaattaacattatgctatgaagaaaatttcacatatcaacactaaccttaaacataaacaaactaaatggtccacataaaatatataggctgctggaaaatattaaaaaatcaaaatccaaccattggctgcatacaggaaacccacctaactgataaatacacttacagattcaaagtaaaggagtggaaaaagttattccacacaaatggaaaggaaaagtaagcaggggtagctatacttttatcagataaaacagaatctaaatccactacaggtttttttttaaaaggccattatgtcatgataaagaatcagttaaacaagaagatataacgactctaaattatatgcatccaacactggagcacccagattcataaaacaaatactactagacctaagaaaaaaatagaaggcaatgcaataatagtacgatcttcagtatcaaactgacagcactagagaaatcaccaaggcagaaaatcagcaaagaaactctggatttaaattgtaccctggacctaaaagacctaacacacatttaaagaacattctatcctattactacaggacatatattcttctcatctgtgtgtgggacatagtcaaaaattgatggtatgctaggcctcaaggcaagtctaaataaatttttaaaaatcaaaatcacatcaagtaacctctcaaaccacagtggaataaaactagaaatcaatactaagtgggactctcaaaataatacatggaagttaaattatctgcttcacaacaaccaaacctttgggatacagcaaaagcagtacttagggggtatttatagcattaaatccctacatcaaaaaggtagaaagatctcaaattaacaacctaatgtcacacctcaagggattaggaaaacaagaacaagccacacctaaagttagaagaaaagcagtaacaaacatcagagcactactaaatgaagttgacaaaaaaaaaatcataaataaaaaaatgcatcagtgaaatgaaaaattttttttgaaaagataaacaaaattgatagattgctagctagattagccaagaaataagattcaaataagcactatctgaaatgacaaatttgtcattacaactgatgcaacagaaatacagaagatcgtcagagacttacaaacgactatgcactgacaaattagaaaacctagaggaaatagctctagtttctagaagaaacatataacctccaaatattgaaccagaaagaaatagaaattctgaacagaccaataataaatagagaacttgaatcagtagtaaaaaaaaatctcccagcaacagcaacaacaaaaaagcccaggaccaggcagattcacagctaaattctaccagatgtacaaggaagaactattaggtgcaaaagtaattgtggattttgccattgaaagtaatggcaaaaaccgcaatcacttttgcactaatgataccagtcctcctgaaactggctgaaaaactcaaggaggagggaatcctccttaactcattctgtgaagccggcattacacttattccaaagccaggaaaagaaacaagaacaacaacaaaagagaaaaatacagaccaacatctttgatgaacatacatacaaaaatccgcaagaaaatactaacaaactgaatgcaacaacacatgaaaaagataatacaccattatcaagtgagttttattccatgatgcaaggttgattcaacatatgccagtcaatatatgtgattcactacataaacagaattacaaacaataatgatatgatcatatcaatagatgcagaaaaagcatttgatgaaattctgcattcttttatgattgaaaactcttaccaaactaggcatagaaggaacatacctcaaaataatgaaaacaatatatgagaaacttacagccaacatcatgctgaatgaggaaatgttgaaagcattcctcctgataactggaacaagacaagaatgcctactttcactattgctattcaacaagacactggaagtcctagctagagcaatcagggagtagaaagaagtgaaagggatcaaaattaaaaaccaggaagtaaaatcatccctgtttgctgatgataccaagacaatgctaaaaatcttccaaaaccctcctagatttgattaatgacttctgtaaagttttaagatacaaaatcaatatacaaaaatctatatgcatttctatacagcaataatgattaagttgagaaccaagtcaagaactcaatccaatttacaatagctaccaaaaaaaaaatacatagaaaaaaatttaaccaaggaggtaaaaaatctccaaaaggagaactacaaaacactgatgaaagaaatcagagatgacacaaataaataataaaacatcccatgctcatggatcagaataatcaatattgttaaaatgacaatactgtctaatgcagtctacagattcaatgaaattcctatcaaattaccaatgtcatttttcacatagttattaaacaatattcctaatattcatatggaaccaaaaaagagcttgaacagccaaagcatttctaagcaaaaagaataaagctggaggtaaaaaattacttcactttgaattatactacaagattatagtaacccaaacagcatgtacttgtttataaaaatagatgcatagatcagtggaacagaatagaaaacccagaaataaagccacatatctacaaccaactgttctttgacaaagtcgacaaaataggcactgggcaaaggacaccctatacaataaatagtgctgggaaaattggagagccatgtgcacaagaattaatctggactccgatctctcaccaatgtaaaacctgaaattatgaaaatattacaagaaaacctagagaaaagtcttttgttcatcggtctaggcaaggaatttatgactaagtcctcaaaaggaaatgcaacaaacacaaaaacagacaaatggaacaaattagctaaaaagtttctgcacagcaaaagaagtaaccaacagtaaacagacaacataaagaatggaagaaaatatttgcaaacaatgcatctaaccaattgctaatattcagaatctacaaggaactgaaacaagaaaaaaacattaaaattgtacaaaagacatatttcaaaagaagacgtgcaagcagccaccaagtatataaaaaattctcaacatcactaatcaccagagaaatacaaactaaaaccacactgaaataccatcttacaccacttccagtggccattattaaaaatacaaagccaacagatgttggcaaggatgcagagaaaggggaacatttatacactgttggttggaatctaaattagtataacctctatagataacagtatggagatttctcaaggaactaaaaatagaactaccctttgatccagtaatcccactactgaatatctatccaaaggaaaaaaaataatttgatcgaaaagacatctgtactcatatgtttactgtagtaatattcacaatagcaaaatcatgtaatcaacctaagtggtcatcaatagatgactggataaaaaatatggcatatgtgtgatctatctatctatctatctatctatgtatctatccattatggaatactacttagccataaaaaatgcaatcatgtcttttgcagcaacacagatggaacagtaggccattatccttagtgaaataactcagaaacagaaaatcaaataccctgtgtggtcatttataactgggagctgaacaaagggtacaaacagacacatagagtggaataatagatattggtgactccaaaagatgggtctctatcttttggtggggaggggtatgaggtattgggtacaatgtacactctttgagtgaatgggtactctaaaatcccagacttcaccactacatgacatagccacataacacaactgtagttgtacccttaaatccataaaaataaaaataatcaattaagaaacccaaatggggtttgagactgtttgagagtataccaggtaactggcctaaatacccatcagattaaaattagagacttggtcagaaagagttccagttctagaatccttagactcagatgtgtggatctagtcctgaaacattcctattgcccattctacttttacctaacacagtctggattatacataattttctacaagtctaatctccagagacttggtaagatgctctgttacaaattgccactgcacactgtatgtttgtgttgtacttatcacaattgtaattaaattttttagcaatttattttcttaatctaagtcccaccagctcaggcactgttatcactaaattctcagtacttagggtagggcttgactcagagtaggtgttcaataactatgccttgaatgaatgagactgaaacatgggtttgccataggaagttctgggaggtaaaacttaagagagaggctaaaataaaattctggagtgttctaagtatcaatcagtgtagtttggtctttttctaagtcatggacaactggtgggagtttgtaaatcagaaaaatgggtagttacttcaagcaggcaaataaagggaagggaagggaagaaagactttctatagagagtatctgtgaaagagctatgtttatcttaaattagctcagtctaaaattttggcacagtagaaatgacttagcagatgatttcggctcagctttattgtctgccttatctgaagatggttttcaatatccaaacagtactcaccatgcatgaatgactgggatctaattatggcaaattctccatccagtagcttttgcagcagggcttattcagttctataggccagactaaagcagggtaaaggtctgtttttgctatttcaaacaaaagttcaactccaagtctcatttttaaaaactttcatgttatgaatggccttactgctcagggcttaaagaaatagagagcaagggcaagtgagttagatccacagccaaacacatctccgccactctggaaactgcttccgggccttaagaagttgcatagaataaagaagaatggggataaagcagatatgaaataaaatactaattactaccgaagcagcaggtgctttaaacaccttttataggtttctcatttgatcctcacagtaattatgacataggagctattattatctccatttgacatatgagaaaatgacagcttagagaaataattaagggagccaggtctgggcctttttagctcataactgcatgggtggaagagaaagatgaaaggatggggtatgtggcccttgatctcagatcatctttaaggaaggttagaaatatggacaattaagagagtagctttttttgaggtcacaaatattacaaattaaacactgaaaaggaaaactcagcaagagttacaaatcaaatgtcaagtcatactgagcctgagagatgttttgggccatggaagaaaagagtgtttggatgggtgggggaaaggacagctacatggtgctctgcttgccattacatcaggatcagaaataggaatacgtgagaaagtaaatgtgtccagctggaatggaagaaacaggtgtggtggtggctgcagctaaattgagagaataatggatgtgaggctaaggaatttgggttgtatagagtaaataatgggagttactaatgtaatttaagcaagaaaacctttgatgaaaaaaagaatgaagttcaagtgatcatgtgaaaaataaaacagttgcattttctggttaaatactaatttgtagagaattacatgggtgttgcttgttaaaattgccacaaatagcagtattgccatttgtattgttttttgtacaaaatgccatggttcaaattatggtttaaataacatcctagagaaacatgtttaatttattagccataaacagagtccaaattttagagaagctgaaaggaaataactagaacacatgctgactctaggtgtacgtatcagcaaatctggtaagggatggcttaggaagaggcaatgaccgagtcacctcagagtttctttaaggagtacaggtgcctctacctgttgtgtagatgaccattaaagtctctcttaactttcagaagactatttcaaaggattttagtttacaagggttcaatcacttcatgagaatttttaagcctctgttattgtagagatatgtaggcatttgaaggagatagaaggaacagaagtaattcctacctgctagaaactccaagtaagaaagtgtttataaaaactataaagatctttcaaaatcaacttgaaaataaactagaaatgggtt

SEQ ID NO: 3043 - DNA, 3090 bp, Homo sapiens
gtgctacaaacaaaaagtactcttcaagtgctgtcaacctaaaggttaacaggttgaagggaccctgggctaaggaagcacaagctggagacaccaaaatggtcttcgcaactcgcctctatattttctgccctgctcctaagccagcctgttggccgactggcccttctccacagatgtcatcttgagcctcttacagagtttcagcactgacattaatgacaagatggatcacctacaggacaaccttggatcctcaaccagcctgattaagcattgacactgcatttgtcaccaccagctctgatggtttggacatgtagaaatgtattgcaggagaatatgcaaacagctgctgtaaggtgagctgatcgggacaactgccagcaggcagaagggaaggcataattaatgggcacccttcagcagagctcagagcagaccaaacgccaatgcagaaggctcaagaaagaggcaaacagactagccactgctccaggatgactgtggctctttatgagtgaagagaaagggtggagactgaagacagaactggggacagtgacaggcttggggaagaacagctgattcagcagtcccaaggcttgtgatcttacagtgacattttattctaagcatctgaacacaaggtggacattctccagggtgacatcgcaaaatacatgggtgaagacaacctagtggccgtgacttggagcacccttcctcacaatgaaggcattctgggccagcctgaaaaacagcatggaaataaatcacctaagtacaagggactggcttaaaaatggtctaatgaaatgtcaaaagagttctcctgtggagcttcggagaagtttccttaccctttaaaaaaagaaaagaagaaaaggaaaaggtgatgatgatgacacacagaaggcatacacatttccatttctccctttggaaactttcatgtctgggttgagaagttaacagaaaggcaaacagcctgaggtcaaagatgacacactgaggataacaaaatggaaagacaatctgagctcttgatgatgtgtgactgaatgagccaaattaaacaactatagagctgttctacttccaatctaattatgtgagggataaatgttaatgcgctttttctttaggttttcatttagattttgtagtttctacggtacaaatcttatattcttttattgaatttcttaaacaaaatgttcttttcagactatataagtggaattgttttcttaatttcattttcagattgtttgtttccagtgtacagaaattccactggctttgtatagtgatgttttctacaacagtaatgaactcattaagtaactctaatagcatttttgaggactccttaagacttttcacacacaagatcatgtcatctgaaaatacaaatagttcttctttactccaagtaaaaagacatttttaatttctttttctagcctaattgttctggctaaaaattctagtacaatcttgaaagaagtggcaggagcaggcatcctagtcttgttcctgttattagggagaaaacttttaatctttcaccacgatgtattagtgaactgtgtgggcttttcacagatgccctttatcaggttaagaaaattatcttttcttccacgttttttgagtgtttttatcaagaaagtgtgtcagattctgtcaaatgctgtgctacatcttgaacctggaaagagaaggttgcagtgagccgacattgaaccactgcactctagcctgggtgacggagactccgtctcaaagaaaaaaaaacaaaaaaaaacagactaaggaactcaatggtaattaggtacttatgacctaattactcaggtaattatgacaacattttcgtgcctatgaattataatatcaatgtctcttctgtttctctcaaggaaaaattttaggccactaataattctaacttagagatattagcaacaacttggttcctcatgattataacttaagtcctcagtaaaagaatagtctcaaataactgaatacctacatgaaaaacctctctgctaactacacagcccacctccattaaatctacagactaaaattaccctatttgtgcatatatctcctaacaacactttgcctcccaacttgactgtgtgaccaatacacaaaaatatacatgctatttcaactgggaggaatgttgtggaaatgaaagcttttagaattaaaaaacaaaaacaatcctctctttaaaagaccaatacaccagaaataccaatgtttaatttggcacctcagttgtagacaacagccccttttctaactttatgttgcttctcagcattctgtgctttttcccctatactccataacctctgctggaagtataaaaaattccaggattccgtattactgtaggttcagctccttagagctcagtcccagtcattcactggcccatccaggaaactacttcctctcatttccaaggcttcctttaaatattccccaagtttgccttatctaaaacctggctttcttctgtcttcagggagcttacaatccagtatgggaatcatcgggaaaagtaacaaatgatgttccttggatttgtttttgtaattgcatgcactcgctatggaaagctaagaagggcatcaaactccaactgggggtaaagactcaaaaaaagatatctatagtaggtttatatgcaagtatgacaaacatgtttgaaaagaatgaaggttaagacagacacactagttgataggctaggcctgaaataataatgaactgaactaagaaaaaagggagattgacttcagataccctttaagctatgtcaaaagttttttgttttttttttttaattgaaattctaatacttacataggaataggaacttgacatggaggacacggtaatgcagtctgaataaatgctggctcagaaggctgttcccaagggcctgtaggctggtgctacaaataaaatacataagaattttaagtcagagggattaaatcatatggccattttaagaatctaagaaaatagttccatgtatcctctgctcaagcaggt

SEQ ID NO: 3044 - DNA, 2572 bp, Homo sapiens
tatcaatcaggaaaactgggtgaacaagggttttatcatccccagccaaggcatagctgagtattttcagaaaacagaatagagatattagagaacaggaagaaaaagaaaaaaagaaagtaaaacagctcttcagaaactgtattactgactttcacagtttgatgtcaaaacctatagccaaaggaggcagactagaataataaaagtgccatttatttatacagtacctttttctgagaagttcttgatacattatggtcatctggttattccctgagcttcagtccaaatagctcctaaaaagtaccaagtcacaactattctggaaagtaagccacatcaagctatgctaactaagaggtggctggaaacttggttattcaatgtctttgcattcattccccatgttggtcaaatctccccctacacacacgtgcacacacacatacacactacgcacaggcacacacactcatataactcacacaaaaacacactcatctttatttaaattcagtagttcaacttaaaggaaaattactcatgtggcttacgtgtacaaagtggagaaaaatgctgtgaagttcatcttcagccagaggaaggaaaactttctaagccaaacctctgattgtcttccttccgcaaaacatcaagagtctttggcatttgggtggtgcttgaaaagttgagggttcgtatctaagacattgtttaagtgacaataaattatcttcttttcaaccgtgtaggacaaagaaatagggagggggctgggagaaggagtaggtggatcattttacagacaaataaccagaagcacataggattgaactgatttactcacatgtgttcagaaggttctagaaatagggagctgcaacacttcagctctcaatccatgactacaacacaaggttttctctcttgtaagagaaacagtgttttcttcagatatcagataccatggtagttcagactactaaaaataaactgaaaaagatcacgttgcccaggaaatttattatttaatggactttctgtttctgttttcagaaaatagtattaaatgtttttaaacatttaacttgacaaataatgcatgacattgtcgtggacagtattatgtttgctataggaaaaatgcacccacaaaacaataattcctgtattttccagaacatcctcccaaaaaaaattagagaaaatccaataactcttattcattgatttactgattcactcactgcttcaaaaatatgcagtaggcattaaatttgatgccataaataaaggaaagaacaagactcactattgaaagttgattgtatcagaaaaatctgaaaggatgatcactcctcctagatactctgccaatggctttttgcactctcataaaattggaatgacttcctatggtgttcaaggccctatatgatctatccctgagctatgccaccctcctttacttctaaatctctaccatgtatttggcactaaccacacttgctcccactatttcctctaaagcaaataggtcaagtttcttctgacctcaggaaattactattttccatgacctctgcccagactaatcttgtcccataatggactctcccttactttattaaggtctctggtcaaatgtgatctgctcaatgacgccttcactaagcaccttacctaaacatcctctcagtcattctatttccccaaagcttgcttttcttttttatatgctttattagtatctaacattagaaatatatctttgtttattttcagtctttcccagctgaaggctaagactttatttctctctccctaaatgaatgaattgcctccagcaggtatcaagaatgcctgatatccagcaggtatgaagaagggataaaggtccgaggcatccctgggaaactgaaacagcattgctttagtccttgggtccagagtttctataggctcccctttgagaaagacaagtgaaaattggttgttgcaaattagataatatgaggaatatatgaatagaaaagagtcacagttctgtaatagacttttacacttgcatagaaaaatcaagaagttccacaactaacctcaaaatgctttaatcgaattgaaaaatgatgctatttgtcatcatttatttattttcatgctttgtgccaaaacaatacctctcaaagaaaaaaatgagtttgggaatttgttaaggttattatcttttgaacagaaaactactcagaggagacaaattctcccaaaatccttttctatgatgtgatgcatcatagaaagttatgttttttgggggaaaatagtactgaaaataggagaatctagggcttaggtaatgatctaagagaatgccctagggtttatttcattttttttcctagccagtcattctaagatggaagttctcaaaagtgtgattttgagatccttcagcaactaaagagctttattttggcaaatgtagttatttttgtaaaaaatatgtatttatgtatttatatatttacataaacatgtacatatgtatttatgttaatgcataatgggt

SEQ ID NO: 3045 - DNA, 4346 bp, Homo sapiens
agagaattgtcagaatagtaactattgtgataatggtatgcagcactcattcagcacttactgttacctggcactgtgtcagggactagacattattttatttatccttctagtatttcccccattttcagaagggaaccagaggcttaagattacacagctagtaggcaatagagctggaattgagcccctatctgactctagctagtgcccttaattactattgtaaatggctaggaatcgtatttgtgaggatttggtaggtttggaaaaggactttcttaatcctgatattcagaattgtcctaaaacttacataaaagcctaacctagcttttactgtattgttaggcttcagggatactatgtgacctgaaatatatacacatttttaacaagtggtccatgttttaacaggtttggccagcccttcttacaagcttcctttgtgccaaattttcattgttttttgaaatcaccaaaccatgttactaatgttgtgttttggtttgttttacagtgatccttttctgtatggctgccctaatatttccaataggattttacatcaatgaagtcggaggtcaaccttataaattacccaacaacacagtagttgggtcatcatatgtactttttgtcttatcaattttctttacaatagtaggacttctatttgctggcaaagtttgtttaccaggctgatgaatgtctaaattgcttgactcttattattttttattttattttatttttttatttttggagggtggagaggacaaaggcgaggcatctgagcaggcctctcatgggaagatgctcagatgaaactgatgctgagaaggaaaaaaaaatgctttggtttgttctcactatgcactttggatttaaaaaaaaaaaaaaaaaggagagccttttccataaccaaatacagacaatattgactaaatctcctgagcatattcaggcagtcaggtctgcactgtgatagcaacctagagaaggagaatgctttataccgaaaagcatgtggccctttgtgactctgttattccgtttttaatgtctaatgattcattagaggaaaaaaaaaagtctaagtatttatgtgtcatggtggaccagagggatgcaagagaagttcatgtggggctggcctcacctcctaagaaattagtgttcacaacttccttgtaatagtatgagcctttggcaccagaatggattgccgttgcattactgcaccaagaagccaatagatcaaaacttgtttgctaaaatgtatgtaaaaattctgaaattccctctctctgtgtacaaaaaaaaaaaaaaatcaaacactaagacacatgttttgggtgggtgggtgggggaaatcttccttatatttatataaatatatataatatatatattttgctgatgcagtatacagtgtgtatatatgtgtgtgtgtgtgtgtgtgtatgtgtgtgtaaatttatatacacacacatgcaaacagttcctggaagagaattctgaatgctttgctagcaaaacactgtggtgtgcaaacctagaacccaatagaaaaaaaagccatttatctgaaggctgcatagtggagagagtcttcagtttacctcattctttgtagcagcccttgattttaacaggtttttgtaataggtacagataatcccatacctttctaggtgcgattttaagttaagctaaaaattatttgtagggttaatttatttgtatatgatagtagaaggtaagatcatgtcaaaccttataatttggggaatctgacactatttaaattattggcaactgttgtctgttgtacagagattctttttctactggctcagtctgttacattaataatgcattttatatgttcaggcacactttacataaatacaaagttcgctagtaaatatctggctattttggctatttacaacactaatttcattatttttatctgtaagcattattaatacatctttaccaaaacctgagcaatacaatattttctttatatgttatatgcctttgtttgctaaaagctaatatttttgcatttactttaaagggctgtactaaacccacagctttaagttcttccctaaaagaagcattgcagctaacccttgaactcacagttttaaaatacagtatttctcttctccacatctccatgccttcgcatcaatgcttgtttttcctggtgaacactatagataatctcctgtttgaaatgtgggacagggtgtttcatggcagtggagctaagtttctcctctttatagtgaactggtgacccaaatgtccctgtcatttatagtgaactgatgacccaaatgactccctgtcagtagagtcccatgtggcccatgcttcacacaagcagaaatgaacgcactgtttttaaggctagattatcagttctagaatgattacttcaaagatgggagctacctcctcagatattcacactatgaaatggaggtgcttgatgtgtttcacactggcttgtttgacagtcttctatcttactgttaattcagcagtattttattgtgaaagaaaaccccagtgtttgagctcactcaggaattggggagagagatggaccaccactgtggtgcatttcttaagtgttctgggagaatgtcatacttttccttcccagagtaaaagaaacctttgggagatcctgagggagactgtttctccccaagtatgatgatgtctagtcaagtctaagaataccactggacatgttctatggacatttgggattgcagttgctattctgatttgattggtcctcagtcaaatggatcactttgaaggaaagctttggttgtcaccgttatataccactgagataaagtgttagcaaagtatggttcaaattaacttatgacatgaccaagagcttttctcttccaaaagatgaattgtattgtaaatagtttctcaaaatatttttaactggatcatgagcatggggagagaaagtttctcagctgctaagaatttccccactgtttacttctttcacttatggtggtattgcatttaagattacaaaatttaaggttttatttgtatctattacccaaaccattaaattgtctttaatttcattgttgtcttggaggtccagtgcatacagggctgatgggggaaaactccctctagccagtcagcactctaacccaggattaaaccatcccatcaagtagtatgtgaagtcaagtcttcgtactcttgcagaccagacattgaaatggattcattcatatagatttctataaatcctataagtgaaaagatagacaactgtccgcagttgcttttaaaaaaggtcactataataagtactatatagtacagtattaatttatagcaggaaatcgtatcttgtaaactgtatataaaacactgttttatggtgcaatcatttgtcaaacttttgtctgtttcattgtttttagagtgtgtgcattcttctcatacctaagaatatcactgtaaaatctgctgaaaactatttttaggttttatttgcacaagactgaattagtttgacatttttggaagctcctattgaacatacccaaacatctgtaaacatgaaaaatcttcaatttattaaaagcaaacatttcagtatgattctttccaaagtttgctgctgattcttccttgtgtggccttttgaggagcctcctggggaattggaggattaagacatgccactatgagaagattataggaaaaacaccaagactagaggactctgggttccttttatgcaaagtcaactcttctgggtcacagttacccagcaacaaaaataaagaatttccccatggactccagatcctttactactgaactcacagggctgtaacactgttactgtacagagaggaccaggacgatgccagcaccccgtttatcctgagtgaactctccggaggcctcttcaagcttgtgggttctctgctgtcttgaagccatccatccatttgataggttttgcaaagacttggtcctgccaagatggttttaatcatttctgctaaaaggaatggactcgaggatttgatctcattttagatgcagttgtcctcacttggccattttacagcactttagtaaatatggccagtgtatttggtcactattaaatcaatccccattcattatctgtcagggcaactcagtgaactaaatactatgttctgacctctggcactctttctcatgttgtttaaatatttaatattgtctaaggcaattcaagtattttcttaaataaaaaatatgaaaactca

SEQ ID NO: 3046 - DNA, 1376 bp, Homo sapiens
gagaggaggatctggctggagcagctggggcagagagagctcctaccatccaggagctccagccccaggaatgatagagtgaagggtgagaggcagcgaaaggaccccagccatcttagctgaactgcgccgaggcttcctgcagaaccgggctcctcttgctaaccttgggctccttcccatgtgttcaaggctctccctggagtcacatcatccagttatgtggcacttgcagggctgagctcagatctggagtctgcagagttcaggaggccctcacatggggtagagtctagacatggcctgggggacagctcacacacgaggcacatttgacctggagaagagaccacctagaggggaggaggctggtccagtgctgggaggacagtcctatggagcatcaggaaattcagcagatgagttttacatctgttttttccaactgcagttcagtcccggagcagacacaaccctgtttgcagagagccaacattctaattgacagtgcgtggtgggaaacagtgaaccgagggaaagagtgccagtgttagagagccacagtgcagtgaagaagagaaggcaagaggatgtgatgcaaaatcacaggacctggcttccagaccattctgcttccatgagaacatttcagttgagaaccggatggcatgaaactttattgaagtatcagagaatcattttcttaagagatggtaatggaatccatgcatttgaaataaatcaacagaaaaaaatgattcagaagagagggaactagcctaaggacaactgtgatattgtgaaatatatatatgggtcttcatcctgtgtcctggcatacctaaaacccttggaatatccaaaggcatgcttttcatgtgcaaatgattgactgatgtcttcaggatggagccaatcaccagaaatgtcaaagcataattagagtgttgggactttcagccataccccacacccctgacctttggggaggagagacgggcagaaggttaagtccatcaacaatggccagtgatgtaatcagtcatgcctatgtaatgaagcttccataaaaatcccaaaggactgggtctggagagcttctggatatctgagcacatggaggttcctggagggtggtgcctggggcagtcatggaagcatctcatcccttcccacatgccttgccctatgcatctcttcatctgtatcctttaaaatatctttgtaataaactgctaagcataagtgtgtccctgagttctgtgagccatcctagcaaattaactaaactgaggagggaatcatgggaaatccaatttatagccagtctgtcagaagcacaggtaaaataacctggggcttttaatcaccatcag

SEQ ID NO: 3047 - DNA, 223 bp, Homo sapiens
ctcagagaaagggagcacctgttttggtgcacagaattgtgctgcactgtgactttgacactagccttcctttgagggcactgtcatggccctcttctcagcagtaacaggagactaggtaggagagtctttgtctcatttttggcagtgaactctcagtatgttactgtggtgaagagctggtcaggagtttgaggaaaaaattcgcaaggtgtagtggcgg

SEQ ID NO: 3048 - DNA, 6567 bp, Homo sapiens
ggctgggaggcacagcgcccgtgtgctggaggcgagttggctccgggtgggggaggctggggttccaaaccagggcaggggaatggtggccctgcgtggctcgtggacctctctcagggacccctctcagcaggggccggaaaagcaggcccacacccagtggtcattgcaggaacttcacttgagctggtctgcttgtgagcctgtggtttggagaggagaagacgcacttccccatgagaaaaaggtggtcatccccatgggctccacagatgaggacaccggccctcagctctgccccctctcagaagccttcctcacctgggggttctgggtgaagggagctccccgccagagactcatgtgggatcgtgtgtggaccgtagagccacagagcgtcatctgtaagccagtttagatccaggctttaacttcagtttcctgtgtgacctttgagaagccatccctccaagtgcttcctttgaagggtgagccctgggtgcctctctctgagggaggcccttgctccatctgggcttgactgtgccacgggggatcagaagcaacatacattctgtcagcagctgccggaaatgctggagcagcagtcctggaggcggggtgaagcagtccctggcttttggaggaggcgtgagaagaaattcatggggggctttaattcttttcagattcccaaccattttcttctagctgctactgcctgcatttgtgtaacttagtttgcaacacaggtgacaagctttctctcgttggatgctcattgcagcactgtggggcgatgcagccaggcaggtgctattgcctccatttcactgattgagagactgagactcagagcagctgggagctctcctgagataacacagctagttagaagtcaagccaggtccccagggtagagctttcagtagtgtgtgaggacagcataaaatgaagtctgtagactgtttttttctctgagaagttcaagtcttctgccttgctgcttcttccctccaagacaataagttggttcggtgccctctccggtgacaaacttaggaaacatctcttcagtatgaggtagcagcctcctttagctattgtcacagccaattcacagaggtctaaggcccccagcttaattgatggttaaggaccaattccaccctattcctccacctccatcaaaaaaagcaggcaaacaccacttcatgcctactagaatggctattaaaaacaaacaaacaaaaacagaaaataacaagtgttagttagaatgtagagaagatggagaccgcatgcattgctggtgggaatgtcaaatggtggaatcactgtggaaaacagtttggcagtttctcaaaaagttgcacacttaccatacgatcctgaaattccactcccaggtgtatagccaaaagaatggaaatcagggatttaagcagatttctatacactcacgttcatagcagtattagtcacaataaacgcaaagtagaaacaacccaagcatccataaaaagatgaatgaggcccggcgtggccgctcatgcctgtaatcccaagcacttcaggaggccgaggcgggcagatcacttgacaccaggagttcaagaccagcctggccaacatggtgaaaccccgtctctactaaaaatataaaaattagccgggcgtggcggtgcatgcctgtaattccagctactcaggaggctgaggcacgagaatcacttaagcccgggaggcggaggttgcagtgagctgagatcataccattgcactccagcctgggtgacagagggaaaatctgtctcaggaaaaaaaaaaaaaaaaaagaaaagaagagatgaatggataaacaaaatgtgagctatacacacagtggaataatattcagccataaaaataaatgaaattttgacatatgctacaacatggatggacctcacatacattgtgctaaatgagatatgccagatataaaaggagcaatattatatgattccacttccatgaggtacctatactgggtaaattcatagagacagaaaatggaatagagattactaagggattaatgaggggatggggaaggggagctactgtttaacgggtagggaatttatgctggggatgatgaaaaagtgttggaggtagacggtgggatgaggacacagcattgtgaacgtacttaatgccactgaagtgtatactcacaaatgattaaaatggtaaatggtacattatatatatatattaacacaattaaaacagactgttaaaagaaagcaaacaggccaggcgcagtgactcatgcctgtaatctcagcactttgggaggccaaggtcacttgaggacaggagttcaagaccagcctggccaacatggtgaaaccctatctctactgaaaataccaaaattaactgggacgtggcagcacatgcctgtaatcccagctacttgggaggctgaggcacgagaatcgcttgaacctgggaggcggaggttgcagtgagccgagattgcactactgcagtccagcctgggtgacaagagtgagactctgtctcaagaaaaaaaaaaaaaaaaaaaaaaggaagcaaacaaacccaaatagaaaacaacaaccgaacaaacaaaagcaaaaaaggaggcaaaggaagaagagagggcccaagggtaaaggacaggggctggtgtggaagacacaacagtacatcatgaaaaggaacaaggtgtctctgggagaggtccaggtggtgctctgcccaaggggtcgcataccttagtgctgggaagagaggcattctctggggcctgagactcctgcagggaaactgtcccagtatcagccagagaagagatggctttcttttactgcatggcagcagccctggagccccggggcaggatcatatccctagggtgggagaagtgcccatttccaatttatttatgtgttttatccccagagtgggataaatgactatgaaactgacctaatatttatgtctattttaaggccgggggttgatatgagtgctttcttgatgaactgcgcccttagagctatttactttagtggaaggtttcttttgaggaggagattgggaaaagtcatcaaattccgtggttgctgcttcctctaattatattctcacttttgaataatttttaagcctttcggaagtagaagaaataggggcttttaaaatgatgggagcattcccaacaaaggtaaaatgctccctaccttggggcccagctctttactgtgagtttgtgacatctacttttatcattctaaaagtttcatgttgtccatactgcctgttaggaaacatggaaaagctggctttcaaacttggacttggagccaggcatggtagcatgtgattgtaatcttagctacttgcttgagctgaagactttgaggctgcagtgagctatgattgattgtgccactatgctccagcttggatgacagagcgagacctcagtctcaaaaaaaaaaaaaaaaaaaaaaagggactaaggctggcagagacaagaagactaaactttgtattaatttgttgtatggtcattccttgttttttcagaatggactcctctcttttttccctttaagcaacaagatagtggagttacaacccagcccctgccggtagatttctctgttcggtcccgaaggttaaagtccttagatgaaaaaggctggaatgcaaggtgtgaacactgagataaagcagagcatgggcacatgttttgtttgttgccatgaggctctgttttattttatttttaagacagggtcttgctctgtcacccaggctggaatgcagtcgtatgatcgtggctcactgcagcctcatcctcctgggctcaagcaatcctcccacctcagcctccccagtagctggggatagccaccacacccggctaattttttgtagagatgggggtctcagtatgttgcccaggctggcctcgaactcttgggctcaagggatcctcatgcctcagcctcccaaactgtaggagtacaggtgtgaaccactgggctaaagtgtcatcaggctttagaaccagaagctcaagaactggcctcaaaagtaaagggacttcagaaatgaaattacattctgaaaccagtgcagaggagccaagtattcagcactgatttgctctcaggtagcactgagcatatatttgctggtgacagaggcagatgactggaatttattttttaccaaacggttttgtttcctgagtcctgagagatgacctggtcgaaacttcccctttaatcttattaaggaaaatcgatgggcacaagctgggattaactacaagggaatttgagcagcaagagaagctcattcttccaaggtgcttggtaaatttggggaattctctgaaaattctgagtaaatatctgggtggagggcaaggaagtgactatattattactagtaatgcaaggagatagtcatagctttgacaaatacttttaagtttgaagagtttttattttctcattttgtctctatgccacccaggtattgctattgccctaatttctcagagaagtaaactgaggctgagagcagtccgggggtttgttggaggccacagaaccggttagaagaggcgtggattaggatgcagggagtgaaacttccgtgcatggcagagcctcatgacagaaggagcctggctccttgaaagaccgggtggagagagctgctcacagatagagtttcactcttgtctcccaggctggagtgcaatggcgtaatcttggctcactgcaacctctgcctgctgggttcaaatgattctcctgcctcagcctcccaagtagctggaattacaggtacgtgctacaacatctgactaatttttgtatttttagtagagatggggtttcaccatgtcagccaggctggtctcgaactcctgacctcaggtgatctgccagcctcagcctcccaaagtgttggaattacaggcgtgagccactgaatccggccaatgttatgcatttaagtgtggggagcagaagactggatatgcaagagcatacatctggataccttttacctcttggcttgtggggaaaatgacctgcaggattttacatggagcttcctgtgtgcatgctggtgactgttggcaacaaggtgtcaggaagaaagacattgctttccaaactccttttcccaaatgatcctttcttacccagtctgccttacctgcttctgtactgttcaacagaggagggggaacagggaaaagcaggggcagttgtgaaaaatagaagggaaacttgagtgtgcctttttcttctccttctctttctccaccctcagtcatcattaacagaaaaatatttttaaaagatcccttgatggcatccccaaatgttaagtctgacattttcttagctgatggcctcctttgtgaaggtactttgtgtccgcccagcatgcctgctggatccctggtttgccgcagttgctgaggtaaatactctttccattaagcaccacagcccaagagtggcctaaagctcaaataaatgaccaagaagcaacttaaacattccctggggcgattttaacctatgcaatggctttttgaaaaaattgcctattttttcatgttttggccgggggggtgtctcttattcccttcttttttattttcctttcagctgagtacaccttctctttcatttattcatgcactgcatgaaggatggaagcaggatgaataaatcacagagcattgcccctctccccactcagggtctgtgaagagagctggagcagaatacagtccaggcattatgtcaactttcaggggacctggggcaggtggccgattctcacagagaccccacttccctttcctgtgaaaaataccacagcccaacagccactggagaacagtgttcttctggaagcttcctctgggcaggaggagtcaaagatcctggtcctcagggacacttgagatgggtgtgcccaaagctgtgcaggatggtttggtttgttttgtttttctttgcctcaggaagaatgtgttcacaaacctcaggacaaatcgtttaaaaaagtgtcctgacagttgtcatgcttcatcacttgatttagaggcaataggacagccttattttcttctaatctctggtggttgaggagtctggttggcctggcagaaggctgagattggctgagggagtcatgagcgagcaggggcctctggtgcctgaagcgcccctcaggaagagcgggtctcaccggaaggccacactcatctccttcctggttacccagtgtggggatttgctactttgctgagtgtgttttgtctacattcatggtgctccagaactgtgtctgtgtttctcacattctctttcgtgtctgccagagcaacattctcagcaaaccatctgaatgcaactcctgtgatcacaaaagtcaatcactgatggaaatgaagaccacgaccctgattcctcaggttggcccttttcaaaccacgtttctcag

SEQ ID NO: 3049 - DNA, 1781 bp, Homo sapiens
ctcaataatagcattaaaaaataaagatgtcttcagatgctcctcccaagtatagtgacttggtacatggagacaccctcaggagaagaaggcatggaggaacagccttgtccagcttcctccctgtgggtgagacccctgaagtcatcctgacagcctttgcttgcaccctgcagccatctgtccagctggccccatggggaaggctccatgctggggtaggtaccaactgttccttgcttcctgcctaggggtccagcttatcatgggcatgctgtctgaaaaaccaaggtctgggactcctgctgaagtggcagcctgtgagcgagtccagcagaaagctgcagtgaccctggctcgtctcagccgagacccagatgtggcacgggaggccgtgcggctcagctgcatgtcccgtctcatcgagctctgcagatccccatcagagaggaacagcagtgacgccgtgcttgtggcctgcctggctgctctgcgtagattggctggggtctgccctgaaggcctccaggactctgactttcagcagttggtccagcctcggctggtggactccttcttactctgcagcaacatggaggagagttttgtgtagtgagtgtgggcgaagaaatacatttggctgttctcacaccccctctgactatgcaccagtgaacacatctgagtacataccagctctcctcatcttcttatttatacttaacttatttttgtgtgaaataaatggaggacaaaatcttagagcaacatcatcaaacagtctttggtccttgagaatcttctttgtgttttattttttgatttctgtagcttttcagttgcagatgttgaaattcgtaatgacaaatatgacaaattgtcatgggtgattccacttcatcttattttttctactctcactatacaatcttgcctcattttttaaaactttggaaccagaggatttcaactgcctagcaagttttttttttaagttggatttgctcttcccaaaaatctaaaatgaatttaataattgggtagaatatattggaaagaagtttctttttctttaataaatggaatcatataaaatgtatcccggattttcttattaaattgtattttaaactaggttcttgcttcccaggtttcattccccaaaaacttttccaaccattaaaagtacacacagaattgtcttgttttcataggtgtataaataggttaagttctgagtgacttagtgagaaaccaaagtgactttcaaaaatacacccaaaggcaccagaaaccctgcttcctttggcttctttgcttttgtgtaacctcctgttcacctcctggtgaatagaatcctcagatgaggcttattgaatgattgattcctcctcaaaagtatacttgaaagcagtggtgtgctgaagccagctcatgcccactcacaagggacaactgtgagaatttcttcctaactctgcactcagtgaccttgcgttggtagccatgagctacttcatgagccctcatgttgaaattggccatagtgggagtatttacaccacagaaattcacagatgctataaagcacagctttcgctttttttttttttagagagagctggtttaccaatttcactgcttgaaagtatcacaaaaatctggggatccttttgaaaatataaatgccatcatattgtgatataatttatacaatataatataattgtgtaaaatcatgattataataatgtttcaataaacatttcttaaattcccaa

SEQ ID NO: 3050 - DNA, 7069 bp, Homo sapiens
ccgcagtccgacggtcccacctggtcggtgtgagggcagccgcaacccggtccccttcacggtccgggcccagccgtacgaatcacagtcgcgcttttccctccccggctcccttcctgccccaagcgccccgcctaccaggtctctccggcggccgctccagcccggccgggaccccagagttgcaggcccaggccagccgttgcaccgttaagccgggccggtgacgccgggcctttacgtcgcgcctgtgagcggccgaggccgagcggcctcccctcgggctgcgagacggagacattacctcatccctcaagattgctcgctgcaaacacaacgctgagaaatggcccaagtaaagcgtgatcagggtcttgcattcttggcacatctaggaagaacgtgcaaggatgcgaattgtgaatcgcttctccaaacaatccattatttgggcaggattctgtagggaaaactcatcaccacttcatatagcatcagccatgcggctcaactgagggctgttggatccacttctaagatgactcactgctggctggctgttaatgctgggttgaggccctggggccttggtttgtctccacattggcctctccattaggcctggacttcctcacaaaatggtggatgagttctaagggtaaacatcgcaagagagaaaaccagacaagagagcaaaacttgccttttgtgacctagcctcagaaatcacatagtgtctattaattgaagcagtcccaaagtcccacctgggttcaaggggaggagatactgactacactgtccttgatgggagggtggtaagattctggaagagagatgggaccagaaatgttgttgcagccattttggggaagtgcaatctaccacaacgcatatgtatgtactcctaggcaatatgctatttaattttgcatgttttacgctttatagaaacatccatactgaatatgtttttctacaactttgttccctcaacatttatgagtcgcttatatttttggagttcatttatttttagaattgtataatatttcattgcaattatttgctacaatttagttctctgttattttggtgaatgtttgtgctctttctatatgtttccaaccctttttttctatatatttatgctttttgctattttgtacagctgctctgaacattctcatagaactttgcacatgagcctagggcaagaattatcaaccagtgtgatttttagcaatgtcagaggcatttagcaaatgtcctacacattttttatttttatgactggagtaggaagcgttggtactgacatctggcaggtagaggctatggatgttgctaaatatcctacaggaaagccccctataacgattagctggtccaacatgtcaatagtgctgagattgaaaaatcctagcttagggtatatatggaggagtagaattctcactcaatgataggatattcacagtttcaactttattatataatactaaattgtttacccaagtggttgagcaagtctatactcctaccaaagggaggctccacatcctctgatattgtcaatcttcttagattttgccagttcatgtttttttccttctgaaatgcacatttgtgtgctttgtccatttttatagagtaaatgtttataggattgatttgtaggcattatttatatattctggatactaattctttgttggttgtatgtgttgaaaatatctcctcccagtctgtggcttatcctctcacttcttcctggttcttttgatgaacagatgttcttaagcttcatgtagttaaatccatcaatcgtatactatccatcaggcttgtgatttagggtcattatttaagaaagaatgtcctgccctgaggttatcattgcttcccaagcctggcagcattttggggttttatcttttccagctggcaagacctggagttcctcttgctgaccccagaggtgcctggccttccttatcctccactgtttgctcagtccttatgaacactcagattgtatttcctaatgtactccattttctctgttgggctctttctacaacctctgtagccctctctacccaggactggactctactgtctcgggactggcctcaaaatgaactgacttctctggaaccacagtgccccacttagtatcagcactgctgaagatgtcccttagagattagccatggcaggattgagccccagttttctaaagtacttggatggtttcatttgcactcatgtggggtattctcctctagggctaaaatcaaaaatggggcaaagctgaagatgccaagtggtccccaggaacattactgctcacaggagggacaccccaagatgagcatatctgctctgaccacataccttctagccaggcctatctacccagggcccctcagaaccgaccatgattaaaggacagccttggtgtgatctgctccatccagggaaatcattcagagttaattttgcttccttttccctccattccggttctgtccacatcctgacttctgatatgtcctcccttctggatccttctcccatcctttagacttcacattgatctgggtttccctggctttgacactcagtaagggctttgggcaaaacccaccttttggttccagcagctcctgtttgccccaagaaaggcaccttatcctagctcaagtcatgatgacccaaacccaaggacctagataaagttgaagagatatgattccaggtgcctaatctgaacagttgtcgagcttgggagaagataaatcttaaagtggggaacagggagaaggtaaaagtaagaatctaaaaacccaaacagcaggaagagataggaaagtagacaggcataggaggatttgagaacccaaaatgtatgcctatgatgcagagccagcatgggaggcattataatggctgagaacttgggctttgtagataggcaaggatctcctcaccttactagttgtgcgacctcaggcaggttatcctcccagagccctgttttcatcatctgtaaagtagggctggtgtaataacttgctcaattgtatgaagattaaatgataagtatgtaaagcatttgcatagtattttacactatgttcaaaatgatgggcattatcaatattaattgatgttaatattaatattcatggactaatgaacagaggacccgctgcccggttcctttatggctgttctggcacacactgagggtcagcaaattacggcctgtgtatcaaatccaggttgttggccatgtggcccatgagctaaaagtggtttttacatttgtaaatggttgaaaaaaatcaaaagaagagtattatttcatgtgtgaaaataacatgaaattcaaatttcagtgtccatagagttttactggaacatagccatggttgtttcttttgtattgtcttattttctgcctctccaagaaagcttgctgactcctggcataggccaagtggactaggggcaggtgctttagtcagctggaccttggagaactgggcaatctcctccactccacagctctatacatggtggctgcccttcttttcctactggccctcccctggggttccagagtaccttttgttcaagccagccccacttgacccagggcactgggatctagatttctgaacaatgagccaaatcattgcagaatcatagggggaatcaggacaaggctgttttgagattaaaatgaaataaaatatgtgaaagtactttgtaaatgcaaaggatgttattatttagcaagtaatggttaaggggtatcagtgaggttttttactcttcttagtaaatttagtaatgtatgttatgttcacttttaacaaaatgtattattaaccagaataccctaatttctgtccagatcaaaaaagattttaaaccaaatgaaaccatccacaatgcatgtcaaacgcacccccaaaatggagttttgagcttctagccctttctgcaaagaaaatcctggctcctccatcttgttttttttttttttcctctcctcttcacttcctgtttaccatctccattttcttttccagtctctgtgcctgtgctttgggccacttgattgctttgggtggccagagtagagagcagatgaatgtcattgtgtttgaagaagccaaggaaatgtgacagaagagttttaagagaatcatcagcccagtgtagacatttcaagtgatgttaagagttggagtggaagaaacattatgagtcaattcctcagtcactattatgggataaccaggatttggtaggaaaagcagaaggaagaggtagatggcataagaatcaaagatcatttgtacaaaggagagttgagcaaagtatcaggggagctaggacaatgctgatcgcttctgagtccccacaggatgtgggaaaatgagcagccttccatgaaaaaggtggcaaaggaaggccacagaggagtcctgtaagggaacagaaaagaaaaggctgaggtttgggtgttgtctaccttaagcaggccctgagggtgggagggaattccaggagcagtgggggatgaggtcagtgggaaggaggttggaaacaatgtgggtttgaggatgagaagacatgtcctgaggggtttaccttttgggtggaggccaagggcaacaggaaccggagtcacctaggattagctggtcccaaattgtaaatgaagcactggggtcatgttgttcacatcctgggattgggggaggagggaagaggtgggcatgagaggccctgctgggctggaggtgggtattgcagctgccacataccattcccttgctgcaaaatcctttagcagaatgtctgctatccaggagtacgtgcattgttaagtttgttctcatttcctgaacaacttacgcactaagcaattacttaaagcgctgaaggaagaggctcaggtttctaatgacattctgtcaacatgactaatgctaccctggaacacccttcccctaggtatctgcatggctcactttctttttcaaccaagtttccctcaaagaggggtcttctctgatcccaatacccaaatagccctactcatcactcactatcctcttgccatgctttatttttcttcattttacttatgtccaccgactcatccttatttgtttattagttggtacctgtcattctcactagaatgtaagccacatgaggttaggagtttccttttgttctctaccctattctccactgctgaaaatagtgcctggcatacaacacagctcaataaacagctgtgggcaaatgaatgaatgaatgacttggccctggccaagtcattggacctcaggaatggcatctttcaattagaagttgttgctactctaacgattttgttaatcattaggtggcctatcttcaccatgcttcctatacaaaagtgaattgcctaaaactcagcatcggcgcttctccctcaaagttttagacaataaactctgactgtttgaaactcagctgtttgccttcaccactcctcctcccatcttgcctcctcccatcctcctcaactgctttttctgatgttggccaagatatcagaacctgagattagtatcagaaaattgagctcctaccatgaccccacaccaaagcttgaggctttcaataacaaagacagacaccctcctttctccaagagcctatatattgtgagggaattgataattaaatatgtgattgtataatggtttaatgagaaccacaacaggggaggtgctaccttcagaaaggcttccctcgagaaatgatacctgagtattaaactgcaggatgagtaggattcagctgagcaaagaagggttggagaaaagtagacagcagggaaaatccctgatcctagagaagtgggtcttgttggaggagccagaactggcaggtggctgggaacccagtaggaggtgtgagtagtgggtaaaaccagggctgcaacaagcgttagaaacagattatcctaaggcaaaaataactccctttcactgctgctgctggtttggttggcaaaaggaaaaaaaaaaggactccatgattttagtaatcagattgctggtaataatattggtattattattctgatactattcactatatatataataggatagagcaaataagtaattaggctaatgttgatagaaaccaagattcttcaccataagagatgcaaatataaaatttttaaaattgtaaaaattctgtaattttaaatttgaataaaatatattagtgtaaactaatgatacattttcttatcttaaatctgtttcctatctctgaccactattaaggcctagaaacaatgaccagtcaaatgcagtccatgcccctagtaccggtttgtagtctctaaattatgcttcccaccaaatggaaccagggtttatttcagaaatggatggtccagaggaggaattgcatatgatgaagcttaaacaccatgatataccagatagtgagggaagtgtcagagatccctggggtcatgtcaacaggactcagaagtcaacttgtcaaggctctcactggccacaaatgggacaatgttaatatgaataagaataactaaaaaggactgaaatccacatgaattctgttggaaattcacaagtttataatgatgttcaaaaaagaaaaataaagaccattgttcacctttggataatactggggaaccaactcattattctgaaaacaggaaagcaaagcaaaggaatctacatttgccatataaattgaacctcagggtaaccaaatagtggagaagggaatgtttctttctataggagtattccagccaataatttagaagaaatattgggccaggtgtggtggctcatgcctgtaatcccagcactctgagaggccaaggcaggaggattgtttgagcccaggagtttgccaccagcctgggcaacctagcgagacccccatctctacaaaaaaaaattttaaattagccaggcacagtggtgcatgcccg

SEQ ID NO: 3051 - DNA, 1000 bp, Homo sapiens
atcacgttgtgtcacaatgggagtgactcacagagcaaggagagaacctgaggattcctcacacatgtagtactcagagctctacggaaacccaggcacctcgacctcaagaggatcagcctggccagggtggcacaactcttccttccccgtgcacagcaggaaagctgccatcagctgagcaagtccaccaacagtttctgtgtcccacttcatctttaataaggaaaactaaagattgaagacatcactgataagtacatttttatcactggatgtgactcgggctttggaaacttggcagccagaacttttgataaaaagggatttcatgtaatcgctgcctgtctgactgaatcaggatcaacagctttaaaggcagaaacctcagagagacttcgtactgtgcttctggatgtgaccgacccagagaatgtcaagaggactgcccagtgggtgaagaaccaagttggggagaaaggtctctggggtctgatcaataatgctggtgttcccggcgtgctggctcccactgactggctgacactagaggactacagagaacctattgaagtgaacctgtttggactcatcagtgtgacactaaatatgcttcctttggtcaagaaagctcaagggagagttattaatgtctccagtgttggaggtcgccttgcaatcgttggagggggctatactccatccaaatatgcagtggaaggtttcaatgacagcttaagacgggacatgaaagcttttggtgtgcacgtctcatgcattgaaccaggattgttcaaaacaaacttggcagatccagtaaaggtaattgaaaaaaaactcgccatttgggagcagctgtctccagacatcaaacaacaatatggagaaggttacattgaaaaaagtgagtttccgggcggtgccaatgtcctctagaattctttgtcctgaacagcatgaaggagattcaaatacagatgaaataacaaggttctgagta

SEQ ID NO: 3052 - DNA, 1567 bp, Homo sapiens
aaaaaatttccaagagaagtttgtaaggtacactctaatttttttttcttgttgcttatatttaatacaggagaaatgaaaaattttttaaaagcaattttctaagcaaaaaggaatcaacacttgatgatttggaaaaccatcagcccatccagatagcgtagcctcaaaacaaagtctaaggtctgaccttaagaaaataggaccttccattttctagctcctggaacacttccacttagcacccagccatcagactgtgtatgaggagaggaactgagacctgcagaccaataacctaagctgaactcgcagctgaaagctaacccacctctaatggactctccactcaaaatccagattagtgaaccaaatatatgactgttgtttttaagccactatgttttagcatggtatgttacacaccaatagataactaaaactgttctctcaccatctcaacatcctcttcatattttctaaataataaaatatgccatttgattttacaagaaacaaatgttagatggcagggctgaagttaaatgggaacctaatgttcacaacgactaacagatttgtaaattgagcttatatgtctacatcaaagttctcaatctttatttatgctatagtttaaagcatgactatacttttcagctgactctcttgaaaagtggagtataattaatatattgatacctggatatattatattttagttcatgattccatttagtcctgaaaaatagaaggcattgtcattttgtagacatctccttgatatatttgtgttagagttaactcaattttttaaatgtaagatttaactctatgacactaatcacctgtcatcagtcactgactatagttcaatatcatttgagtcaccaaggctaagatataccagataactgtttcagtacaggtgatttgcatttatcatctaagagcttataagaacctcctctcactaaaatatcagaggtctaacttttacccccttcctcacatcaaaagcataaaacgctgagatatataaagaggagatttcagggagtttgagaacttactcaaatgatgtaactcatttgacaaatgacttgcttcatgcatcttttagatagctaagtccaattagctaaaattatagttgaattgaatatgtaaatatctataaagttggcctaattagatccatagggtggtgtagcatctgtgtttaaagcccagcaattgtgaagaggttttggttgcaagcttaggggaggctgtgaagactggcaagtctaagtcctcccgtggaatctgagatttcacaggtagtatctgaggatgggtgtgagattactgctcaagccagaaagattaacagctgcctcaatgggaataagagtcactaggaaatttgattctatcattcctgaatccaaggtggcgttaacaagcttattatgtaagaaagcagcctctgttactaatctaagctgtatctgtttttctgcttacgcctatgaaccagaacataagaagtagtagaacaaatgatatgaatctacaaattatg

SEQ ID NO: 3053 - DNA, 5166 bp, Homo sapiens
gcgcaaaggccccacgtgttccgacccgctaggccccgcgcggctcggatccggcggcgctgtttcggtcgggagtgggtgggagagaagccggggcaggggaggagccgccggagctgtcggagccgtgacacccagggcagctacactcagaagccacaaggaatgctagtggagcccctcatccctcccagcttctcttccaagctgccccgtggggcttgatccaggaagctacttcagaaagacaatcattccaagggtacaacaaggtttaccacaatgtgagggactcagccattgcaaattgtacagatgaggtaagttacaggtttacatttttttttcccagtaaatttggcacagatttaaaatgtgaaacagttctataccccttgtttttgctgttctctcaccagcaaaccctttagtttggccagcaatggctttctgcatgaacttcagatttacttcatttgctaggtggtggttctcaaacttactataagcacctgaagggctagttaaacgcatattgctggggcccacccctagagtttctggtaataggtctgtgctggggcttgagaatttgtacttctaacaaggctcaggtactgatgctgcagatctgggttcttcactttgagaacaactaccttttggccaaatgtgatatatgtattgcagtaggttgaggttcagaatacctttgtttgagtacttctgtgttggaaactagtaatctgatcttttatagataatcacttaggtctgaatattttgttcgcaaaattaagaaagcgtacttaaaacaactgaatgctatatgccaaatttgaggtgaaatattgataagttcttccccttgattttcttaattctcttgataggggcttcacgttttgatcaaaatattacacctgtattctgggcttttgctgtgaattcctagtattgctaaaattctgcaatttcttaactacctgttaagttcctcaaggtcagagcttctgctttttttatctttctttgcccagcaccttgaatagtgtgggacacgtaattgacgctcagtagatatttgtgtattgaactccatcccttgtcctcctcccctcttgatgtttttctctactggccttatgctacacagtaaagcagggcatgattatgccacttgattacccccaagagattggaataaatgcttatgccaaattcctacagctatccctgtgaatggtttattacccaggagccctgacactggctgatttctgaattttcagtgcttctgtaatatatactagttgggggaggagaaatagaaagcttaaactcaatgtgcgtttattgaataccttttctactaagggctccacaaagtggtaggcactgggaatataaaaatgaataaggagacccttgctctcgagggcagggcccacagtggggagacagacgttaagccatgcccacgacaagaatgacttctgagattccttctctggatcatgatttagtcttcagtggaaacctggtactcctcagattcctctggttcaacaggcggggatcccatcccttatcatctcctcaaatgctaaaggacccttgagcaaagccaggaggaagtcatctagacgtgaaacagggagtatccacacaggctgtgttaatgacaaagctaaaaacatagtaaatgacttttgaatttactgctgttatgaattatctatagcaacacctccggtcagctctgttatatatgttattgcgttatttcccattaaatgatggttcctctgactatctgattggcattgactatgtttgttgtagagattgcatacatctagtttaactctggctgtcaaatgagagcagttactcttatcaggatgggtgtcaggtttgatgtcccctccttttcctgcttcaggttaatttgtcatgttctgttttaaactgagacatatagcttgacctcctttatttaggccattaactgctctggggtagttttcctgaaggttaaaaagcctagcttcatgatggaggttaaccaacatgaccatgatggccaggtgtataaatctggcctcttaaaaatctgtatttgaggctgggtgcagtggctcacacctgtaatcctaacactttgggaggccaaagctggcagatcacttgagcccaggtatttgagaccagcctgggcaacatggcaagaccccttctctataaaaaatttaaacattagctgggcatggtggcatgtgctgtagtcccagatacttaggaggctggggtgggaggatggcctgaacctgggaggcagagattgcagtgagttgtgatcttgccactgcactccagtcttagcaacagagtaaaccctatctcaaaacttaaaaatctgtgtttggcccctagccgtcctcagctcttgagtaaatctcagcatcctaggctgttacattatggcccaaatattcaatagagatgctgtatatccttgttcctctcaaaacccctcctcatcaccatcaaaaagctggttcagttctctacctttagataaagaatcatcccaagactcaacatgagctgccgtgacttgtccaagatgacacctctttacaatgtagagcagtggacagaacacaggtcaccctccgccgaaggcaactatctactgtctaacattgcctcctaggcctgccatatataaccatcaaaaacagtttagaataaagtgaattgttacaatttttatttttcatttttgtgtttacatttactctcaatgacatgtttattcccacctaatatcttgaggctaaccacaaaatctgcagcatttccagacagaagatacttgtgacttccctgtactatccactacatacttgacctctttctctttcttcctgtcttccctttctctataccttattgtctttctttggaacctcttgtaacaaattttgagccatttctcccctcactactcaaatatcacttttatgaaggggcgggggggaaacttaggtggcaaaaatattttacagaaacagttttaaacatgttttgaagcatactggtcacgtgttagaaggccaaaagccagggaattcattccctttcattcattgtgctgtctaggttaagttttcacaggacttcttggtacactgagtttgcctcagattgtctcctgccagttacagggagtggagaggactttgatatattggtaattagaagcattgctgatatggtcttcggtgggagaacctgtgtctaaggttccttctcatctgtattccaacactttcatttaatcctacttcataagtgcctccaaagcaaggattttttttttggtttagcatggtttctttgatataacaatagaccgaccaagattttccttatgccatctgtttttttgtaattatgatgcaatagagaactgtttgcttgtttatcatttaaatcttgccttcttcccaaaacgatttcaaatagcttgaaggaaaatgaataaaatatattgagcacctaccctatgccagactctatactgaagggtttctataggttatttcatttactccttaaaacaaccacatgagataagtagtattagccacatttttgaggataagactgaggcttagggaaattgtgttacaaggctaataagcgaggtcagggattcgaggtcagggattcaaacccagcgtgccaaggccactaaccattatgtggaaagcttaggtaagcgcttgtatataggacaatcaagaataaaagaatatgtccattagaaggattgtactgggctaatctttcgttttaaagaacagcagcagcattggaaaagagcggttaacagtttttattagccaatttctattctagaacactgagaggagctgttgacaggccctggttagccccagcaagtagttgtattaaaattaccaaactataggcctgcattaaggtataaaataagaatggggactggaagggatataaatatctgctaaatataataatttcagttctaatcactattttcttctgaagattatttgccagtacataggcagatcactgtctctcctttaggttgatggtatatgactacagactttgtcatttagggtccagaaagatcaccctagctagtagcgttttaaggtagagaactagatattgtttcattgcctgtggttttctgttcttgtaagagaattgagcttgggtcttcactgccacgtgacaccttcagataaggggcagagacagctggcctgaggattgtacagaggtcttaccttgatagctcctctccaatcctatgcatcctaggaacactcaagacactaggttgtatctttgcagatactgttttagtgtcttctggaaccaagtctcttacttaatcctggcctggtttcatattctctctattgtattctctctatagtttttgtcttactctggaactcttccaaggacagacattgaagaaaggtattagaatagcaaaggcaacaaattgcaaggtatacttatggcatagcacatcccattaattatagaataaaaacacaacatctgttttctgcctctaatattaaatcttgacatttgcacaacacattttagttcataaagctctcatatctcagataatcactgagttaggagactggttatctgcagagggctttatcctttacaagggctcttgggtacgttacttcacgaaaccctcagggaagctccagtttcttggggatctggggccggggcatatgtctttggatacccagtttggtgctgtgcacagcactgctgtacctcctattcatttcccatctcttaccccacaaagactccttccttcattccttctattgctgatctgttttccttcatcttcctaggctgccaaagtaaatgcaaaacaagcaccagaaatctcagcttgtgatttctgaagggcatttttaaatggcaagtttggtgtggcactgttacatgttcttttttctttggagagcaaagccctttgagagagcaggaactcttctgtcaatgcatacgttgtaggatccatactgtggaatctcttgtacctagtgc

SEQ ID NO: 3054 - DNA, 14813 bp, Homo sapiens
ggcatctaactctgtcacccaggctggagtgcagtggtgggatcttggctcactgtaacctctgcctcccgggttcaaattattcccctcccttagcctcctgagtagctgggactacaggcccacaacgccacgcccggctaatttttgtattttttggtagagacggggtttcaccatgttggccaggctggtctccaactcccaacctcaagggatctgctggcctcagtcttccaaagtgctggaattacaggtgtgagccactgcacctaaatgacatacttgaaaaaatattctcgggccgtgtgtggtggctcacgcctgtaatctcagcactgtggaaggttgagggtggatcacctgaggtcaggagttcaagaccagcctggctaacatggtgaaaccccatctctactaaaaatacaaaaattagctgggtgtggtggcatgcgcctgtaatcccagctacttgggaggctgaggcaggagaactgcttgaatccaggaggcggaggctgcagtgagcagagattgccccactgcactccagcctgggcgacagagcgagtctccgtctcaaaaaaaaaaaaattctcactttctgttgttgttgtttgtttaatgattaatagatgatttatttaagcaagaatacatagtcatcattgccagacttaatatgacaggttaaatgttggacccaattttccttcccagataagtttttctttcctatccatgtcagttttaaaaacataataccagaagaagaggggcccaattccacacagagctcccaagagtgagtttttaggagtgggtctgaaattaggaaagacacttgctgatcttgcataggtccagggaatcaaggcaggattttcgatgagccctcggcagttagggtaagcaggtttcagccaggctcttaatggtcaaccacttggcttgcgcccgctgggtttccaaaaatatgtcctgttcggctgggttgagggcatagtggccaggggcgaaggagtatactttgggaacgacatcttggcgacccagcgcataactcacttttttttggaaacaaggttggctctgtcttccagactggagtgcagtggcgcaatctcggcgcactgcaacctccgcctcccgagttcgggcgattgtcctgcctcagcctcccaagtagctgggactatgggcgcacaacaccacgcccagctaaattttgcatttttggtagagacggggttttgccatgttgcccaggctagtcttgagcctcctgggctcaagtgatctgcccgctttggccttccaaagtgctgggctcataggcatgacactgtgcctggacagatttttgttatactgtttagatatgatggtaactgaatgatcatgcaatctctgaccatgtgacattcagggataccaaaaatgacttgagatgggccaagggagaattggagaagcatactttggctgaatacttaggccaaagtataatttggaacatttcttttaaaaaatctactcccctatgccccccacttgcagtaccttacaattacagttaatctagtagcagatactggattgggatattaggtatttacagaccaaatgcccattgggatattactaggtaacaggcagtttcactctggttcattgtagattcatccagtaagcatttctagagaactgctatatgaaaatattgtggaaagtatcaactttttaaacttttgatgtcatggcacctagaagattattttctgatactcatattctaagggaattttgttttctgagatttgtttctgtggaatttctagttccccagtctgcactgaaagcctaaatcaagaggataatttgaaaggtaatgaaagtaaatcaattctagcttagatacccaagagagtaaatgaaatataaaaataataacttttaaaatgtctcaaaaaaaagctatggcaagctaattcagtttgacttattcatgcaatagtctgtctctgcttatgacataaagtataatatattttaggaatagtgtggttttcttcatgatgtcaaacatacaagcttatggatatatttaaaaattcttaattttctagattaatgttcagcactacttccatcttgcattggatgggggcagataattaataattatcagatattttcttatcaaaaacaaatttgttggaaaaaaaattttttttttgagatggagtcttgttctgtcgcccaggctggaggtgcagtggcacgatctcagctcactgcaagctccacctcccgggttcacgctattgtcctgcctcagcctcccacatagctgggactacaggcgcatgccaccacgcccggctaatttttttgtatttttagtagagacagggtttcactgtgttagccaggatgctctagatctcctgacctcgtgatccgcctgccttggcctcccaaagtactgggattacaggcgtgagccaccgcccccggccgttggaaacattttgaaggaactctttgtaaataaaatacatggcatgcctttctgttttactatacagttgctgatttatcctttagttggttactttgaatcatcattaacatctgttgtcaccataatccctgtgatcactagatgtcatactccattttatgttttattgttgccttggggagactttgagagtatgagaggtgttcatgcagactgctgctgagtgttgcatagagatggaataaagtacaaataccttcaggaacagactccaaacttggtctattccagcttcctttcattttttttttttaaacctattccagataatttttcattggtattctctgaaggaaaataagagaaatttcctcttagaatcccttctccttggatttgtaacctttcccagttcatttctgtggaagtacttgtagtccagcatagtaattctattcagatatgtatagttcagttaagtcacgaagggaaaggaagctttcgttgagggctatctactaggtggtacagtgctaggtaattaactttatctcaatccttaaacaactctgcagtggtaagggtgattaattcatcccattttgtagacaaggaaactgaatgttagagggatggcataatttgttcatgttcatataggtagtactttgggaagcagaatttgaacacagatctttctggttctagagctttgtgttcttctaccttgctatgatgttaagtaattagttttaacatgccacttaagtttaaagccttaagtagtccttttaagaaatcttttgttgctggttattctcatttaacactcctattttaatttccaggttcaggtgacctcactttgccagaaccgtgggtcttcatgaaataagagatttcatttggtttttgttttggtttgcatcctctctaactttaggtagaaattgctgttagggcaatcacctacctcactatattccactctctcttctggatattggtgctcagcccttttttgaaccgcaaaccttattaataaaatagttttcattctttgagcgttcctcttctcactgcccacccccccgccaccaccaccctactgactttgatgagctgaactgaaccactcttttttttcttttttttcttttttttttttgagacagaatcccgccctgttgcccaggctggagtgcagtggcacaatatcggctcactgcaacctctacctcccagattcaagcgatttctggctaatttttgtagttttagtagagacggggtttcaccatgttggccaggctggtctcgaactcaagtgatctgcccacctcagcctcccaaagtgctagggttacaggcatgagccacccgtgccaggccctgaacactttttttttctttttctttttttttttttttttgagatggagtctcttgttcttgtcgcccaggctggagtgcagtggcgcgatcttggctcactacaagctccgcctcctggtttcatgccattctcctgcctcagcttcccaagtagctgggattacaggcgcccgcaaccacgcccagctgatttattgtattttttagtagagacggggtttcaccgtgttagccaggctggtctcgatctcctgaccttgtgatccgcctgcctcggcctcccaaagtgctgggattacaggcgtgagccaccgcgccggccctgaaccactcttcatcaacttatctgggaccctgaaatgaaatagggtgacccattttctagctttatatgattttctggcttcatatgatttaaatatttttaccgttttttgtttgttttgttttgttttgtttttgagacagggtctctgtcacccaggctgaaatacaatggcccaatgacagcttactctagcctcgacctcccaggctcaggtgattctaccaccccagcctccagagtggctggagccacagccacgcacctaacacctggttcatttttgtatttttttatagagacggggttttaccgtgttgcccaggctggtctcacactcctgggcttgaccagttcaccctccttggccttccaaagtgctgggattataggcatgaaccaccgtgcccagcttttgaaaaacctgtacaataaaaagtttggactaatgttctttgagcccttaaaaaaatgctattcaattaaaaaaaaaacaaacctatagtgtcttataactccaaatcccatactgtcacccaactggtctgccctggtgaccaccatttcctgacaaacattcaaatcactcctgaggaattgaagaaattcacatttatgacccagtgacactggccttgtctcagttcctatagtgtgtcatactctgttctgcacagaagttttgctcatcctattcctttgtttgcagaggtcccttccccatcccctatctctcaggcagactcctcatctcagtttatttacgacttcctcagggaaagccttccacacttccctgacggatgactttcccctgttgtgtgtgctcatagcaccatttacctacttcgtatacttgtgtggttattttatgtttatttgtgtgattctttgattggtgtctgtgctgtcccaagattaaaaacttcatgagagaagaaaccatgtctttttcttgtttttgtttgccattgtatccccactgagaacatggtgaataaatacgtgttaaatgaatgaatggccttttttttttttttagctggaaggacataaaattcttacatacatatagtttttaagaattatggctgcagatattttggatttcatctctggattaagtcagaatgtcagacaattgtgtacttgcacagtagtactttgttcctttacataattgttttttcttaattgaactttggtagtgtgcccttggctcaaattggcatatgctgtaagcaataaaatgttgcattgattgtatggacactcttgaggacagtgtctgccatatcaagtactatccattatatcaggtaatatcatcaggacccagaggagaaatttctctctgatcttactcccagaaaaaaaagtgtgcttttcttgagcaactggtctgtttttgtctcggaagcactgttgtcttaggcctaacttttgtttcctgaagctcaaagtcagatttgtgactgacatctaaaaattagttaggggtttctggcataccctgtgtaagctaatctcagttttagtttcatcttaatctctagaattttaactgtgattatgtgattatttacatattttatagtttgttcaataaaatactttttttttttggaacagagtctcactctgtcggccaggctggagtgcagtggcacgatctcagttcactgcaatgtctgtctcctgggctcaagcaattctcctgcctcagcctcctgagtagctgggattataggcatgtcccactattcctggccaatttttgtagttttagtagagacggggtttcgccatgttggccaggctggtctcgaactcctgacctcaggtaatccgtccgcctcagcctcccaaagtgctgtgattacaggcatgagccaccgcgccaggcctcaataaaatattttataaatacctttaaggaataatacaaacacaaccagagcttaaataaataaatgtaaatcagtctgcttgctggttaagtaatgagttcagtgtttctctccgcacagaaagtgggagagatagatgaagaagaaaataaagcttattacatgttgggaaggatgctaggcactaagttcctttttttgagacagagtctcattctgtcgcccaggccagactgcagtggctcgatcttagctcactgcaacctccgcctcccaggttcaagagattctcctgcctcacctcccaagtagttgggactacaggcacctgccaccacgcctggctaatttttgtatttttagtagagataggggttcaccatgttgaccaggctggtctcgaactcctgacctgaagcgatctgcctgccttggcctccgaagtgctgcgattacaggcgtgagccactgtgtttggccagttctaggcattaagttctaattggttcatttggggactcgaaattctccattttattttattttattttttctgcttttgtcacaaaagcacagacattgcttaacaaagaggtctgagatgggatatgaatgttaagctcagggacatagggtcaacacttttgagtgcacagactgggaacctggcacagttttaacaatcccctcccctattttcaccatcccttattcctgtagaagtagagcagatgattacgtattcactgctatatggcttattacctttgtaggaattctaactgaagggcttggcatttggcctgactgaatatcagaatccctttatttttcgttccattgcaaaataattttttgtgccatcagtgaaataacagctatgcagtggcatatacagctctggagaccaggcattagaagactgtgagacaagaataactagaacgatgataaggagacactggaagtcactttagattgatgaccaaagatttccttattttgaccaggaggtcagatctcaagggtccttctgagtccacttttgattagccaaattgtcttttctttcagtttgactataggttagtcaaccttccctccacattcatcagggaatgttagcaatatgtcatatttttttcttggtgtaccattaagcaatctaaagctatgctgttacctgtaaccacttggattaattattttagattagttggttatacttctaggttttatggctttatcttttcagtcagcattattaaccaagttttggtagctttttcaagttttgtaacccccatccagggagatcagtgtcctctcagacactcccaggtaagcatgatctcctggaagacgtgagaagtctcttaaatcatctaattattacattggagctatataataactccagtatacctggagttattatgcatatatgcaagttaggttctaatgaggcaaatgtaagtaaatatgttgttgattcaggaggtaaaaattaggagagccatgtgtagttttaagaacaaaagaggaattacttgtaacaaaagtaagtaagaaaggaattctcagttatctcttgggtagagataccttgcatagagttcagcaaaaattccaaaggttgtcataggactatggaggccattaggctaattaaaatttataatattgcccatatatttgtactaagtctcattcctgaaggattttatatttgggttgaggctttgagaaattctaagactggcttgagcagtaaaacaaaccaagtaaaaattgccatggctgtaaatagtcaaaaaggggtaagctaagtttctgcaaactaaacaatttcagagggtgtaagaatgtattggataaaggatgaagataaaaagcactttgaagactattgatactcatcagattttaccactgataatttttcaagaggaactgtttatgaaactgtaaagagaaaatggagatacaaaaagccatccaagatgtaaatgccgaaggccaagttttgagataaacagaaaatcacgaaaactcatgtctggtggatcttccatggccccagtgtgagcagacagtattttccttgaggagaaatactagtttggtgggggtaaggtagggagttagtttaaggattaatcaagagaactatacatgtgctatttaggttgagggaaaagatcagaataggcatgggcaaagcctagactcaaatcaagttatctatcaagcaagctgacatattcagacagtttattaattacttagagaaatgcatgatcagcatagtgtcagctcctcatgtccctcatccgcagggtaacactgaaactaaacgggaccacatgataggtaacatgagtggtgggcactctggctgaggaacagtttccatcctgtagctaagtagttttttagcctacagctacatcctaaggagtgggcaaggtggtgaatctcagacctcatggaaccagggaaggtggatgagaaactgcctcccagcaggctcccacaaaatatggaggttggtaagaaatagccttgtagcagcacctcacaatactgcctatctttccatattctgaaggaacacagagcattctgccaaagcttaggtcagcctatcgttgggcttacgtaagtagcctatgtggaggcatgcgagttttccagggcacgagtacagagcagttatcctaccttatcatctatagtaaggaagaaacgaccgtgtgaattagtacaaaagcatgaaaagaaaaatgttataagtaatcatttcaaacatctaggaaattttgttctgttggtcttaggataagcattctgcttctattaagttgtttgctcctggactgcaaagaaatcctagagattctgacacagtcacttggcacattctgaagattgtctttttttgtggtgatcatattatcccaagaagtttgcattcatgagtaatgtcattgtactatcatctatcaggagtacttgtatagtcttttatagaggcttttgtgtttcttccagaagactcagtttctgatctgtagcttgtaacaggagcctttaggcaagcataaaaaaaaagcagaaactactgtggaggtaagactgaatagttgaggttaatttattttaatagccatcaatatcagagtggaaaaaagtagaatcctctattaaggcatatcagtttgtaaagatttaatgaataattaccttagaataagaacatcatgggtgacgagggtactgaccattttcagagtcttgaatttttataccatagggtattatgattttccccagttgtctcaatctagatacttagatctagagaaaaaatatttttaactattttttaaaataacagctttattgagatacatttcacttttaaagtgtacagatcactggtttttagtatattcagagtagtacagtcattaccactatttaattttagaacattttcaccactccacaaagtaaccctttacccactagcattcactccctatttttccctctaatctacctggcaactcctaatctactttgtatctgtatagatttgcctaagatataaaatcttttaaaattattgtttattaactgaacagttatttaccagtcattggtacaagaacatgaatatgctccttttttaaaaaggacataatcagtctattgtgtttatattaataaaacgtcacatatataattaattgactgaggaacttatctatttgatgtattacattttttaaagtcttgtgtttagtaaacaaaacagctcttatataatagtattaagctagttcaaaatctagagaatgataagaactcttaattatttctattacctcttctaggtatttcccaagatcactaggttagtatctgatacattactaggtgttcaattaagaaagctttattttattttggtgatagagctggaattagaatccagctttcctcccatggagtctccttctctttccattataccacacatgctttccacatgcgtccaaagctgacatttcaaagggtttggaagcagttcatagtgtgaattatttttctctatttcctctttctctcgcattttttgtagccatacaaaaatatacaagtttaaatctgctattatatgaatgctgaaatgataagtaggctaagggaaactaaaaaaaattttaaaagcttgcagtgttttatatctcgtaacaaatataaatgacccacatttcacacttaaataatgtatgtaaagtaggacatgagtttatgggcatttttagcatgtttactttgtttttaaatagctctagttaaaatgctaaatatgaagcagtgatttccagatgtaattttttttatgctttaaggagctcacgttgaaggagaggcgcagtaaaagaaaggataaacacttatagattttttttgtcatttgtgttttaaattttattgtggtataaatgtagatagcaaagtacacaatacttaaatgtataacttgatgggtttttacaaatgtgtataatgtatatatagtaatcacacagattaatatacagaatatttcagtacctcagaagtttccttaatacccctttttttgtcacttgcactcgtgcaagaggtaatcactattctgacttctgttatatattggtttgtctgttttcaaagtgcatatacatgaaatcatacagtactgtcttgtgtctggcttctttcactcctcattatgtctataagattcctctatattgtttttttgtagcagttgttaattttttctttgtagtattctatgatataaataaagcataatttatatatctatttgcctgttgatagagatttgttatttataattttttactattatgactacagctgtcaaaaacattcttatacttgtcttttggtgaatatgtgcactcattttctcggattgtaaggttttgtagtttataaaagttcaaaacattttaattgaaatagccagaatgccaagactgcctcataagcaattttcaagtctaagtgaatattacctctctgattttatagtagaagctggggaaaattccagtgactttacagccactttagggtcgtatcatatgcctcttctatgatgcaagagttatgggtattatacattcagggattcagtaaatagcaaggtgccatgctaggtgctagagatacctctgtaaaagacagtcatacaccctgctttcaccaatgaacaaacaagtcatttgacataatgtacagagtgcaatgataagagaaatgagaactagcagaggagtacttagaatgaagcatctcacctaaatctgggtagtaatgggagacatcttgtaggaaatgacatctaaactgcatccgaaatactgaattggaattagccaggtgaaagaggtgtggtgaggctggtgacatgagctgggcattgagagattttaggcactttttaaggcttgtagacttgagaaattgaaagtagctgggtgagcagagggaaccattgaagattatctttttattatagaacacctcaaaaagaatagaatgaatcctcgtatacacatcccagtttcagcagttaccaactcatggccaatcttattaagaccacgtccactatccgtagtggattattttgaagcagatttgagatatatcatatcatatcattgaagatttatggcaggagagtgacatgatcagttttgtatttaagaaattacacatacctggtaattctaaattacctttaaaatgcccacaccatagtttagttgtttttcatttgctgccatttatacatagacagttacctttctgcatgtactatttgtagtagtttgcactttttcaaactatagtgttttggaagtatgattaaatgttaaaattgttttatgtattcatctttccatgtgtatcggttggtttatttgcattttaaaatactattaatgaatattttggtttctatctataaaatgtcataatcaatataaaagtcagtttgtttctaggattcagcctccataatagcaaagatactagtatttggaaagaaattagatttatagttctactatgaatcttttttacagattcaagttgaggaattgttttgtggcttgagttttgttactatctgtgtatgaaaatttggttttttgtttgtttgtttacttagtgtttgttggtaagaattaatattgactggctgggcacggtggcttgcacctgtaatcccggtattttgggaggccaaggcaggcagatcacttgaggtcaggagtttgagaccagtctggccaacgtggtgaaacccccatctccgtaaaaatacaaaaattagtcggatgtgatggcgtgtgcctgtaatcccagctactcggaggctgaggcacgagaatcgcttgaacctgggaggtggaggttgcagtgagctgagatcgtgccactgcactgcagtctgggtgacagagtgagaccctgtctcaaaaaatatatatatacatatagatagatatattgctttttaaaaaatttatttttttcagattatgaaaaacatttgtattaaatatgaccaacagtactagttttgaataaaatgttttacacagataagtttaaaaaaatagtatgaccccaatccaaaagaaggacggtgacacaaacaggcaaagtatgcaagcaatataacaggcagggaaaattcaacttcactagtcatcaaagaaagtaaaattttagacctattaagctggcaaaaaaaaccaactgaaattccaccaccaacattagtaaagttgtagtaaaactaatctgctgattcactgctaaagatgatctaaattggtgcagcccttgtgcaaagcatcatggcgatacacgtcaaaattcatgagcatggtaatttctgtagaccagaaatctcactcttaagtaagccccatatcaagaataaaattcaaccaaagaattacttcatgcttaaaaatgcttattgccgagttatcggcaagcaatcaaatgcccagctctatgtgaattatttatgatataaaagaacttgatcaaatgaatatacagccatgaaatgtaaaatatttaagtacaaaatacaaattgtcgtatgcacaccaactaaaatttctgaaaatatgtaagcacaggaaagggaacaatacaataaagaaaaaagttatgattcaaatgaagaaatgtttaattatttgatactgatacagtattttttaacttaaaatgagacagatccttatgtgccttttgaggtttccctttaagccacatgcctgtattatctattgaaagaattattttttagaaataaaaataaaaaaagaataatttggccgggtgtggtgggtggctcacacctgtaatcccagcactttgggaggccgaggcaggcagatcacgaggtcaggagattgagaccatcctggctaacacggtgaaaccccgtctctactaaaaatacaaaaaattagccgggcgtggtggcaggcgcctgtagtcccagctacttgggaggctgaggcagtagaatggcgtgaacccgggaggcggagcttgcagtgagccgagatggtgccactgcactccagcctgggcgtcagagtgagactccatctcaaaaaaaaaaaaaaaaatttaagaactgtatgcatagggacaagccataagctgcaccaactggatcctagatcctctttcgccaagggcagcccattcttggttcttagattccttttattttaaaactatagctgtctatgagccactaagttaaaaataccttcctgtaagtcgagtgtttcttagagcattttagtttaattcctttttttgaagaaaatttagtagatggtaactattggagtactttgggatagcactgtatttattcatgcattcattttgtgagaatcagtgattttaatctaagaggtttgcaaacttcggctgctgataatggttcttacattcttaaaggaatgttaaatgaagacgaattcgcaacagaaaccatatatggcctgcaaatgtaaaatatttactatctgggcctttatagaaaaatttttcaagtgcttgtctaaatgaatataacataaatccttggcatatgctttttttcttttgaaaatctttctgtaagatttgttttagaatgatatttgaaaattaaaattttccttctatagagaagatggcgaattagaagatggtgaaatagacgatgcaggatttgaagaaatacaagaaaaagaagcaaaagagaatgaaaagcagaaaagtgagaaagcctacagaaaatcaagaaaaaaacataagaaagagagagagaagaaaaaatccaaaaggagaaaacgtgagaaacataagcataattccccatctagtgatgatagttcggactacagccttgattcagatgttgaacatacagaaagttcccataaaaaaagaactggtttctacagggattatgacattccatttactcaggtattgccatttttttgttttgtgataaaacatagatagc

SEQ ID NO: 3055 - DNA, 1452 bp, Homo sapiens
gctgcttcctgggaggtggtgctcgcaaacctggcagctgactgggtggggcgtgccttccctggcagtcgcggaggggaaggctgagggacccggtccccgccccgcgtgctcaggctgaacagcttttcttccctgatctctcggaggcgccggctgctggccaacgcagggcagcctcctgcgtgcgtgctgtgggtttctccttcagtttcctctcattgcctgaggttgggcccgaacacggcggtacatttccttgagagtcttctacattcatgctgtagaagctatgaaagtcgtgggaaactatagagtcaacactgcaaactcaagcactgatacgtccggagagcacttgacctgccttagaaggtatgatattgtgattatacacattagattttattcatggtttctgcctcataactcccatagcccttgttataatgttggggtgctttaggcctcagaagttggcttcagaaaatagaatctctctctctgaccttcttctgcttgcctttcacctgcttctttttctcccccaggcaggcttttcaaactaaaaatatactctatcccttacctttctgtctaggagctgatcttaaagaaattctttgacttatcttgtctgattgtgggtcataagaccctcatttcagaaggggtcctgctccatacctgaaggaaggaatgtatacagagaggccatgaagaatctgaacagaaaaggcctgctgagtttgtccattcagtctattagtattagattatgcactttttgtccagttacatttctatacagttgtcaattatcgctgtccagtgaagtgtctgtaaaaggatcaagagaacagggtttggagaacttccaggtaattgaacacatggaagttcctggagggtgctgcacccaagaaggcatagaggttctgtgcccctttctccataccttgtcctgtgcatatcttctatgtggtgtatatgggtatcctttgcaatattctttataataaactggtcaacataagttaaatgttcccctgagttctgtgagccactttagcaaattagtggactctgaggaggaagtcagaagcacatgtaaagcaacctggagcttgcaattggcatctgaaaggaggggacagtcttgggaactgagccttcaacttgtagaatctgacactatttccaggtagacagtgtcagaattgaactgaattagaggacacctagctgatgtctgcacagaattgctttcttgcttgtttggtgtctggggacaaacaaacaccacacatttggtcacataattctgtgtttgttggtgtgacagaagaggaaggtcagtttgtgttttttccactcagggaaggtgaagctccttctcagctccagcccattgcagttgtggaaaaactacctcagttgccagatcttccc

SEQ ID NO: 3056 - DNA, 3080 bp, Homo sapiens
gtccctgttttctggttgcctaggtagcacctctaagccttgtcgggtggcttctttacaaacacttttatggcttggtcagggtctgggtgctgttcataccccagtttcagtccctggtgcatttttttttaattatttatttatttatttttgagctggagtcttgctctgtcacccaggctggagtactgtggcgtgatctctgctcactgcaacctccaccttctggattcaagcgattctcctgtctcagcctcctgagcagctgggattacaggtgcatgccaccaagcccggctaatttttgtattttagtgaagacagggtttcgtcacgttggccaggctggtctcaaactcctgacctcaggtgatcctctggtgcatgttttaatggggccaaaaggagatgacacaagggcaaggggaaccataggcatctgtgcaactcctgagttgcatgaaaaggaagacaagttgacggagtcctgctctgtcgcccaggctggagtgcaattgcacgatctcagctcactgtgacctctgcctcctgtgttcaagtgaatctcctgcctcagcctctccagcagctgggattacaggtgcccccccaccacacctggctagtatttttgtatttttagtagaagcagggtttcaccatgttggccaggctggtctcgaactcctgacctcaagtgatccacccgcctcagcctcccaaagcgctgggattacaggcatgagccaccgcgctcggcattatatgtattttctaatgcttctacaaaagcctggtattggtattgagcaggcaaagaagaaccaaggctctcacacatgctgtcccatccagatagaacagtcattctctgagtctttgcttgtctgactcctactcatccttcagactccagcgtaaatatcccatcctgagggcagctttccctgaccgtctggcctagccatggctccaatctcagatggaaatgcagaaatcacccgtcttctgcgtcgctcacgctgggagctgtagaccggagctgttcctattcggccatcttggctcctccagctgttttgtgtttttattcttgctgacccagtcctttttcagactccaccatttttatttgtttgtttgtttatttatttatttatgacagggtctctggctctgttgcccaggctggactgtaatggtataatctcggttcactgcaacctccacctcccaggctcaagcaattcccctgcgtcagcctcctaagtagctgggaccacaggcacacgccacagcacccagctaatttttgtattttttagtagacacagggtttcaccatgttgcccaggctggtcttgaactcctaagctcaagtgatccgccgacctcagcctcccaaaatgctaagcttacaggcgcgtgagccactgcgcccggcctccttccccatgtaatgtctgtctctattactgttttgttcactgctctgtccctggcaactggcagagtgcttgcagcatggctggggctaaataaatgtgtataaactaaaataataaatgaaaaaagaataaacgttgaaaaatagaaaaagcaaatcactgcttgtattagtttcttgttgctgctctaacaaatttgtaaacaaagctaccacaaatgtagtggcttaaagcagcacagactgatcttcttacggttctggaggtcagaagtctgaagtcattttctctgggctacagtcagtccctgtgtcttttcctgctcctggcagctgcctgccttccttggctcatgtcctcttcctccgtcttcaaacccagcagtggagcctcttcggcctccccatcaaggggctagaagctttgatgtctggctgcttccagggttcaccctttttctattttagttttattctactagaatataaactgcagtgggcaggcccttttccgctctgctcactgttgagtcccatgcactcagaactgtgcttggtccatggtaggcactcagtcaatatttgttcaatgctaaatgaagaaactagcttttgtcatgcttcatttacttacccttatgtaggtgaaataaccctaatttctatctggcggtgcacacaattctaaagctgacaccacagctctgaaaagcacatgatcaaggtacaggccaatcccctggccacagcaagtggccagaagtgggcatgggcctaaacgagtctaatcagagtaaagcccaaacaaatgtttttttttttcttctggacacatctgagggaatggaaggagaaagccatggctacagaggcagaacagaggcgcaggaagaaagaagccattggtttcactacggaagcactgcaagaagcttcagctgcaggaagacccatatctggagttttcaatgatgtgagaacaaactatttccttcattattcacatcaagttcgggctgcctggagtgaaacacattctaaagccagtaggtagcatcacaagtgcaaaatgaaaaaggcacccacagaactgggacaaattttgtttcattgcactgagactagaagggacgagacagctcatgtggtctgtgttcctgccttcaaggaggagtagaatcaagaaatggaagaagccttggggctttcaggtcacccacgcctgtgtctgacccttggctgtacaccagatcacctggggaactttgtaaaaacagcttcctccaccccattccattgcgttgagccaaaatctctaggggtgaggctcattatctgtttcacaaactccaagtgattctgagggaccatcccttaacaactgtgaactttcctttggtagaaggaagcagcatagcagatcctaatgctaatgccgacatcaaattcaaagcactgaatgtgtgtatcatggtcttagaagtatgtataactcatttctgaatcactttattgaagacccaaattaattaaatacttagactatgcatgagagtctgaaggcctttctcctgtgtgtaaaaggaatctgtttcactgctaattgctttttgttttttccttcctgttt

SEQ ID NO: 3057 - DNA, 1351 bp, Homo sapiens
aggtaacaccatgtttggtaaataagtgttttggtgttgtgcaagggtctggtttcagcctgaagccatctcagagctgtctgggtctctggagactggagggacaacctagtctagagcccatttgcatgagaccaaggatcctcctgcaagagacaccatcctgagggaagagggcttctgaaccagcttgacccaataagaaattcttgggtgccgacgcggaagcagattcagagcctagagccgtgcctgcgtccgtagtttccttctagcttcttttgatttcaaatcaagacttacagggagagggagcgataaacacaaactctgcaagatgccacaaggtcctcctttgacatccccaacaaagaggactggagatgtctgaggctcattctgccctcgagcccaccgggaacgaaagagaagctctatctcccctccaggagcccagctatgaactccttctccacaatacccccaggagaagattccaaagatgtagccgccccacacagacagccactcacctcttcagaacgaattgacaaacaaattcggtacatcctcgacggcatctcagccctgagaaaggagacatgtaacaagagtaacatgtgtgaaagcagcaaagaggcactggcagaaaacaacctgaaccttccaaagatggctgaaaaagatggatgcttccaatctggattcaatgaggtaccaacttgtcgcactcacttttcactattccttaggcaaaacttctccctcttgcatgcagtgcctgtatacatatagatccaggcagcaacaaaaagtgggtaaatgtaaagaatgttatgtaaatttcatgaggaggccaacttcaagcttttttaaaggcagtttattcttggacaggtatggccagagatggtgccactgtggtgagattttaacaactgtcaaatgtttaaaactcccacaggtttaattagttcatcctgggaaaggtactctcagggccttttccctctctggctgcccctggcagggtccaggtctgccctccctccctgcccagctcattctccacagtgagataacctgcactgtcttctgattattttataaaaggaggttccagcccagcattaacaagggcaagagtgcaggaagaacatcaagggggacaatcagagaaggatccccattgccacattctagcatctgttgggctttggataaaactaattacatggggcctctgattgtccagttatttaaaatggtgctgtccaatgtcccaaaacatgctgcctaagaggtacttgaagttctctagaggagcagagggaaaagatgtcgaactgtg

SEQ ID NO: 3058 - DNA, 12937 bp, Homo sapiens
cactggcttcttagcagtagctttgctgggagctgcggtattccaacagcccctagtgtcggctgggatgatgtgacttgggggttaaatgcagtttgcagtttcaaaaaagaaaagcatgatttgttgaaagaggctcctgaagaagaacatctgcgaagaagtctatctcccatatggcttttaggacactttgcagtatgctcagatcaagcaatatggacctgaaaaggaaaagaaaaaaaaaagaaagcaaccagtctccttcatatgaaaatctctgtggcattctgggtaactgcaatacaaagaatagtgtgatggtttggctttcaaagatactgttagtggcatttctacaggttgttttgattgtctgtgaatgctgagaggttttttttggtgtaaatgtttattgcttttttctaaatataaaataagtctatgttcactgaagaaaatttggtaagtgcaggagagtacatggaagacaatgtacaataaccccgtttggttttccaaattgttttatatccttattttgttcagtgtcaccacattttttttttttttaatgagatagagtcttgctctgtcgcccaggctggagtacagttgtgcaatctgggatcactgcagcctccacctcccgggttcaagcaattcttctgcctcagcctcccgtgtagctgggattacaggcacctgccaccgcgcccagctaatttttgtacttttagtagagatgggatttcactatgttggccaggctggtcttgaactcctgacctcgtgatccaccctcctcggcctcccaaagtgttgggattacaggcgtgagccaccacgcccggctgaaaacatggtttgtaatggctccataatttataataatagtaccatgtgcctgttttcttataagatatttagggtatttctatttttaatggaaatattgttataaataatgtgataactgtgaatatgtatatttgactatattccttattacttcatttggatagatattccaaaactggcattactaggtcagaaattatgaatctgttttaataaccttgctacatacttttgtattggtttataaagtctctgctatatgttactaccaccactatatgtggagtgtatgtgaatttcatcctcaaattcttcaatattctagtagttggtagttttttttacatctttgccatttcaacacatataaaataataaaattaatatcaatatgttcctaattattaaaacaatgtatttttccccttgtatgtagtccattaatgctgaagtttagtggcttggtttaataacctttccccaaacccatattctgtataacagaaatttctttggaaaaatttcagaatatacatctctttgtagtaacctgggaaataatttttctcttaggacatttgcatactgcatggaaatctggccagaacttgaacagatggttccaaaacttggggtaccttaaacttaaacatcagtgtaacttggggtcctctgcaaggtcatccgcaaggactgtgaaagtcctgcttcttggtatcatttcctgacaggtgtgtgttaatgtttcaggaatatactggagtgtactgcttttttattcctgattctgctcacaaacttgtcatttatttgaccactgactgttgagattaggatgctctcaataaggcatatttggatcatgtttatctcaaaactgcttctactagaggcttttgtggcttgctttcacatatcagggttactgctaatgtgtccctaatactttgttgagaaggtgaaagtggtagttgaagtcactttaaagtcagtcctaggaatgcctctcaaattctccctggttttctattttctaagttaccatttattgagcacctcttgcatgccatgcacatttcacacttgatctcgcttaagcattattacaatccaatagagtttggataacgatgcattttcacagacaaaagtaacctcagagagattaagtcatttgcctggagacatagagattataaataatggttgataaatacacagaggctcaagattcctgtttggtaattacagaggctgtagaaatagacatgtcaagggctctcaactactgagtctccaaaagtcaactgggaatcttttaattatttacatccaggaaaaatcttttacctattccctgaataaaatataacatgttttaaggtcattttccaaactttcttgctttaggttaatcattagtgagagaccccaacatttctcagattgtgtgcaaaccctgaaatgatagcagaaatttacacagtgaccccagacagttagatttatcctgtagcttgggttgagcaccttaaatttatatccatatatgtcttgcaaattcttttgctttgtggcttagtagcaaggcatttaccctctggacagtgcagtcaggtgtgcccataaaaacaggagttgatcatttatgaaagctgactgtggaataagctaaaggtgctttgaggacatgcttttagtgtccactcttagaaacctgtatttcaacttccctggagctcaggattttaaagatcaagcttcctagcctcttcagcctctgcaagttcagataacctgttgctatttttgaatataaataggccttattagggattaaaagaactgcccagaggtttttccccttttctcattttggtgtttggattgtcagcggaagtcttgagctttgagacttggcaaggcagcgccttcaaacaaacatcctgtggacaaaattgtctggcccagcactcggtgttccaggatgattgacaggaagcagcatgtgctgggaggagggaggatggacactctgagcacggtggcttccagttccctcaaacaatagccaagctcccagggagcctcacaccttctttttcccatctactggggtggtgggggttagggaggatgtgggctgggcaggaggtgagaggaaccttggaattccacccagcaattacaaataaccaaccaaaacctttcgataatgcttcaacttgagggataggaagatacagctatgcagagatctgggatgatgcttgaatcaagcagtgagccaaaaggagccatccaaagctaaagccaacactggtcaccttgtggaatggggcttgatgaagtgagcagaagtgaggagagatctggaagggtgaaaagaagtgaaatgaaactcacacgtaaaagaaaatgaacatttaaaagaaatccagctatatgccaggattttgcatatgtgtttgcttttggtcctgttgcaggtatttgaggcaggtattatatgaattctttcagatgaaactgaggctcagagaagctaaataaaattatccaatgtgacaaacttagaccatggcacaactagtatttgagttccagtcctttggaccctcaaaacccatgcattttcctctattacatttcctctctaaacttgtctaaatcctaccctcttctttctctgcttcagtcctggtggggaatatatagaagagaacttatcaccctagctcagtctcctacaacttccaatttatatcttccattcctgtcttcccaaacctttcaccattgtctgaatcatcaggtatttccatatctctgggtctttatcatgttgtcttctctgctacaatgactttctcttcattcaccctaatacaatctaccatgcacccttcaaagtacagttcaaatgccaacttcttcaaacagctcgtgtatcttactgtctctcactctcccaaggaggatcagtaccttcctgacacagtagtcttacagtaatttgtgtctatctctgttataattatcacatgttacttggaatctgaatatccctagttattactaaatcatgaacaacaataactgaaatcaccataaaatctagacctatcttttggtgacttgattgtggcccatttgggcaagtgttaggcttcaatcctaacattgatagaaggagatctatccctctatctctgagagtccccaattgattccttacgatactttatgaattaatataagaagaaagggtgggcagagacattggaggaacagtggaaaagtgaatctctgtctaattccttccttccttccttccttccttccttccttccttccttccttccttccttcctcccttccttccttctttccttccttccttctatagttactaagtatcacctaagagttttgtgctagggtagatgctgaggacacaatggtgagcagaacccacacttcttctgctgctgtggagttagggtccattgaggaagacaaacattacaaatacaactcacaaaatatacaatcgtgaattgtactagatgctatttaaaaaaatgacaaaggggctacatgaacctaattctgatggacttgacctagtctcaggaacaggtaggtggtggttgacagtttaaagtgaactttcaggaaaaggagttaaatcgatctgaaaagtgatcaggttgccactaaatctttaaaggcaagaggtgttgctcttgttcatagaagacaaggtacagagggagtgcctcttccatcaggaggaggagagataacagtctcataagagaatgctctgtttttggcactgccaagattcggctcctatgatgaaatctcagaatagaaaaattagaaaagggcacacctcctattctcagaatggaaagaatagcaaggtgcccacttcatattctttcatgctcagtcagaaaaacagtagaacattgaaagttgatgatgaaattcatgaatttttttttcaagttgcattccccctaaaacctcctacggctatataaggtcagcttttgtgatagatatatatgtatgtacacacacatatacgttatatatcattgtctgtttattaaacctcttcccttcaatttgcagcaagactaattgttttttgttttatatattcttaggattgttgataatggagggaaaatgagggatgggaatggaggtggtggaggtgatcaaatggcccactcagaattatcctatgcatcaaaatacttagggataattcacggactgtagcctttcacatgaacatcccatatggggccttctctggctgtgtgagccttgcagagaacttatgatttggagaggcccagtggctagcatgccagaggcagacgctggagcagagatgacactcccaagacactacacgccaacctgctgtttatccacattctctgggaagtcatggagatatgattcaaccatatgttcatacacaacgtgaaaccttcatgagacataggctgcttgccaggtgcctatctcccttccttcttcttttctattcttcctctgaagtactgattttggcgaatcatagagaccaaattggggaagttatattgtattttctttagtatttgaaatggttgtgatacatctagatttgtaaaagtttacattctcaatacttctgtttagagaacaaaatcaaatttccataatttggcattaaaaacttcatacacctcccagcattatctactctgactccttgtctgaggcaatctagtctccttgatcttggaacactcctactctctttgttcctgctgttacgtcgaccagcgctgaccaacacccacatataccgcattctctacctacctccggtctatcctcttaaaaggccctacctggttcccagtgcctcccccttagcacttccagcttacctggcaacttgtcctgtgcaggtttctgaaaaagcttgctttgctgttattgtattgttgtggaactcaggttattattttatttttccacttcagattctccactgtctcctggtctccgtaagagctgggaccttttcttttatatttttatctccttggctgcttgaaacactgtgtaatctgagcaaatcatatgtctttaataaatcacttgtttatttattgaagagatcattttcttcacttaaactaccagaagaggggtcaaggaggagagaactgatatctattgacaagatatcataataaggcacagggataagattttttagatataatcttatttaatgtattcccagacatggtaaattaattatttttatatccattttacagatacagacatttcactcagaagttttgtgctatttgcctgggagcatacagaatatgtgtcaaagcttggttatcttttttccccacaaaaatgtattcattgaaatagccatgaaataaatgttcactggagtgcatgtgtcaggtagtagagaaacaatgatgagccaaaatctacccagggcttgctttcatggtagtcaggtgagtgggaaaatatctgcaaaccaaacaaccacctaaataaatgtgaagctgcaaatgtgaaaagtgctaggacacagagatccatctattaagagagtatataataatagggtatttgacctgttcagggaaggaaggaaacatttccttattgaagtcatacttgagctggatatgtaggctgagtaagagtttattaagtgaaaggcaaaaggtcatattcggagagaggcccacaagtgcaaaggccctgtggtaggaaaaagcatggcaactaaggaagactgaaagattccagggtggctggagtgtgtgtgcctgggtgtgattgtgtgtgtgtgtgagagagagagataaggtgtgaggctagaaatataaggctttctggttgtttctccatttatcttaaaaacaggcatgatggctcacaactgtaatcttagcactttgggaggccaaggcaggcagataacttgacttcaggagtttgagaccaggctgggcaatatggcaaaaccctatctccacaaaaaatttttaaaaaattagccaggtgtggtggtgcacacgtgtagtcccagctactttggaggctgaggtgggaggattgcatgagcctgggaggttgaggctggagtgggccgtgattgcaccactgcactccagcctaggcaacaaagtaagactctgtttctaaataaataaataaataatacagtgaatccattcaagagattgcagtctatgaatgacatgatgattttaatgcagacagcagatggaagtgaggcaagagtggaagagggtaagccaagcaggaggctatcgtagcagtcatggtgatcaacaaaaatagctggactagtaaataaaggaagagtggtgggagtgtaatgaagaaaaagggatggattggaaagtagtttaggttgtccaattgaaaggagtttttcatagattggatatacagatgaggaagaaaaggtgacagagatgacactagaatttttgcctgcaaagcttgctgaagtgtaggactattctttatataggaaactgtgaaaggcaatcagatttgaggtggaagtttataacagatttagatgcattgcaaggtatattttagaccttgaaatgggatgctaatttggatatgcatgtctgaagtttaaatgagaggtctgtcctgaagataggaatttatgactctatgtagaggtagttttgaaagtcatgaacatgcatgaggtggctggaggagaactgatccatgggggagtgatgctgaatcaggaactcctggaggcatcgaggacacaatgttaatgatactcagtccctggattgaaagtacttgccacttagtgggctgaactttgatttatcagattccaaagcccacagtgttttagtgacatcatcctttgagaaagcaaaggctaaactgagtaggagtcaatgctgtagttcttgacctttaattttttttttttttcatttttagctttgtggtttcctgccactgttttggcatgcttgttgttgagattgagaaatagtagtgtatattatatttggcaattatgcttataatctgaaagtgtttgtgtaagcttaggaggtgtaaactttttacttcgcaaacagggaaacagagatccaggcagggccaggggtgttttgggtgagatcaccaaaggcccagaaataaagagtagaatccatgacatctcaactccagaagtactttccgtgcctctgaaacatgatgcttcacttacttaggttttgattttttttttttttcacaagactagttagaaaaagaagttggtattgctgtcccagatggactcctgatctgtccaggtgctctagatcctgaccatcctactaatcattagtaccagaaacatcaggatcaatcatcacatttgcaaactaaaaacagtgaaggtggaaattgcaaatcacttccaatccaatagcatgccgtccatggtaatagaaatgaaccacgacaggactggtttacagtagttgagaagacaaattttcagaagcaaatattggcctaaagaaacttccaggaattaggggttctccaaaataatttgtattcaagggtgatatgatttttaaaagttatttgtttgaacaaggagcatttccatttggaaaaaatattcaaacaacacaggaagtacccagtgaaaagaagcctccattacagcactgctccccagagccgggtctccttcctctgaggcaacaactgttactagtatttttgcttatttatctagagatactctatgtatatctcccttttataaacaaatggcagcttgtgatgcatggtgctttttgccttgttttttctgtaggacataattccatacctgtatatacagatctgccttgctctctttggtggcttcagaatacttcattgcaagtgtcccctaactttttgaaccagtcttctaccaatggatatttaggttgtttctaatcttcagcaattaaaacagtgatgaaaggaatatccttttatcatctttacatatgtaagtatatctataggagaaatttctagatgtgtgattgatgggtgaaagggcatatatgtattcacaactttgatagagattagaaatattcctttaaagatgttgaattaatttttactcccataaaacatatatgagagtgcttgtttctcccaaccacttgtcaaattatcatttggtcctttccctaaaatgggaaatgcctttaatgatttttaagctatctgttttgccccaacttcttgcttgctcaggaatcagaaggtttctagattctgctcttatggctactcagagagatttaagaatatcttagttctctctttggcaactgacctaacttttatgcaacaaagaagggagaagagagttaacattcattggatggtctcaaatgtttggtattcatttagctaatacttgttgaacacctactctgtgggctctgttttaggttctaggcatttatcagagaacaatgcggacatagactcctgacctctaggaccttacattctagcaggggaatgagacattaaaaaatatgataaacactcaaattagaaggtggtaaatgtggaaatacaaaaaaagtagaataatataatggagattagaagaacaagaggcaaataaatttaggggattaggtaggatggccagggtgatcctcattgagaaggtaatacttgattaaggacttgatggtgttgggaagtcagccaagagatagctgagagaagagccttccatgcagagattataggcagaatgaaagctcgaaggtgagtgtgtgcttgaggcttccagtgtgactggtgtgagtgggagtgagggagggagagagagaaagggagaaaaggagatagagatttgataaagccttacagggcattcattcagtgaggctgaaatgcagcagtactgcaaggttttgagcacaataaagacaatgatctgatacatgtttcaaaaagtaaagacttttcttttttgagacagagtctcactctgttgtctaggctggagtatagtggcatgatctcagctcactgcatcctctgcctctcgggttcaaggaattctcctgcctcatcctccacgtagctgggattacaggtgtgtgcaaccacgtctggctactttttgtatttttagtagagatggggttttggcatgttggccaagctggtctcgaacttctgaccttaggtgatccacctgcctccgcctcccaaagtgctggggttacaggcgtgagccaccactcctggcctcacaaagtatgactttgaatgctgtgttgaataataaatatgacaagattccctgaggggttgcgcataagatgtcagaggaaaagagaagttaagaacaactccaaatttctcaaagaacttaaaacagaattcccatttgacccagcaatcccattgctgggtatatatccaaaggaaaataaatcattctgccaaaaagatgcatgtacacttatattcactgaagcactgttcacaatagtaaagacataaaatcaactttggtgtccattaacagtggattggataaagaaaatgtggtatgtatacagtgtgggatactatgcaacaataaaaaagaatgagatcatgtcccttgcagcaatatggatgcagctggaggccattatcctaagtgaattaacacaggaacagaaaaccaaatacttcatcttgtcacttataggtgggagctacacgttggcacacatggaaacaaagaggggaacaatagatattggggccgacttgagggtggagggagggaggaggacaaaggctgaaaaactacctattgggtactatgcttactatgtaggtgaaagagtatttatatcccaaacctcagtgtcatgcaatctactcatgtaacaaacctgcatatgcaccctctgaatccaaaataaaagttgaaattatttttacataagaatgactccaagatttttgtcatgagttaccatcaactgatatggtaaagctcacagatatagcacaattttgggaggaggctagaagttcacttttaatcatattgtattggaaacatctattagatatccaagtggaatgtcaaataggaagatagataaatgagcctggagagagggagggagagagagatctgaagaaggaagaaaagcaagagagttacatattatatctcatttaattctcatggtaacaggtgatgctatcttcagtttacaaatagagaagcaagctcagagtggcttgctctgacttatctgcattcaaagcccatcatcagcctccagaagttcatggcatcaatttttctgccatacaggttctatgttccaggatttgttcaaggttccttgtcataaagaacttgggagaatcccttgaacccaggaggcagaggttgcagttagccaagactgcaccattgcactccaacctgagtgacagagtgagactctgtctcaaaaaaataaaaaataaaaaaaaaaataacttgagacctgctggttacacgtggggatgcaatagatgtaggtgagaacatggacagagtgcgtgctatggatacaaaaccccaaggtctgtggaccaccctgagatgacagtcccttgtgcagaaggcactttgtgcagaaggagtaatctggggtaccacagtttaccctagtgcaagcctatttcatagtacctagttttttcttccagctgtgttctgttggcctcactaatgtcataataaaagaagctctctgtttatttctgatatctcaagatgctttatcaacaatgtggttacgttgttggtcatcccatagataaactcagatccctctactttccaagtgtgagaagattttgttctacagtcgcttctgtgagatcaccacagccctggcaaaccaagagggaggaaccttgtgcctttgaagtgtgattcacagtgcttgataaagtgccagtattctctaaattttaggttcacagcaaattggatggaagttacagaaattcttctatttttaattttaaactaacatacgacaaaaggatttcctgatttatccaccatttcaaaaaaaggtccgaagaaaatgaaggagcctcttcctgtactcatggtacataaggtaacagaaaccacagaaatcaaaaccgtggataagaggagactacagaaagatttctccttctggagtacatgaatcaaattgcattgaatcaaaagttttgtgaagatttgagatgagaatgagagccaaataagccatatcataagaagctgtgatcagaaataaaatgaggacaatgcttactgtggctttcaaggcaggagaaagcacacccgagggggtcgtgtcccacactaggcagatctaatggtgccacaaaagacaggtgttttgtcagatttcagccacacactttcacacctgcaacgcattaactaccgcagcaatgttaatgaagaccaggtgcctgttctccagcataaatgaggaactggcaggagatttgctgtttgctacctgacgtctacccctgagtctctgaaccccgtccttctggttgaaggggaaggcgtgatgactataatgttgaagagctttccagatttggtagtggaagatcccatgtcccctcctttcctcgttgaagatccatagacaagtgtgataagaacacctacactggggtgagccgggtggagggctcgactctccttggtatcttcctgggcaacatcaactttaaaatttttaacagtatttgggcataacaattattcttcagacagtcttatttttcctttttaagtgcatttagcatttaggaccataataggcattatcaaacatctgaggatgcattattcaaagtttagaggtcacatatacaatcacac

SEQ ID NO: 3059 - DNA, 1312 bp, Homo sapiens
ctgtggtgacagacaccgtctgtgttatcacttgaagagctgtcctgtgggagaaatgacagcatgacaaacaggctatgtggacttcagcacatcggcacaatgtgcctccagttttttcatctggaaaaacaactggcagtgggtgatgattaaatagaggcccggcatggttaagcggcaagcccagagtcagccatccaacgcagcgcagagctgtgatacaacccacttccactcccacggcatctcggcttcgtgggagttgaggagcgtctcaactgcatgtcaggagaacccatgaaaaggaaagaacccagaacaaatgggtgagaaagttcaagactatgttcagcgtaagagcaaaagcctcctgagaattctgcttgcagcccattcccaggcattacagtgcaaagctaattagggagaatggcatgagtagaagaccaccaagaccaccagctgaaacgggtgttctcatggcctccagtgggctcgactatttttatatttttaatattttggtccaatcactactctatacaacttagctgtcttaaaacaataaagccaaaacaaaaataaaacaataacccaggcctcccagatgttggcttcagtctgtgttcacaagttatcttcctaatataacagcatgagtactacttccccatactgttctcatgagatctatggccaggtccaaggtcacatcatagtaaatctttatgaaggttaagaaatttataacatttgcatttgttcacgaatgtcaataatcccaaccggcaggttttacgctcaggtttgaatgacactttgctaaccaagccattaaggtttgtttcaaggagtcgggggaagctccccagcagctctgagcaaatgaggagccagagaaaaacaattaaaaattttttaaaataagatctttgaaagtatattattaattctatcatccaataagtgttttcgaagactatgcaaatgacatcttgcggtataaaagctgttacagaacagaccttccaacatttctcagtctccttctttccttcccacgcatgccctatgtgtggactggcagcaatgtttttacttttaagaggaatttcatcatttgggaaaaatttagagatattaacgaaaaattgctatgtgtctcatggctacctactgattagaagcaattaacttatttctattttgaaaaattaggctagcaaatgaagcctgtgggagaagcatatttaataaatatagaaatattaattgtaggaagtaacaataacaccatgcaaagttgtcc

SEQ ID NO: 3060 - DNA, 4675 bp, Homo sapiens
gaaatacacttcttaacagtaaaatcgaagccaaaacataatttttgtagagacagcatctcattatgttgcccaggttggtttcaaattcttgggctcaagcagtcctcccacctcagcctcccaaagtgttgatattacaggtgtgagccactgagcctggccagttatgtgctacttaataggtacacctaaagcctgtgtactaggttgaaagtaaaatgatggaattaagttataccatggtattatcatgtaaaatagtttaaggcaaatggcattactaagaataaagaagctcactttgtaatgattaaaaagtccagatcaccagcaaagtatactgattctagatttgcatctgcaaaaaaagactccaaaacccatgaagcaaaaattgacacatctacaaggcgaaatatgtaaatccacagtcatgatgagaaattttaacattttatatgcatataaagctgaacacatgactaacaatctagtggatgtgtatagaacccaacaattgcagaatatatattcttttcaagcacacattgaatatttataaaaactgatcatatactgtgccgtaagtttcatctcagcaaatttcaaagttttgatgccatgaatgaaatgaaacctgacatttcaaaattataaacagaatatgccctggagtaacttgtggtattgtttggggatgaggagagccatccgaatagtgttttaaggaaagtctctattcattgatctggggtaacaaggcaggaaccattccaatgcagaagctttggctaagcagttgagcgttcagtagtgcatgtaaattcctgtgtgaatgtcatggctaaaggcatagcctctggaaccagactgtttgggttcaaatctcagttgttgcctaacctctgtgtttcagttccttcatctgtaaagtggtagtattctacctcaaagcattgttggtacattatatggttataatttataaatgtatggtggcaagttctataaaagtagttgtacagcaccacacatgtctgcttgcttttgtagagtacagtagatgaatgtatccggatatatatgtaaataataaattgaaaagtgaaatgccctggcaacaggtttggacacgcatcaaaccatgacagaccatgagttaatgatggttgaacctcgacaataggtacagggagatttgttgtactgttttctctacttttgtaaacacttgaaattttccttattaaaaatttaaaaaaatgttggcctacaaaatccaattaggagctcatgtcagttcacctttgcatctgaccatttagtcgtccaggaggttgtttgcctcatattcacattttagagagcatttgattcatgaaatattttcattcagtcatgttagaaaggatttttcccaactcattcatcattgtgactaaatttcaaggtaacttctatacaaacacaaaggtttgtgactcaggtagagacagggtcaaggcctccagtgtgcaatagcattatttattaacaaatcttttaaagttaaacagtagctaaaatatcttagctgtcatgtttaatgattagtttatgtaacctcacagcactaacctggaagctgaactcatttatttttcttacgcactgtaagcaacagcacctgtggttcaggactgggatctcacatgaggagttaatgaagctcaatcagtaagcagatgtttctaaaaactgtgccgtttcttgatttcacactgtactcaggtgcaggcagccatagacttttttttttttaaacaaaaacataagtgcaatgttggtggtaaagtattgggaattttatagtctaaacgttataactcattttcatcaaagtaaagtacaaggtctgagacaggcttgggtctgaatccaatttgcaccagtcacaagttgtgtggttcttggcaagtttcatacgctgtctgagccacatttttctcatttgtaaaggggagtaatactagtctccagtgaactggtaaatgtttaacaattagctgtcagggttagccaaaatagggtttgctaatttccatagtgtaattattcccaccatggcctctttcaagctaccaacaggacatccctgaacacagaaccagcagagaatggcagcagcagcacacctccaccagggagatacagtaggcctcagtgaccccagaagccaagatgatggtctaggaagcagtgtgtgttatttaggtttatataatttgattttaaataataacggggtataaaaactagctcaccaaattcctgaaaatttaacagttggcccatttgagctgtatacctagttcaagcacattgctttccatctccagctcctggatttcctaaataacactacaatgaacatttatccatgatgcatacccaaatcacaggctgtgcgactggaatgtgactgagtatactgccatgttcttctccagaatggccaggccagcttgccttcctactagcagtgcctgcgggttcccgtgcttccctgatgaggtgcatagatatataataaagtgtaacagcagatgggtgctgccataccacacttgaagcaacagtgaggcctccaacttggaaagtccactgataagcatagtgcctggtaaagtaaaagcagaattagatgtatagtacaatactgtacatttaaatgcatacaaaacaatagacttattcaagaatattcaaattaaaagatgcacatcagatggatttgaatggtggctcatggagggaagtgatttattatatcagtgagccacattcaagcttgtattcctattgtctctaataaatctgtgaaagtttacacgtttatctaatttattttccaggaaaacagaggcctcctactattttacaggtgagaaaattgacggcaggcaagactgagtgacttgtttgagacacacgttgtcttaatatctaaggggcagtcctggagttggacatgcagtctgtgtgaccggcagcccatttcccatgctgtatactgactggacgaccttggcctaatcacctaccccttttgaccttggtccccttatccagctctgaactttgaggaaacttattactagatgagctataaatccagtaatgtcataactgttgccaaatatctgcttctctttctcctcagtatttgttctaagtgagggtaaacatagttggcatcatctgatggtttaggttccctttggtttatttattcacaaggactctgtttctctaatggatgctttggcctggagcgtgtagttcatttagcagtttaaatcctcttcctttttcaccctgcttccccagtcaccattgttctgggcttcattataaaacaaatacttctttccactatattgaccccaaatatttcatcaattcacttgtgttactgaaagccaagtgttgattcaggctgggacaaacaaaggctactttgtgaggctgtgctgcagacaggccagccagattaccttgtgcgggactggttgttttttcaaaaggcagtgtctttttaagcataatatcttagtggcacataattacgccaccgtaacaaatagtctgttgtcattttaatctatatttacttctagtgttgtctgttttttcactgtatttatatagttgtatagctataatttaatattttgtttattcatagatttttccattctgtgaacctttactttatactcaacaagcatttattggttcattcagaaactctttagctaataactacttaactattccactatgagttacttccagtttttatcatcataaataatgtaataaatatctttggacacatacctctcctgatcttttggattattttcttaggataaattcccaaaagtaagatcattagggggagaatttaaatacctcttcgagtgtgtcagtgaacctgtttcctcatgatcctagtcattcataagttataattcacctttttttggtaaatacaggacccctccatgaattggcttttgcctgtctctccctcctaatttcccaacaatcctcaactttctcttctattcctaccaccctccctctgcccccccaaaatagataggtttgttgttgttgttgttggttggttcgttggttttgtgttgttttttttagagacagggactcactctgtagcccaggttggagtgcagtggtgcgatcacacctcattgtaacctcgaacatctggactcaggcgatcctcccacctcagcctcctgaaaaaataggtagttttttacacagagaataccttgttttgaacatgaacttcctgataccataggtgctctactggagcaggacactggataccaaaagtcactatcaaccataatccctttgctcagtgttatgggctgaattatatcttcccccacccccaaattcatctgttaaagccctaacctcctgtgtgatggtatttggagatggggccttgtggaggtacttgggcttagatgaagtcctgagggcggggcccttataatcggattataagaagaaacaccggaagacatgcatgctggctcacatgcatgccctccctctctgctatgtgagcgtgctgcataaagatggc

SEQ ID NO: 3061 - DNA, 918 bp, Homo sapiens
gtcttgagactgcaagtacacctaggaggcagagggtagagggtgtgacctagaactgtccttctctctgcagaatacaggtggctcccagctgcattctgagaactctgtgattgggcaaggccctcccctgccccaccagcccccacccgcctggagacacaccctcccccacaatctttctagacaggtgcttcaggacagaggacaggcatggcttccccttgggcctcctcagtaggcggtctggcctgacccccaacaaagaagcctggaggtcagagaagcaaatgcggagcctgctccctcctaagaagatcccaagaatccaatggctcagtccttggtgatctaagacagcaaagaagtgtgcaaggagggccctgttagctcccactgtcctggtttctcctcctggagtctaatttccttggccctctgagccttttgagtctgggccctggtccaatgctgctgttgtctgaggaatggtttggtgagaacagatgttagaacttgtttgttgattcttgtctggctaataaatcatcaccaactgccttctcctacagggattcaagtcctccaggctccttctgtttctgtctctgactttctctctctcatactgtggaaggcaaggagttgaactgccactgcagtgagggtggaggggcttgaggattgacagacaccaaggccaggaatacagacctctgcaaactattccttctttagctgggatgggttgagtaggcagccagggacataggggtggctataccacctgaggcataaagaaagaggggcagagaggtgagcagttgagggacagccccttcacctcctctgcaaccgccctgccaagtacaggactcgggaggaggaagatgtgtgtgtgagccccttagaggacag

SEQ ID NO: 3062 - DNA, 3810 bp, Homo sapiens
caggcatgagccaccgcgcctggcctcgcctcgccatctcttacctgggctactgctttgcccttaatggatcccttggccctcggtttctcctccgtctggtctagccacagaatgaccttcctaaacaaagatctcatcttgcactcggccagggccaaaccctcatcgttcctcactgcttacatgcaaaagcctgggctctgtagcctccccttcagggtctttcatgcccctggagttctgttggcaagtctccccaaaatgttgtcttctcttgcctgccagggaagcaatatcaaaggagatgtgccagaagcttcctctgacatgcctctggcctcctgggcctcgactccagcctgtactctagggctgcagtcactaggtcctggtggccctttccttggcagcagggtacccagtgaggtgcttgggtctcacttctcttaccacccccagggtctagcccagtgggcaatccagaaatgtgagttgtttgaacggattgaattgtaacgacttgtgggttcttcatatcgaaatttggctgtgatccatccagtacttttgccctcatcctatattactcacagtagaagctggtgttctgtgttataagttctccttttttttccttcatctatgacaatgcaagcagaaacgttcgtgttgcggtaacaagtccgatggggtttctgtatatggggtttctgtacacgtgcttttgccaaccgggaaattaaggtgtgccgcatgaagtcagtcacttcattattggaactttgcctaaaatgaagaaactcatctagtggtgcaatttgacctaagtgttttacccatacagtcaacttcaacttgggtcacacatctcaggagcagtttgcactgttgatctcaggggctctttagtattggttcagagagatctctgtccctcttagagacactccctattgtaggaggttttgaaagaggcattctttttcctcctaatgtgcttgtccccttctgaaagttgatcctttaatcccaaacaagtttataacctatgtctaactggtttttgtgtaaatatagtaaaagaaatagtttccatatttgctttgggatcattggtctgcccatgtcacagccctgggtacattcatttcagtccatatttttggggcactttccctgtgcagagctccgggtgggtcctgtgggatgcagaagcctatagcgtattccctctcattggcagcctctttcccagagtgtctcggacagggatgtaatggagctattttaccagtcagagtagaagggatgaacaataataccatgtgcccaaatccagctggatttgaacccagatctagttgacttcagtgcctgtattcataaccgctgctttagccagtgcagcccaaactttaataggaatcacctgcagtcttgttactgcagcgtctgattcagtaggtctgcactggacttagagattcaacaaacaggatccaggtgatgctaattcctgtctgaggacctgctttgagccgccttaggttaattctttgccacgtgcctgagatggaagcaaccagctggggtgcgggactcgaagggggcttccgaggaggagaaggagtctttcaaggctcctctgttcctctaggcttttcatgccaccccttcccgctctctacctacaccattctctcccgtttgtcttattttccactctgctcttctcctggcttctccttgtgttgaaaacatcctcaggtttcatccattctaaataaagctccccttgacctcaagcgatcacttctttctttcctgcccactcactcctcagcactgatcaggagctcttctgtcttctcctcttggacacctttcaagacctcctggttactttgatgtccccgcagcctccctgggatggaacccctctccgtgagaatcccatctcaggtctagtgagggtgatggggctctgacctccatactcagcatccacaccctgctgtgatcttgaggtctcctggcggccttattttaaaaatcattttctgtctctttgcttgctcagctttccttcttaaggtccatttaagattttttaaaaaatcctggtgttcctctttataaggtgaattgttcaacatgtccatttcaggtggaatgcattcatttggcttttagaactgattttctgtttgtaagtagaaattaactcccaattagctgtgtgagaatttgtatcctctgtatctgctatcaatagaaaagaacaattcggttctgggcgaagacccaaagggctttttattaataatgcacctacgatttgtgaactgtgtttaggttcatcagaggcctctcgtttctttctggactttcaattacgttctgagcatggaaagttggcaaataacttaggcttggatggatagatacagtcattgaatagaaaaaccatattgatatttttaggtttttaagatctcacatactttaaatatttcaaaattttaagtaaatactctttcatacattctgaaacattatatctaatttatctcagccaaaaatttaagacatatacatgttgcagttgcacacctgttactccaaaacaaacaaaccgctccagccaaaacccaaatgggaaagcacttgattttcagtagcttaaaatatgttgaattaagaggtaggttatgaaagtgaaaatgacatctgaatgttttagtggttttggatataaattttcttaggaattttttgtttgagttaagctgatagtttagtttactgtgtgctatgttggttgcaaaattcagctacatttgtttattttgcaattaattcaatttgtttgcaaatattgcatcagacatctaaaccagctaataactctataggtttgagccaggttagaaaaaaaggcttggctgtaccgttaagaagcagctagctctctaaattgtgctgatagtcttaatttcccccggatgttcattttagccacacacacataaccatttggatttatgatttcatacattttttattggaagtgctgaatattttaaaattctgtgattagataaaattggtcattgtgcttcagaatagggtgactcagcttcatgggatgtactttacccaacacaggattctcccatttgagatggaatttattaatttggatttgtatcaggtcttcactccagaggcatcagagagctttcaggcagccaactattcttaaatatttcaaaaggaagttgcagtgggcacgtggcgtggagaacacagcagagcaaagtgatgtaggggccataacagccaacatgctttgtttccttcattcattcacctacctccccaaaagtccaaagaagtgttttccctgctctcggtgcaggaggaagattttatctggaaattgaaggtgtcaatggccagagaaagaaggaggaacattgattttcatgaataaccagctgtgtgaccttgggtaaattcttaacctctctgagcctcagtggcctcattcattcaaacaagggttggactagaggatttttaagaccccttttacgtattgggattctgtaatccaaaggtttcagagatcgagaataatctgtcttccttggaaaggcaacaccttgtatctggaaggtagtagttcaaggtgggagagcaggaacaaattagaaatgtgttgagaaagaagatcttttttaaaaagtcctctcactgtccttgcttgtttctgttgaaatacacagactgtttctcccttct

SEQ ID NO: 3063 - DNA, 6990 bp, Homo sapiens
gagaattgcttgaacccgggaggtggagtttgcagtgagccaagattgcaccactgcactccagcctggacaacaagagtgaaaccccctctcaaaaaaaaaaaaaaaaaaaaagaaagaaagaaaaaaaagataaaaagagctgaagatcaaagtcatgacttgtttgttgtcccatggctatttttttgttgattaccaacaattggtttaactttattgggtgtcagattctctatctttttaaaaataaaaatcatttccaaaaagtttacctgtatttatacctatcaatcatctagtatcatgttttggactgcaaaggtatggtattttaaatgggtttattcttcacattgtactataattgtctgattatacgtatttctttaaaaataccagactgaattatttgaggaaggcgtccatgttttctttgaactctctgtccctggggtctagtagagagagctttgggatgaattaatgagctcatcgtataagagaacagagactagaggcactgactttgtgtgtgtgtgtgtatttgtataaactaagtggctaacaaatagtgccaacataaactaatataaaagctaacataagagttgagtgtaaaagaaggcattataaggattagaccctcagctagtccttgacagatggagaattggatctatggatagaatatcagaagatgcttgaggaaggggaaatggtgtgaactaagatgtggagtcaggggagcataagatatgcctgaggagcagttgggatcagcgtgcccaaatgggatggtttgtgttgggaaatcacgggcagaagggcccaggtttgggctagtgtatgagcaccttgaacatccgtaagacattcatattttaccctttatgcacaaaatgatgatgttggggtatgaagtgggatggtaggtactagcagctttgaagagagtactgggctttcgttgtgatactgccacagtgaaagcaaaagggtaagagagtttaaaagtactttactcattctaccgattttttttttctatgccatacaaagtcccagccactagggatacaatattgataagagtcagtgagtatctgccctcaggagctttagaagaggcaagcagcagacatttacaatacacattatcagtgctaaggggtccatatgacgtgattagtcattagaaggaatatctgacacatccttggaggatgggcagggaaggtttcccagaataagtgacatcttgctgagtcctaaaggataagtagcaagttatagaaggaaggaaggcacctgaagaacaacaacaaaagagctcctagcgtgccacagagaagagcgtggcactttcaggacatttcaaacagtttaacttggagaataagggactgaaggggaggagcagaaagtggtgacggggggaactggaaaggtcagtgggctgacttgcaaccctaaccagctcgttattaagaatggaatattcttaatatctaaaatattcttcttccttatatctcctctaagatgtttatcagtttacattttttatactctgtcatcttaattcattgcattctcttttcttcttagaataagggctttcaaaaccagtgaacttctgtccacaaagtacagggactctagttttcttcactgataatctaaattcagttaatggatttctaatattataattcaggcgtttctagagtaaaacttgatttattaaaaaaagtatttttctaataattgatggattcatttaccactactctatttcagagttttgcttacgtattttgccaatgggattattttgcagctgtgtttttgagtgggctgtttgtcagatttcagagaagactcaacccagaggcatgctcttccttcttccgtggaagcagaatgactccttgcaataatgaagagaatacttgacatctcagattgcagtgtttgggttgcagtgactttatggacagctagagcttccatggttaaagaataggtacctttacagaggacatttgcatgccgaaggagactcaccttgaagtgcctctcagaacaaaatgtctgccatttatttttaagtaaatccaagcttccaacctaaggatcacagaaagcgtgtttctggaagtcttagaatagcaattttgttcctacttcttgctaccaaatgatcagacacactgaagtcctttctcagtgtatcccggtacatagtctagaatgttttctttttaagtgattaaagaaatggacatttttatgtctagtaggctttatttataatgtaactacactagaagccaaaatattttaccattcagtttaatactaaatacctagaattgccatttaaatattcattgtgaattctaccctttagcaccgtaacagaaccctctttggaatgtttcatgcttttgactatgaattctaatttttctgccataaatacagctatccctattttagttattgcaacttacctgacatatctctgcttattcttagaactttttggatcactttgttttatgtttgtacccagaactgatagaggatgggagtaactgcttctaggatttctctttactccttgcagcacacagcattttttgctctcccctgaagggcagggaatcactgcctcccttcttttagcccagctatttctgtaagatatcttttcctatttgtttccaatagggaagcctaattctgttgtattagtccattttcacattgctataaagaaatatctgagatgagataatttataaagaaaagtttaataggctcatggttccataggttgtacaggaagcaggatgctggtatctgcttagcttctggggcgacctcaggaaactttcaatcatgtcagaaggcagagcgggagcagacatctcacctggctggagcaggagcaagagggagagaccgggcgggtgccacacacttgtaaaccaccagatcttgggagaatggactcactatcacgtgatcagcatcagggggatggtgctaaatcattcatgatatccacccccatgatccaatcaccttccaccaggccccaccttccatactgaagattacaacttgacatgagatttgggtggggaccagatccaagaagccatatcagttgccgtgaggagaaatctgatttgttgtttcttaacccagctctcctcactggaaatgactaacagagtctgacattatataacctctaaacctgagtttttggcatagcacattaccatatttccctgtaccctcagcaatgcgtagagtgaatttggtaaagatgagcgccattttaactagaaatttctaagtgctatttttaatccctccccggctggaaaggtagttactatctgtgggttaatgtttctgacttcaattttttttttttcctgttcagcatgaataatttggggggaaaacaattttttgtttttttttttgcttggtacttccctttcaagaaacatcaagtacattatgaccattacttagaaacaatgcatagtttatttgggtcttgtgtgtttggtatgtgtgtgtgtttttctaaacagatgttgagtaaaatcttcagaaggtcatgtgtgaggcagaatacttagaagaatgcttcagagcccagccgactttaaacaacttgctaaatccattgtttattaaagtgaaacaatggaaaagaggaagtggcagaaagctgcttggttaatattaaatgaaagtcatctctctccccctcataagacatgtcaaaccaccgtaaattacaagctagatgaagttggagagctggttcagaaatctttgaaccaaaccgaaacaaaacacagccctaatgacatgagtttcttgtaaactgttttaccaggttgtttactgcagaacagaggtgagtcaacaagagatagattctcagggtcaacctgagaatgactaccaaatgggagaagagatgtagctgatagaggtcttgagaaaagtggatttaggaagacaaggaacgttttcctattgctggagaagaactggctctactttagattgactgaatgctttttaatgtttctttctttctttctttcttttttttgttgttgttgagacagggtctcactctgttgccctggctggagtgcagttgcacgatcatggctcactgcagcctctgcctattaggttcaagtgattctcctgcctcagcctcccaagtagctgggactacaggcatgtgccaccatgcccagctaatttttgtatttttcagtagggacagggttttaccatgttggccaggctggtctcctacttcagacctcaagtgatccacccgcctcggcccgtcaaagtgctggtattacaggcatgagccactgcacttggcctaatatttaagtaagatcaaaacattcactccaatcaggcttagtactttacaggaaaccaagccactaggaagaggaagcaaggttggagggataagaaagaaacctggtttcctttctatgatggctaatgttatgtgtcaactttgctagggcgtggtacccagatatttggtcaagcacctatctaaatgtcactgtgaaggtatattttagatcagatcaatatttaaattagtagatgttgcttaaagctgattaacccccataatgtggttgggacttcaacaattagttggagacctaaagaggtaaaagactaaagcctcttgaggaagagagatttctgcctgtcaactgtctttggactcaaggtacaccatcaactcttccatggacctctatcttcctggcctatcctgcagattttagccttgcccactccacactcgtgtgagtcagttttctaaaatctctctccctctctttctcccctcatccatccttttggttctgtttctctagagaaccttgactaatacacttgcagaagtccacagaaagtccattactccagataccacctaggtgagtgccaactgattctttctctttctttggtcataatgcagtcaaactccctaagccatgcagtcagctcacacctgaatcagcatagtttctagagtggctcctcattgttgagaagtcaagttcagaattttataactgagtggtggggatcattgtaatctggcctcatgctctctgtcctaggtctctttttacaacataaaacctctgttgtagatcaatagtttcttttactctacttgtatctctagtaagcctcacattgccattacttatcctatactattgattggatatgcttttaaattcaactggagtctcctggagagaagagaccaagccttttactcattctgcccgtcccgtgatgtctactagagagctaaacacacaaaaatatcatccagttcatgacaattgatggctgaaagaatctcatctggggttatgcaaattaaccctacatctcctagacccataggtgcatgttaaactgtgcagtcttctatatgctttctattaagggaaatgtgacttcaatgtgaacaatggccatgatttcctagcagttattgttcgtgtcacccattagtagattgctgtttactgccttctaatagcttctggtagaattctcttttgaggtgttgtttgcttttcctatgctttaatatttcatcagtttatatcttagagtttaaagacatttagtagaccccacaattccttgcacatagtaggctctccatgaaccaggccataataaaccagtaagccaataagctaagtgtaaacctgaaagatacaatcccaaacactataatcctgaatgttgaaatcctaaaagatcaaaatccccaaaatttaactctggaaaaaataatttaaaacattttaaaaaggcatttacttacattttaaaatggggatttatttgagaaatataaaaacatgacaggacacttcacaggccactttacacaataaaataggcaagaagaacgtacatatttttgcaagcataaggattcagttatgctaatgacagttgcactggtacaatacttgtgagcagatgaaccacatctataaagaaatagataaaaaagggaaatatataaacacatattataaatggcaattgtgtgcacccaactttatcactgcagtcatctgaaatattgtgatagacaacgtaagcctttgacaagattgttcaaaaaccatgatgggtcaccactgcatatgcacttgttcaaaaagccagatcttgagaaattttatctttcataaatgcagatgtaccaaaaggacatctcttcatttactgaggaaattttaaagtttttatgtacacgcacaatgttaacatgcaacgtcaatgttgtgataatggactttcgtggagtcaagtttgcaaaaaatgcataaaacagattagaatgctctaaaagtctctatataacttatacttccactactggaaataatgtgaatacgaaatacatagtgtagaaaatttttaaaaatgtgctgaaaatgaaaaatggtgaaaaaaactaaaaaaagaaaaagggaaaaaactgaaaaccaaagcacaataaactaaaaagaaaattcgacatataaaatagtggattacagggatagtttatgggcattcacatggagatagcccataagaactggcctaacatgatgcaactatcctgtgattatgattttcaggattttagactttagagattttgatctttcaggatttcaccattcgggattgtggagtttattgctgggtctttggggattatggttcaaatccgctataaagagtatggaaagatgtagtactcttttttgcaatagtttatcaccaactttaaccaagagaaggcccctcatcctgtctaagcctggccatggaccatagtgggaacaaaggaactca

SEQ ID NO: 3064 - DNA, 944 bp, Homo sapiens
ctacatttcttcctgaaggtggcagtattttagtgacaaaaactgacaacaagctgaggaactgtaccagagctctcggagatcaacaaaggtgccgcttttgaatgtgaaagttttttcaagacttttctatttcttggtttgaatcgtgtgcctgtagggacacatgctacctgcttactggacagtgactacttaggataaggactcaggcaagtaaggttgcattttagtctctcagatatggggggaaaattttggtgacattggagagagagataaatgaaatattttattaaatttagaatttaatgtaaagtagcatatacagaggcaagaaacagaataatgtgttttatggttgtcagctaccatctttaattgacacacaagtggagaagataaatagtaatttggaaccaaaactcaggacgtcccaggagaggctagattaggaattctttgatttgggatcacgaaaatgaagtatccatattttaacagaatgattagtggcagaggaatcatctaagaaaactgagaagactctgccagagtgatgggaagaaaactagatgagaaagcaccattctggaagacatgctcccatgaaccatggagagaagaggagagggaagaagttatttgtgatgtcatttgcctgtgtcatggcctgccttccctagatattgtcctaatgtgagcatcacacctaaggtactgaagtagagttctggctgttccttacggacatctctggtggacctccatctgtttttgatacaagtcagtcttttcctggacttttggtatcatatggacaatgtcagtcatttggctgaaaagttcaacttgagcagttttaacatcttggagcactactggaagattcatttttccgtcataactatcatcatcttgattacaatcatcagatgtcacag

SEQ ID NO: 3065 - DNA, 8403 bp, Homo sapiens
atttcacttaaagttgcagtttccaagagcctattgaggacacgaaggctgtcaaccttgaggctacataccttgaggctgtcctaggctaaactctggtgatccatttctgataacctctttcaaaccttcatttgaaatgctttttatcaccccaagtggaatgtatatgaaaccaaaccccttgtttttattcccctttccgacataccttttaagagtactaaatacataatagcgttttaagagtactaatatttctgccaaccagaaaacctcaccaccatctttgattccccccatcccgcctacctttttttaaaggtctagtgatttttctttccattgtgtgcagaattttttccttctcttatttgtcttaacacgggtttcatgcagctgacctcctgattgatccagtggctgatactccccactctgccctgataattggtcacagtgccttgatggtgtttatgtgttacacaaaaatatgtaatgacttccctcttgcctctgagcttgtccacaaacataaagaatttcaggcccagtttatctttctcatcttgccccaaccattcttctgatggtttacttcttgttctcagaacatgcctatattctttcacattgtcagtacagaaaagaggtatatgcagaaaaggagtgatgtattttcaagttagccactccatgagtgactagtactgaatcccactgaaatcccactgaaacttcccaggaggcttatgaaatgaatcttagaaccagcttccatattggtagccctacagctattaacttcccatacttccaggtagtgaatgagtaaatacagagcagtgctttttggttggacctgcctgaagtcagtcacagcttacaagaaattgatcctccatagctggcataagatgttgggtcaggaagtttttgaaatggtacatagcatgtgtctataatggtgtgaaagttaaaaattccagaagatacagaagaatgtagaatgagaagttacgtctcttttccttttttgtattctagaaaaagtttgccaacccctgttctagtcattctggttcctttcctggaaacattcatcattaacctgtttcttgagacgtggtgtgtatttatgatacttacaccatccacatgtacacatacttagtatatactttttctcaacttcaaaatatcttaatgattttctatattagtgtatagaacattcttattattcttttagctctataatattccgttatgtggatctaccatttatttaactagttttctatcaatggacatttagttgtttttttctttctctttgttttgagacagggtctcactctgttgcccaggctggagtgcagtgatgtcatctctgctcactgcaacttgtacctcctgggctcaagcgatcctctcacctcacagcctcccaaatagctggaaactacaggtgtgtgccaccacacccagctacttttgtattttttgtagagacagggtctcactttgttgcccaggctggtcttgaactcctgggctcaagggctccacccatctcccaaagtgctgggattacaggcatgagccactgagcccagccgacatttagttattttgtctctttattacaaatgatagcattacatttatacatatttgtaatccgaaaaggtcaattccttgagtgtttctgtcttgaacttttttctgtaataggcctcccatactcattgcccacagtttgcattcagttttattgtagtgggtcaggatcattaagagctggagttgctgggataggcctttctcaagaggttctacttgagttggaccttgaggaatctggatgaagagggggataacgaaaaggaggtgggaagggaaaaaggactgtgtggctgaaggcttgtggttagcaaaagcctgtcatgctttcgagctgcactgcccagcactgtaaccatgagccatgagtatgtgtggctgtgagcacttgatatgtggctaatccagagttgaggtgtgcggtgagtaaatacctaccagggtctgaagatttaatatgaaaaaaagaatgttaaaatatctcagtagttttaaaaatattgcttataatttaaatagtagcattttggatatattgggttaagtaaaatgttattaaaatttttacctggttttacttttaaatatatggctaccagaaaatgtaaaattgtattatgtggcctacctttgtggctgcatgattttttgttagactctgctctggctcatccttcaggatggagaagcaggttcatttggggaacctggtatgtgcttcagtgagaactgttggatagttaccagaatcaagtatttggtatgaaaagaccattacgtttcttaaaacagtgaagtaacatgaaattagtttcaggaagattcaactgttcatattttgtggcactacaaaaactaattgagcacttactgtgtactgagcactgtcctaaagggctttattcatttaatcctcacagcaaccctttgagacataggtagcccttatgttacagatgaacttgagtcacaggggggtgtacctattggcccaaggtcacgccgtaactgataatgccttggctatgaactggcagtctgattccagagcctatacacttaaccactacactgtgtccctgtgaaggtgaattagacaaagaagatgatccttgcacatagcagtgaaggaatggtaatggatcactttttaatcctgttaatattttaattaaaaaagatcttctatcttcacggtaccccgatacttttcgttttaagttcttgtcaccatgattggttgtatgattttggccacccaggaccagcttagtatgtaacaagctttatgtttatttttcttgtgttttgtgtgtaggaaggttttaagaatatgtagcatcgcttaatgatggggatgtgttctgagaaactcattatcaggcaatttcattgtgcagacgtcctagagtgtactcaacacaaacctagatgtataacctgctatacacctaggctaaatggtatagcctatggcttttaggctacaaatctgtacagcgtgttactatattaaatactgtaggcagttgtaacattttatatatataaaaaaacatagaaaaggtaaagtaaaaaatttggtactgtaatcttatgggactactgctgcatattcggcccatcattgatcaaattgtcatcatgtggtgcatgtctgtactcttaaagcaaattttattttatccctacattttacagaggaacagagattaaataatgtggctgaagtttcatggctgggaattataaaaccatgagactgtgtagctttgatcactattgtgtttgatttaaaaagtaaacattttgtgtttgagcttagagctaagtgatcataaatggtgtatatttattcctaaaatttttctgggatttcagatcctgaaattttatacaaacctttaaaaagcattttcaggaggaaaatgtgtcagagccaagttgaaatttgaaatgcccttttttttttttttaatataaggattcttaatattggaagagaaaggaagttgttgttttgagaagggggcttgctccatcacccaggctggagtgcaatggtgccattacagctcactgcaggaagctcgtttttaaaggaccgtcaacgtaggtggaaccaaaataatggagagaaagcaagaagcccttaaaatgatacttgcttaattaattaaactcaattcattgagagccagctgtcaaggcaacaaatactttccattttgttaaatttctccagtatttagctcagaggtctagtcttaatggtaatgcctaaatttttctgatctttactgtggaattttataatctttatgttatgtgttaaggaatgacatgcacactaagaatttatgattttattcttacctgtgactagggcctttgtaataaatctgtttttacgctgtccaaaattactatgttcttgggtttctttttctttatctcttgggtttctagagattcataagcttaaaaaattaaaaataagttattaggattggaagagacctttggaagtggtttatctagcccagggcgtctcagtctgggaactgttgacattttggatatataattcttggttgtggaagggctgtcctgtgcattgtaggatgtttagcagcgtttctggcctctacccactagatgccagtagttcccctttgattgtaactaaaaatgtccgcaagcattgtcagatgtcccctgggagacaaaatcgccctggttgagaaccgcttgtctagcccatttcctgggagtggtggttcccttctctggaactcagacgttgagaagagaagggtatttaccacctcctctagcagtctgttccaactttgggtgcgtctttggagacagaaatctctcctctctgttaagctaaaacctgccatctctaactttttagttctgcctcttaggaccgtatggattggatagattcacttaaaaactttcccaattattggaacatgataccccgtccttcctggtccctcacgggattgttttagagccaagtcagcaaacttcttgtagttgccatgtatttgcaggctaccaatctctgatgcataatcttcctttccttccctccctcctccttgcctcccaccagccttccctccttttctctttcttcttatttcttgtaacttcttaaaaatgtaaaaaacctttttttgctcttataggctgggttttggttcagtaacttgccatccctggttttagagtctgacatctgctaatcttcagagggcagtgcagtgctttagaactgtatatagaactttggggaaggtctgagcagcatagaataacgttggacttgtcattaactccttcatgcgaagagcttactgcttttttgaagctttgtcacatttacagcgtaatgacagccaagacactggtttgtctttttcattaggccactttaccttctttttttttgagacagagtttcactcattgcccattgtgcaatgggcgcagtctcagctcactgcaacctccgcctcccaggttgaagcaattctcccgtctcagcctcccaagtaactgggattataggcttccgccaccatgccactttaccttctaagatatttttagacttcagcgtaggacgatctgtgttaacagctgtattaaacttgtcttagctggaaccaactctctataccctgctgaggtttgtgggtcttactctgtccttcagagtgttaatgaaatttttcttagcttcccgtcgttcaaatgttttttaaacatacctgggtctttcatgcaagttactaatacaaatttgaatgagatgtagctaagaactaaatctgaaatcacaaatgcctaacaaataaggtaattttggccaagcgtggtggctcacgcctgtaatctcagcactttgggaggctgaggtgggtggatcacttgaggtcaggagtttgagaccagcctggccaacatgatgagaaaccctgtcttgactaaaaatacaaaaattagctgggcttggtggtgcatacctataatcccagctacttgtgaggctgaggcaggagaatcgcttgaacctgggaggtggaggttgcagtgagccaagatcacaccactgcactccagcctgagtgacagagtgagattttgtctcaaaaaaaaaaaaaaaaagggaattttaatgcatggatatagcaggtctgtactctgttcttaaaattgttttggagaattatatgtaaatctgcattatacatgtttagtatcctcaatctaaaatccacagtgctccaaaatctgaaacttgagcactgacatacatgaaatgctcaatggaacattttggatttctggattaggggtactcagctatgatataaatattccaaaatctaaaaaaatccaaaattccaactacttctggtcccatacatttcaggtaagggatactcaaattgtagcaaccatcgtcagaggttaccgtcgttactgatggctttcagagtgattagacagtaaataagtgtaatgaccatgacaagaaaattttcaaaaaaactaaatcttatttacgtgcaaaataaaataattttgaataatgattttaagaagtaactgattttttttttccagaaaatatttacaccagcagctccagttcataccaataaagaagatcctgctacccaaactaatttgggatttatccatgcatttgtcgctgccatatcagttattattgtatctgaattgggtgataagacattttttatagcagccatcatggcaatgcgctataaccgcctgaccgtgctggctggtgcaatgcttgccttgggactaatgacatgcttgtcagagacaggatttcgccatgttgaccagtggtctcaagctcctgggctcaagtaatccgcccgactcggtctcccaaagtgctgggattacaggcatgagccaccgtgcctggccagattttgtttggctatgccaccacagtcatccccagggtctatacatactatgtttcaactgtattatttgccatttttggcattagaatgcttcgggaaggcttaaagatgagccctgatgagggtcaagaggaactggaagaagttcaagctgaattaaagaagaaagatgaagaatttcaacgaaccaaacttttaaatggaccgggagatgttgaaacgggtacaagcataacagtacctcagaaaaagtggttgcattttatttcacccatttttgttcaagctcttacattaacattcttagcagaatggggtgatcgctctcaactaactacaattgtattggcagctagagaggacccctatggtgtagccgtgggtggaactgtggggcactgcctgtgcacgggattggcagtaattggaggaagaatgatagcacagaaaatctctgtcagaactggtagtttctctccctggctcatcttgcatgcttgctctgatggaaaaggtcacctggaaaggaactgaggatagccttcagccagcaagaaaccaaggccctcagtccaactgcccatgaggaactgaagtgtgccagcaaccactaagtgaggtggaaacagatgccacctcagttgaactttgagatgactgtggctcccaccaacaccttgattacagcctcatgaaagaatctgaagtagagggtccagctaaactgtgcctggactcttgactcaccaaactaggagataacaagtgtgttgttttatatcactaaattttggagtaagttgttacacagctatagataactaatatactatacttctgacctgatataacaaaaaagaaaccagagttccaattctgactataatttcccagccagtgtctttagggaagatttttttttcccctcttgaaaccccaatttcagtattttcaaagtggggatattacctacccgataaaaatatctgatgtgtaaattatatttcataattcatataaataacctagccagagactagtacatcactgggaataaatggtagttttgagatcagacacatctctcatccaattttctttttagaggcaggtgagactctaaaatattaaattaaaaataagtagtaaagtataatcacatccccgttataagtgaggaaataaagtatttttgaaaaatagttttcctattaattattgagtttcatcttttattggggagaaattaaaaataattttttttaattataagaaacatactttgtcagcagctgtctcaggaagagactcttcaatgccaagttctcgtcgtctttcagccctaacttctgcataactacaaatggaaaaaataatcaaattttagtgtctggtcattcgtttaaaatactgcacagctgtaactattcagtgttgttacgtgtctcatctgttcatctagactatttgctatgtgctacacaaacctaaaatatacctataatgtcttaatttaacttgcatttttctaggtatcttaaagtttcatacactgctgtaaacgatccataaccacacaatacttaaattaagaaaaataaataaaggaagtgtatgcttatctacctacagttttccttttacatgactgacattactacataaatgacagtaacaacttctgctgtaaagcacaaaatttatatcaagacttatatatctatatcattcctatatttatatataatgcctataagtaaatttaataatatattgaaaggat

SEQ ID NO: 3066 - DNA, 2147 bp, Homo sapiens
gttgtgaccagagcggttgcgggctgagcggtttcgagccggcgtcggggagcggcggtaccgggcggctgcggggctggctcgacccagcttgaggtctcggcgtccgcgtcctgcggtgccctggggtctcccgaggaccttgtacccgcgcggcttccttgggctggctttggacgacgctttcgccttcctgctgcctaggatccgccgacatgaatcccatcgtagtggtccacggcggcggagccggtcccatctccaaggatcggaaggagcgagtgcaccagggcatggtcagagccgccaccgtgggctacggcatcctccgggagggcgggagcgccgtggatgccgtagagggagctgtcgtcgccctggaagacgatcccgagttcaacgcagacacctcattgctttctgactgaccaaggcgcagcgcagtttgcagcagctatgggggttccagagattcctggagaaaaactggtgacagagagaaacaaaaagcgcctggaaaaagagaagcatgaaaaaggtgctcagaaaacagattgtcaaaaaaacttgggaaccgtgggtgctgttgccttggactgcaaagggaatgtagcctacgcaacctccacaggcggtatcgttaataaaatggtcggccgcgttggggactcaccgtgtctagaacaatcaccctttttgagcaggagctggaggttatgccgacaatgacatcggagccgtctcaaccacagggcatggggaaagcatcctgaaggtgaacctggctagactcaccctgttccacatagaacaaggaaagacggtagaagaggctgcggacctatcgttgggttatatgaagtcaagggttaaaggtttaggtggcctcatcgtggttagcaaaacaggagactgggtggcaaagtggacctccacctccatgccctgggcagccgccaaggacggcaagctgcacttcggaattgatcctgacgatactactatcaccgaccttccctaagccgctggaagattgtattccagatgctagcttagaggtcaagtacagtctcctcatgagacatagcctaatcaattagatctagaattggaaaaattgtcccgtctgtcacttgttttgttgccttaataagcatctgaatgtttggttgtggggcgggttctgaagcgatgagagaaatgcccgtattaggaggattacttgagcccaggaggtcaaagctgaggtgagccatgattactccactgcactccagcctgggcaacagagccaggccctgtatcaaaaaaaaaaaaaaaaagaaaagggaaaaaagaaagaaagcagcagcatgatcctgacatgacagatgtgggagacccacagcctgcagacactgtgggctggaaggtgggaagggaggggccggtggaggtggagctgtttgaaagtgacacagcagcagtagaagcagtggtgggcgaagcccaggtgaccctcagaacgttgcacaagaacatcagggaaaagaaccagaatcctttaaggaaaatgttcttcatgtatgagagactaaagtgatttttctaagaaagttcagcccttctctgacttacctggacatttctagatacttccaaaggaccctctgggaatccatagcttcctaatctggagatgggaggtcataagggagacgctgtggggttccttgaagtttcttgggttcacagaggagccccctcacttggtgttctcccgtgagccagcctccacctgccaaagacactctggtcctcgtatagtgagtaatggggctcagggcctctccaacaacagagaggagctgatgctgtagggctgaccccgtgacttcctgagtcctcaccctgtccagtgctttgagattcttcccacctccccatcctcaccagccggatcgggcgctgtgcagtgtggtcagcatggtgaagaaagtcatttcctcggtgggcagtattcctctttatctctcattacactggaaatgttatttctgctgtatcatccgtgctcaacgttttagtctgtcaggctcaccttctctctggaaagaatttgcttaacttgacattccatgtgccgctaataaaatatattttgaaag

SEQ ID NO: 3067 - DNA, 6173 bp, Homo sapiens
gtgtgtgtgtgtgtatcttttaattgccatgtatttctaccaaaaaatacaaaacttaattttgcgtcctgaaagaccctcgtttgagaatccctgcttttatgttctgctttagtccaggcaacagatagcttaggttgtcactttacaactggagcagcaggtagggctgagaggctcgccatactccaaattaccagtgccagtcccatggcaccaagacaggaaaggcaggcactcaaacagaaaggtagtgcaattaattgcttcaaattctttactcagggctgcccttagtcatgatcaaataaaatgtacacattgtttggcacttggtaaaatgttgtttcctttccttcctccttcccctgatagactctccttaggtacaaaaaagatgaggctgtacacagagctaaaagtgtacacctttgaaaaaggtgtctttttcaaagagcaccttcaccccttactggactaaactcaatccaaagctcttttctctaagctttataacacttactgcctggatgagtcatttgtcaataaatacagaatgtttgtataggtggggttcttgtatatatgtacgagcccctagagtctctaacttaaaatttatttttgctttagaagttcaggaataaggaggctttgatgatcaattttaacaaccgcaatatataatacagtaactaatggttaggtgtccaggctagcccagggcagcctgtgtgattcatgctgctggtgaaccatggctggctgggcgaactagatctggaattctgtggtgcctaagggagggaagggaatatttcccacactatctcatcctgccctcactatcgctacccccaatctctctctacattctaccccacctactttgctttttctgtgaaagaccagctggggcaaatattttggattaagtaaaatttgtcttgggtaacttccctaaaatttagtttttaattgaataatcttggttaatccatgagtaaataagcttgtagagtatagtcagcctcactgtgagaagctgacaaaccagaaaaccagaggaatatacaccaattccttcctgtcctgcaaacctctgcttcttgaggtttttaaagagtgggtgcctaattgattagtcattagttattgacaggaccaaagagatatgcctggctcctcttggaaaaaccaaaagactgagagggaaaagtacaccaaaaagatacctaaggaggcagactgctataaagaaaataattaggagaagaaatcatatgttttcagatgaaaagaatctgaggatgaaaaaagcagccttttcaggccgatgatggaaagatagaaactaaattcagaaggatcagaagacgattagaagggcaagaagtcatagaagaccaagatttcccaaattaccaaaagaaatcaagcccagtcttgttcaggctgcagaatgagaacgcccttctagtaagatccgtacaatgaatttcacaaatgttgatttctttctgtcctctttgagcccataatcacctccttctacttgcacaaccttgaccatcaccactacctataactaataaccagttcttatgttcccctcaaggcataacacaaaaatattttctttatgattactttctctacaaaaaagagggagagagagagaaacaagtcaggggacttcgttggtgagtgtagaccacagcaagaacctaaaatcctagtgggttgttagtatagacaggctgaaaccactatcctgaagtggtggttctaggtaggtatgcccatcagaatcatctgtggataagtattttcagtaaatacacatgcaggacctctacctcaaatgtactgaattgaacttcattgctggagcttaggcatttcatatttgtttcctaagctgctataacaaattaccacaaacttggtggcttaataagagaaatgtattctgtcacagttctggaggccagaagtccaaagtcaaggtatgaccaggattggttccttctggaggctctgaggaaattctgttccatgcctctctcctagattttggtgactgccagcaatctttggtgttctttgatttgcagaaacatcattccaatctctggttctgtcttcacttgaccttccctatgtctgcgattggtctcctttctgtctcttttaaggacacctatcactgaatgtagagcctatcctaatgcacaaggagctcaattataccttaattatatctgtaaagaccctttttccaactaaagtcatattcacaggtaccaaggtttaggacttgggcatatctttggaggatacagttcaacccattacacatatgcattgaagggaaaaattcacgccacaactgattatcctataaagaatgttggcttaacttaacgcatttaacgcaccatttctccagcacttaggaaatgctaggagatgcaaagctgaagctaaataggcttctttattgcagaacctctcagaggctctcatctgtttgtgtgcattataaatgtccaagagaaagaaaagaatcacaacatttcctggaaatacttgaccagggaacttcttttcaagggattacctgttaactacctcaatggacactaatgactaaaggaatacatgctgctggtgatcatggcacttccaaactatgctcaatggtgtgggcatgagtctaccacagtgtctaaacactaagattgttaatgtctacacgacctctccctggatatgagcacacatccttcatcaaatatccacagtggtttccctagaggatttgcatatgtgcatggatttttagatgtctagtctctactcttgtcttcagccatttttgtagagagaaattggcaaaatattagcatgaatggaagggaaaggtggccaagataatacattatgcctttttttttttccctgaaaacagcccagaatatctgaaaagggagaagtgacttaatcatttctattcccacaattctggtcctacaaaattgatatcagtatatgattcatccagagaagttcacagtggtatttttttaaaaaaaacttttagaggttaccagggcatctcactattttaaaatttaatacctcaagggaaataagcaactaccttgaatttttgcatgaattgcatttgagaataactgaatagttggtggaataaagttgtttttttaaaagtaggcatattctagttaataaatataaaagaaatggtaggattagaaaaatcactacattacaaactctaatgacataatagatttaagcaagatgatcagtgaatgataaaatatttaggtatgctgtcttctaggtgaatcaagctgacaataccttggacccacgttaatcttaccacatgatattatatgtctcctgatacttaaaataaatatcaaataaatcttgataattgttgaaaattgttgatgaacatatagttcacagcaccacccatgatgtattctttccatgagaattgatctgaatcaaagtaagcctctaggtctaactgccagtgtgtaggaaataccagggatagagaaacatttttaaagtctttaagattgcagtaagctgaaagaaattgtctggtttctgcaataacagcaacaaagttatgtaataagaagagagagggagaatcacggatttatacaaacttaagagacactgtgtgaatctagtttgtatcctgatcaaacaaattaactgtcaaaagatgtcttttgaaacatgatgggaaatttgagcataaactaagtattctacgatattcaggaatcattaccaatttgttagatatgatgttggtatgtttttttaaatgagaaagtttttagcttttagagatacatacctagatagttatgggtgaaagcatatcattaaaaaaaagatagtggaagtacacaaaacaggattgctatatgttgataattgttgaaccttggtgatgaacatataggaattaattaaaccatattttctatttttatgtttattttgcaaattccaaaataaaaatagaataatccctcatgaacagatggtctcaaatttcatcctcaagtaaacacaattcacattctcaggggaacccatgagaatattatgaagtatatgtctatctcatttcattatatatggaatcctaccattccttttgtctttattactagtggccagagttctatcttgaaaggtgggaaatgtccttatatgaacagattagtttagagaattattgtgagaaaaccagaaaatatttgagttctagctaactggatattgaatgagttgtgctgaagtatgtggtcataaagggttgataatgaaatacttgctttccagtggcaaggaaaaataaatgtcttagaatttacaaggtcattcttgaaatcaatcaacgtgggctgaagatctcattgcttctgttatctggcacgatggtatttgtttgtgcacagctctgttgatgtgagctatcaaatatttcttagagctgaaatcatctaatagcaaacattgctatgtcccaatggagattccaagactctttggccatggaacatttacattctatcccctttcatcactcctgaacaaacaaaaacaaaaaaaggaaagataaccaataggctttttatttaattgaaaaccaaagagagagagaggaaagaaccagttagttgccattttctaaatgcaggcttttgtttgtttctgccttctaattctttgctcttgaagctatagctttcaagcttgtgtatacaggcccagagagaacatttgaaatgtggccaccctacccatgtccatgccactcttcctgcctttctctctgcctacttctgctccaccatcccaggtcaggggcttggaggctgacagcattacaagtaatatagtcgttcaagctcatataaacaagatgaaatccaaataataaccaaaatgtattttatttcaaggactggactactcagttccctcagtttcgctgaccgatttctaggagccctaggctcagctcttggttgtctcagaactgaggagagtactcatttgcaccatatgcatctgcttgttagcctgtgctaccaaaattgattcattacttggccttctctgaaaagaaaaatgaaaacaaaaatgcactcttaaaaataattattaaaatacaaccaggaggtatgtgcctagacatggctcaccttctaccaaatcatactttatgattttccacaatattatcttctattcctcctgcccctaaggttccatggagcagagcaagttgaagaatgttaaggttttactaaacttttagaacagaggctttggggaagcaagagagaggtacactgaaaatgaagtgtctgtctctgcttctattaatgtcataggactagaagttgacctcatagctgattacaaatgaaccctgcaaattgaaccccagcacatgcctctcattatccattcttctctttgcaggatggggtccatgctcacatatcaagaaaatggagtcttacatgcaagcctaatgcagagtagagaagctcaccaacttgaaggaagcatgaatgaaattacaaggaaatctagcttagaaaaattaaccctgtagcttggtttttccactctttgctcttggcaaaaggatcttacgggaaaactggagcttagagaacttatgtaacattactagcaagttgcacagctgggattcaaactgaaatccagctagcttcaaagactgtgttctttctgctgctgcatactacccctacctaccaaggctctgagattagaaagcaggatgggtgtgttttaaaggaaataaggtaggaaagttttcaaatattagaaactctgcacaagaagattaggtcaagtttcccactgaggggcccttgagtatctatgaactcgatgaaaactctgagcttctcaggaaggtagaccaaagggaaaggattcatcaaaatggatgttagcactatgccatgtgtattactccatcctcacacggccaaaaggacatacctgagactgggtaatttgtaaggaaaaagaggtttaaaaaagttctcttcgatggc

SEQ ID NO: 3068 - DNA, 5771 bp, Homo sapiens
gtttccccattttcagaatatagaagaattcataactgctttttaaaaatacatgtacagttcctttttaaagccttgatttaaatatctgatccattgggaatttatcctggattatggtgtaagaaatggatccaattttatctttctccatatggctatccagttatctcagcaatgtttatttaactgtccatcttctacccagcaatttgagatgctacctataaagcatactaaatggtcacatgtgattgtatcttgtttctgaactttctaccttttcattagtttgtctgcctattcatgtgctaatatcaaactgtttaaataataaagtttttaatagtactttctaaagaaatctgatatagtttttccttccagctgttgtcctgaacattgcttttcttttttagagtttatctggttattcttacttgtttttaaattcctaatgaactttataatcaatttgtttaactctagaaaaaagcctggagacattgaactaagatcaaatttaatgtattaagtaagtaagaggaactaacgtctttatgatatttccttctctctctcccagatgatggtatttcttttcatttatttgtgactagttctttcaaaagcacattatagttttgctcttataaatattagacacttctgattaagttgatgccaaggtgctttcttcttttttctctattttctatcacaaatgagatctattattcatttatatattctcactgtttttgtttatatatatgtatacatatatacttatatatgctattgatttttacgtgccattttataacattattttatcgaattctcttattgtttgttatatttccccatggattcttttgagctttccagatatataatcacatgtcctctaaataaatagttttacctctgtttcccaaactgatgcccattagttgctttttcatgcttgatgattacattggttaatgtatcaacgtacaaaaacactgaatgtttgtttccttccaaaatttatatattaaagccctaaccctcagtgttgctctatttggagtaaggaagcaattaagattaaatgaagccacaagagttgagcccaaatccaataaaattagtgtctttatgagaggagacaccagagaaatatactatctagcatcccccttcactcccccaacaaacacacacacaacacacacacacacacacacacacacacacacccctctctcccctcatgcacacaaagatgaggtcatgggaacacacagtgagatgatagccacctgcaacccaaggggagagcctttgccaggcacccaccctgctggcaccttgatcttccagtatcctgaaatgtgagaaaataaattcgattgtttaagcacccagtttaaggtattttgttatggcagcccttgtatactaatacagttagtgtctgcaatatgctaaatgttgtggatatagtaggtatctttgctttgttcctgcctttcaagaataaatattataatgttaaatattaaacattaaagtttccaaagcttttgggatgatgtaaatatattttaatatgctaagaaaatttactgattatttttaacatgaatgggtgttacattttgtctaatgcatccactgcattaatgaagataatcaaataatttttctctttagcttggtaatttaatgacttataataatggatttcctaatactaggctatctttgaataacttaataacttaaatggatatgatttgatcatgtctataattttaaaactgggctgttgagtattttggatagtattttaagatttagatttggttttaaggagaaaattctggcaatttttgacagatatggtagaaagaagagagaatgaaaaataatgttaacaatctaggtgaggaattgctgaggagacaaattaaggtaagagttatttgtaatttctctgttttatgtcagccttcttttcagtagtctataaatccagggagaacagggcctcactgcctttttcactagcatgtctacagatcccattacagttgacaatacattcactcatttaatgaatggatttaaacaatcttaaggaataggaattaactgaagaagataagcctaggtgatacttaccaggtagagtcaacaggatgtagggactaaataaatatgagagattagagagacaaaattacctactattgttgccactaacttgaacagggaatttaggaaagagaactgatttggggataggtaagtaaggtattgattcaaaagatttggatatatcatcttcaggtttttataagacatctgagtggagacatccagtaggcctggctctattttctaagaaagagccctacatggaatcatgtattaggttttcactttttgccagatactgtggtaaatgcattatgaaaattgctttagtctaacctaacaagatagcaggactattaacattctcaaattacaggacagtaaactaagacaatgaagttaagtaatttatcaagatcacctatgattaaatggtggaactagcattcaaacccaggcagtctaatgccagagcccagctatagccatatgaactcctaggatttgaagagagaccagtgtattcactgtagatgaaagaattaaattatccttcaagagtgcatacagcaatagtaaagtgtgagaagcaaaagagctgagagcaaaagaatttaagaaacaggcagaagaggacctcaaggaacagactgagaaggagcaggtagagagatgaaaggaaaaccaaggagagagcctgtcgtggcatgtgtctcaggagtgatggagagttcggggaggaaatttggtttattttctgaccctgattctttaagttccaaaatttcttcatgctaatcaattcccattcttttaatttttacccatcttcccccacaaaaagttatcgggtatgaaatattgcaagatatcaacagctactttaataaaaaaattcacaaaattatcaaacagcaagaatgcccttaattattattaggaaagatcagcatgtttgtaatcccagatagttggtaggctgaggagggaagattgcttgaactcaagagttggagcctgcagtgagttgtgcttttgccactgcattgcagcctgggtgacagagtgagaccctgtctctaaaaaaaaggagaaagatcaatgttttttatgctttagggtatttataagcttaaaaagattcccattttacaagctgatgttgcttacatattgccatataaggaaggaataagtaaccaacattgtgatcaaatgaacaaacaatatgtcaacatttttaaaatgtaatgtaactagtacaacacagaagtaaatacctagttttgctttttgatctgtatgtcatttccttccttgtaagatataagaagcatcagtggggttatccatttggtcttggttgaaaacgttccagtgcaacattgccattcatcttcatagtcatttaaatgcaatttattatccagttttgtgattctactttatattttatggagttggtaagactccagaattactttcagaatcatccatcttatatataggggaaaggtttaatccttccatctctaagcaaggaaaactgtcatagaaatcaggccccaaaatgaattcttcaagagcaggaaggatggagaggatgaatcaatcaaatttttttttctcctcaacttgttattctaaacgagcttataaacagttttctgtaaggaaagggtttcttgaatatggtaacatctgccatctagtggctgacttgagctactatatgattaaactagaaatttttatttttatgtaaataataacatggaggtgggcaaatcattgtacttcatctctctctcttcatgttgcaaacaaagtaggaaaatatagattttctttgatgaactattatttttagtgccagatttgatctaataattcaatccttttagtgtaggcatcttcaaagtaaaggagaaaaataaaaacagaaagaaaagaagaaaaagagaaagaaaaataaaatagtatgtttacctgccacaacagaatacataaacaaagtataattatagttattaaattatttcagttctagggtgattctattttgtcattaaacaaaagttaatttatttgtacatcagatatagttagaataaataaaaccggtatctttaaatgaaaatgtcacaggtaaaagtgaatgtataatacctcctcccttatttttatgagagttaaactattatgcacatatactttaccatctaagctgatagaattagcttaattagatagtctccatgccaaaaacaatgataaattttgagtcttcatctctctcaagtctcaccagcatttgacacagttgacagaccttttcccccatctggaaagcactttcttcactttcaggacaccatactcttcctgtaggtcatagtttgtggggccgggcacaggatgagaatgtggggctccctcgtgcaaaaaatcagcaaaaaaaactgtccttaaggtacatataacttatgtgaattacacaataaatattttgtagttcatacttgcatatgtacttcattcttcccggaagagtggaaacattgcccaaaactaactcagctattttatttcacttcttcatacagtaaatcctgtggaaggaaagaagaaaggaggaaagaggattggatggaagaatctccacttctcataggtgtagtccttccttagcctgctttttaatgagtgctgctaaagcccttagcctgcctgtttacccttggagtggagcaatgaactgaagatatttgagtgagttcaagagagactcagaagagaagaattggaggcagcaaacatagacagcacttttaatgcttttctcatatgctgtaagacatgaaagcaatctattgggatgaaagctgaaaggagaagcgggacaagagaagtgaatccgtggaagacccccaaaagaggctgcagattcttagtggacagctctcatatcccctccagggaaaatgatgaaaaatgtcttcagaaaaatagctttatgaaggcaagaggactttttgcacctgcaagacatgtctgaaagctcctcaggtcaaaacacaagtagtcaagagatttgtccatctaattcatcatactactctgatccaagtgagacccacactgggtcagctccatcaaggagaagaacattccacccacgtttggattctggaatatcatccttgcttccatcagattcttgtaagtacctcacttggcacaaggtagacatgacgttcaaggaagtcaactgcgttgcccaagagtaagagaaggaatctctgaagaagagcaacttttcagacaggtagagtgtgccttgctcccaaggaaaagagttcttgaaaaaaacaaatgggaaacatggctacaagaaaactgggaagactgcaagaaaatctcagaatctgcttgagaatccggtccttcttcctccatacacccatggaacactcccaaactctgtatgctgctcactaattctgattaaggtcttcaccctccctaccttggaaattgctacaacataattgtgtttgtatgtataattaatatatacaatacattttaaatgaataactaaagttgacaaaaacctc

SEQ ID NO: 3069 - DNA, 3985 bp, Homo sapiens
cttactgggcccataggtgcatctgattccccactttgtgcttgcagtgctgtccccggcccaggccatcgtggtttacaccgacagggaggtccatggtgctgtgggctcccgggtgaccctgcactgctccttctggtccagtgagtgggtctcagatgacatctccttcacctggcgctaccagcccgaagggggcagagatgccatttcgtgccaactaggtacggggtcgttctgggagctgtgatcgggggtgtcctcggggtggtgctgttgctgctgctgcttttctacgtggttcggtactgctggctacgcaggcaggcggccctgcagaggaggctcagtgctatggagaaggggaaattgcacaagccaggaaaggacgcgtcgaagcgcgggcggcaggttagcgggacttggggcctagacaagatgggaaggagaaccctgggagccgccgggcagcagtgaggggtgggatgggaacagtcaagccccagtcgctcggtgactgatgtgtgcgcccctcccccagacgccagtgctgtatgcaatgctggaccacagcagaagcaccaaagctgtcagtgagaagaaggccaaggggctgggggagtctcgcaaggataagaaatagcggttagcgggccgggcgggggatcgggggttaggggtggagtccgccaaaggcccaaaggtgatggtcatcgagatggagctacgaaaggatgagcagagcccggagctccggcctgctgtcaagtcccccagcagaaccagcctcaaaaacgccctcaagaacatgatgggcctgaactcggacaagtgatcgccacccccccaccccaggccctgccagagcagggggacctaggctcctcttacccccgtctaggtgctttccctctttgctcccccgccctgccctgccctcacctccctttgagatgtaagtttcattccagaattcattccccaggcaattgtattctcccccaccttcacccctggctttctgggagcccaggagctaatcctacccctcacctgccccgggggctgtgtgtttggtgcctgtccacctgagcactgagaagaaagggactttgataccctctgcctcaagtccaggccacctggcattcccatctcctgcatcccccagcctgtccccctggctgtttcctctcccgtccctccctcccctctaccaggtggcccagctccatactctgtccccccagctaatacccagagcacccagatcagactctccttcagggtttatttaggttattattttttattttttaatccattctttgtttgtttacctgtgctcatcctctgcccttacacccatgactgaggaccaatgacgtcatgtggcttttgcaattcacgccccccttaagtccttaatgaagagccagcccaagtagaggggcccctgatcctcacacttcagtatagcattggttccccctgaccactttggagcactgttctgggactccaggtcttgaggagagagacagagagagagaatggatcctcataggtcagggagtgggggagggggcaaatgagccttaagaaatggtttttaaacaaccaaacaaaaagcaggaaaaacaaatgggaaatgggggggcgggggggaggaagaggctgcactgcagccacaggggattcttaggatttttctacattctgtatatttcttctcaaacctccaaatgtccttaaatgtttaataaacactgacatttccagaagctgctgccttgtctagaatttcctagtcctcctgggaataattcctgccccttatcccatccccaaccttccatacttggcttcagttgtttagtttgtttttttggggtgggcttatatagtatactagaaagaactctgaaatagcctcacaagacacattcataccttcagcaaataatcagtgagattatactacgttgtaaactctgccagtctctgcttttacatgagttaaaacgcagaatctgtcttcaccaagatctgaattttaaaacatcccagccactctctagctgtgtgatccccaggacagttacctgactttggtaagcttgtttatgtacttgtaaacaactgagataatgatatctgccctgcttaattcctagggattttataataatcaaatgagatcctgtgtatggaaaactttgtaaactgtaagttgatatacaactaaatattaaggtgttcaatatttgtttctagtgcttgcctaaggtagtacactttacaaattagcacaaatcccattcacctctctaaacaatcactgctttgttttgttggtacatgattttacttctgtttacctattaataggtatactattaatacctcattagctagtttgttggtatgttgatttaggtataccattaatatcctggtatcctgaactgattgtggaaaaacatatacgtatcattttcccctggggattactgatggcacaaaaaaacccaaagtgcccacaagtaatttcttccccttgttaagaagctaaagatatgattaacaccagctttaccaaaacccagagtgcttccatttgtttgaggggtgtcttcaatgtcttttaaaaaaaatcaatctgccttcatttaaatataaaagctaatagagtatatatagccttttgttggggggaagtgggagaggaaacttagtcacaacccagtaataaagttgggaatatcttaagcccaagattccttattagttaagatgctaaactgtccattattcattagatagttgcagctgggttccctgcttaaacttcccagactgtcaggagagtcaaatgaggttggatgtggtggctcatgcctgtaatgccagcactttgggaggccgaggtgggcagatcacttcaggctaggaggttgaggccagcctgaccaacatggctaaacactgtctccactaaaaatacaaaaattagccgagcatggtggtgaacgccttctaaccctggctacttgggcagctggggcacgagaattgcttgaaccgcggaggcggaggttgcagtgagccgagatcatgccgctgcactctagcctgggcaacacagcgagactatgtctcataaaaataaaaaagaaagagagagagagagagtcaaatgaaatattatgctacttatgagatagagtatagctcaaagcttctcatttaattacacttttgttctaaaatttatcagccacctgcattttgctagctcagtttatccaattattttaatatttcttattccatcaagaatcctggtaccctgggacaacattttgcaatctcttgcattaggcattttcacaagcattgcacacttaatgtgggtttttccaggactgtgcccattttccacaatccccaacaaagtaagccacatcccccctttctttcctctgcagtaaagcattaaataaagtctagaataatgattcagataaagggaaatgacattgttatatgggaaactttgaatcccatctaattattactttgaaataaatcgttcacaatcctcagtgcgttgttaataatagcaataattttgcccaggcatgtgagcactttgagaataatttaaagcctttttcagtgttaaccataaaaagaaaaagattataacccaatttatgaatacgcagacaaagagtctaaataaaatatttgcaaaagagaattccacaatgagttaataaaataataaattatgaccatgaagaatttactctgggaatgaaagaatagttcagtatcaggaaatttactaacaggatgtgttatatcatcagggaaaaaacgtaattctatcaagaggagatgtaaaaaaaaaaaagcaattgttttttagtagctattcctacaaaacattctaagtaaaatagtaatagaaataacc

SEQ ID NO: 3070 - DNA, 1667 bp, Homo sapiens
gctccgggaccctggcaccaggggaagctcccatgacagattactgtggtctcttgcatgctgctatagattgcaatactgagaccatgataacctgccactccccaaaatattcttgtcttgcctacttgctcaaatattggaggatctgaagaaattacgaagaagttttgatccttagtaatcagtgaggattgtccagaaaaatagaaccaataggatgtgcgtatatatatgtaaatgaaagagatttattttaaagaattggcttatgagattttccagacttggtgtgtccaaattctgatgaggaagcctggaaggctgaagacttaggaaagagttgcaatttgtgtccaaaggcagtctgctggtgagccaggaagaactgatgttgcagatgaaatctaaagggtgaagcacaaaggagattcttgcaagatttggaagacctagggaaggaagtgacattttatggctgacctatgctgttgctgatctgctgcatcatttcaatggcataaagcagcatctagatctgcggttgtttagccttttctggattcatcttcagttttttgacccctgagccagactcagagttcacctcctccaggaagccttccttgagacgccattgctcacctggctctacttgcttgaccagaagtactttaaagattatatctttacattttgtatctgcaggacttgaaatataatgaacattccagacataattgatgaataaaataacatccaatcccttcattttatagattggttgatgaagaccttggacttttggccaagattgaacatctacagtggagattatttagtgctgttttctattcacaggcctagccactccaacctgtctgttgtctttacatcataggactttacccaaggtgcactctataatacatgccagtccaaatatacattctgacagacaatctagctgcccacatctgtcagatggctctttctgtgacaactgaggataagaatttttttctttaagaattagagctaaatattatgaaatataatctagacttcaagaaactttgacagttacctgtatcaccgtctgtggatgaataaaaatctctttgacatctaagacaaaatggccattcaccatctatctgaaaattctagtgaggacagccatactttctgaggcatgttgaatggctaacattttagaattcttccttacattggctgaaatatgactgaagtttcacagatttacccttattcctcatgataaaagtacagaagtttgttaagtgtccttggtgacaggttggtcaagattggaccttccataggattacttagtctcacatcccctcatggctacggatctcataaggatgggtctgaacatcaaaaatatcactgtttttattcaggtactgacagcgccatataaatatggcttaaagcatggctataagaagagtgaatattctaatgacctgtcttgagtgaagctgatgagactgtattttgagtcttactgtacctgttaaggctatgcagcgtatttagagagaaatgtggaatttgttatataaaggtaagtttaaatagggtgctaatatctatgaaggtcaactttgttaattcaacacaaataaaaatccaag

SEQ ID NO: 3071 - DNA, 1325 bp, Homo sapiens
gatcattttcagccgttcaaaaagtttcctactgtttcacctcgatggggactttacttgcttttctgtgcaggttctctattagttaacatgttcctctaccccatttaacttttgaagtgtggggcctctgaatgagaaaatggattgcgtcttccaatatcaaaatggagtcctactcatgataagtagtttaacacttttctgagagtattgagttgctttaggaagaccaagtgattgggtttcaagaggtatggcttaaatccctactctgccaattattacttgtgagatttgggaggaggtcacttttaaacctcgcattcctcatgtgtaaaatagggataataatatctagcctattcatagttattttgataaccccaatgagatgaaccgtacgaaaagtgccacgaagacggtaaagcccatagacaaatagaaattcttattataacttttcttctgcatgtatctactatctttatgtaactcttaaccacattctactttgtattacagtgacttttaagtatttttctttcccctcagagataccaagttaaaggaattcacatcattatatctcccagaggacaaagcctagaactttctacattcaagtcagtgaatattggggagtggggaatccatgaattcattatgtggaggcaattttaattcagaagatggaaaccagcataatatagatctgtcgtggcttcagcatcaggaaacaacacactgatcatgacatcaaactccagaggaagccggctaaggatgtgcttgttttgatgtgacatgtgcctgcgatgattaactctcatgctcccacaatctctccagggccccagacttggtccttcctcgcctgtaaacaggatcaggatgcatcctggagttcagccaagggcatctggccttgggtaagacagactccacaaaacacatacattgttcctggcaagggaaccacgagggaaggaaaaggagagaaggaaggcagcatgggacactgacatccatccacgtatgacaaatcacatcagatgcaactgagcacatgcaactcagagggaaaagacaggaataggcccatggaacacattcaccttctacatgatcaacagcttcgggaaagcaatacagccaagtgccaagtgagaaaaagggaaaagcatgtaaaatgaatgaaatgttgactgcaatggaagacattttagactgttcttgttacataacaaagagagggaggaaaccatgctgggaggagacattgggagagacctgccaacagacctccaaatgcatattcaaat

SEQ ID NO: 3072 - DNA, 4221 bp, Homo sapiens
ctgggtgccagtggagatgctgcctactgcagtgtggagaatggattggaggggtcagaatgaatgtagagagaattcaaaggctcctgcaggagtccaagcaagaggattgcagattgtagcctggaagaggccagtagctgtggtgacaatggacaccaggtggatatgttggagagacacttagaagggtctcactctgtcacccagactggagtacactggtgtgatctcggctcactgcaacctccgcctcccaggctcaagtgattctcctgcctcagcctctcgagtagctggaattacaagcatgtgccactaccaccctgctaatttttgtatttttagtagagatgcggtttcaccatgttggccaggctggccttgaactcatgaccttaaatgatccacccgcctcagcctcccaagtgctgggattttaggtgtgagccactcgcctggcaggtgattatttaaaagcagaagtagtataatcatatttttttgtaaatagctttttaaaaatggatgggaaataatatttggaagtggagttgttgaactacctctgtgaacagcatactctctctaattgttcattgggttgagggtggtgagagggaagaaattgcaaaagttgctttgctagtgtttattagcacgttgtgcacgtgtatcctaaaacttaaagtataataataataaaattttaaaaaaaggttttaaaaaaaaagaaaatttcagcttaatccattgcctgtatgttacatgcgtttcatttacctttgctgtactgtatatattgtgtatatactgaacaaatgagtcctaattttataatatttagtcgagtctctagagagtaaaaaggttgccaatgtatgacagaaagagttagtaaactagcataagttgtatgctttgttaaaattcacagaaagactgtcttctgaaaaggacttttgggagtgaaataacatcagctctaagtgactcatgtgcctatatccacctggttggtggtgaagaggagttgaaaggaatgaaggattctaggacagaaggttcctattgagaagacactttcggctataaccactgttacgtgtgtgtaatttattcaacactactgtgtatataacggacaaacaaatcatatttaaaacatcatctagtctttttagatgtttagaagtgcacaaagtatgttaaaagtagaggtaaataacacattttgtagatatccttttgatgtgaaatattgtcttttggaaattgagcaaaccaattccctgagccgtacacattattatatctgtgtcagtttggggaggaaggaggagcagaaagtacaaagggcttttcaccagtgtgtttatggtgaggcacattgactattatctttttttttttttttttgagacgacgtctcgctctgtcaccaagctggggtgcagtggcgcaatcttggctctctgcaacctctgcctcctgtattcaagcgattctcctgcctcagcctccagagtacctgggactacaggtgtgcaccaccacacccagctaatttttgtatttttagtagagaaggagtttcaccatgtttgccaggatggtcttgatctaagtctgcattttctttgtgctgtgtagatagcgtacataagaggacaaaccaatcctaatctatatcatctagtctttgtagatgttagagaggtccagtgcgtgacaaaagtagatttagtgaattaaaacactgagtacgttttgtgttaaaattcatagggaagactgttgttaaaaacatagaagtgggcagggcacggtggctcacgcctgtaatcccagcactttgggaggctgaggtgggcagatcacttgtggtcaggagttcaagaccagcctgaccaatatgatgaaatcctgtgtctactaaaaatacaaaaattagctgggcatggcagcgggcacctgtaatcccaggtacttgggaggctgaggcaggagaattgcttgaaccctggaggcagaggttgttagaatcctttctacacaatacatttggcttatagctgtccacagggtggacagaggttggaacgggaagggttctaggccaaaatgttcaggggaggggtgctaggccagaatgttcgtatttagaagacactttcaaattacagtctatgttatgtatatgcaccatttattcaatgctactatgtatatagtggaaaacctaagtcctctttgaaacatctagtctttctaaatgtttaaaagtgcacaacataggttagaagtagagggctaaagtgacaccctttaagcattttctttattactttttaggagtgtttgcatttggaaatggaatggttaaacttgatgctttggactgttcatagggtgatggtgggtgtaggaggaggaagtatgcaaagggaagggttctgtgcccaagagttagattagttcacatgatctaaccattgttctatatgcattttagttaatagtgttttgttttttatttttgatggagttttgctcttgttgcccaggttggagtgcaatggtgtgatctaggctcactgcaacctctgcctcctgggttcaagtggttctcctgcctcagcctcctgagtagctaggattataggcacacaccaccacacctggctaatttttttggtaatttttagtagattcggtgtttcaccatgttggccgggcttgtcttgaactcctgacctcaggtgatccacccacctcagcctcccaaagtgctgggattacaggtgtgagccaccgcacctggccaatagtgggtattaaaagataaacaagtcttaatgctcaaagtatgttaaaaatagatgtagtaaaacaatccgtctacaaatgttcttttgttatattttaggaggcctgtcttctgggagtgacctttgttattccacctcttggagctaggcatagtcctatacctagtcactgggatggtggaagagggagaaaaggaaggatgaaggaaagagctatttgctagtatctccacatctagaagatggttttagatgataaccataggtctacatgagcatttttagtaaagtgcttgtgtgtaattctggacaaagtttattattttgcactatctaagctttatgaatgtcctggggtgataatgtgtgataaaaagtagaactagtgaattagccaatttgtaaattttttcttgttataatttatagaaaagatgcaacttggacatggaactgttaaaccatctctgagctttgtatgccaggacttgttcattaggttggcagcagagcagcaaaaggaagtataaagagagagatgtatgcagatgtgtcgatatttacattttgatgatagccattgttgtatgtgcatctcttttagctgtactataggaatacattaggtatttcaatgaaaacataccttgctaatatttgaatagtatagatctgctaatggattctcttagaaacattatacttagtgtattctattgctgtatatttcattttaaagtgagcactaaaggaatgcggtattttaataaaaactctgccaacgcttttacttagaggcgtgttgccaatttttgtcttttatgaaaatttggcccaagaaaggcaggattacattgtttttccaacagattgagtgggtgtagtgtattcttgatgatcaaaatactcatatagctttgagattttgaattggtaaatactcaagatgtgtgaaaaagcatgatacatactatatgatctcagtcccataaaattgactattgtatctacacccacacaggacctagaaggacatgttaaactgtaaactgcttgtgattgtggatgacctttttcgttgcttcttgtgtttttcagtttcctataatgcacatagtaacttaaaaaaataaagattatttttgaaacctaaaaaaaagaggttacagaattgaatactccctgagataaggtaaaatcatcttatgctaacggttgcaagataatggtataagtaagctttcgtcgtacatatcaatgaactttaagatttggaagacaaaattcagtttatgtattcaattaaatgtgctcagattgtattgtgctagataggcacattattctaacataatatgaatgaatcaataaaatccttataatactgatg

SEQ ID NO: 3073 - DNA, 727 bp, Homo sapiens
cggggagtgtgtgttgccatcgcgtctccgcctgcaggggcgggaccccaggaggagggagaggacagagccactgcagaggaccagactgggaaaacaacgatatggcaggagccagtcttggggcccgcttctaccggcagatcaaaagacatccggggatcatcccgatgatcggcttaatctgcctgggcatgggcagcgctgcgctttacttgctgcgactcgcccttcgcagccccgacgtctgctgggacagaaagaacaacccggagccctggaaccgcctgagccccaatgaccaatacaagttccttgcagtttccactgactataagaagctgaagaaggaccggccagacttctaagccaggctgggctgccagtgccatgcaagccacagccagccagcccatccacttcttccactcctccccgcaggccccaaggcatcactccggccaccctgtcccgctactgcttacacaggccgggttcccacgcagaggggaggctgctccacccctactctcctcccttgctcccagcagcggaagcgcctctgacccttggcttgagtcccacgtgggggaggaggaggcaggcagcaccagcaggggtccaccaagagcccagaccagcccctctgccctcctacccgggcctcgaagggtgtggcacaggctacgtgttgagcgtggcctacgtgagccaacaagaagcaggg

SEQ ID NO: 3074 - DNA, 887 bp, Homo sapiens
accaatgttcaacaaatatttgagtggttgttatggtgatgctgatatatgaaatgccaaactatatactttcctcacatgccagcatctgctatgtccctccctgcccttctgacagtagagaagttctagtaggttaaatgcgtatacgatcaaataattgctatattaggggcatttaccagccatcgtggtgaccaaagtatcagctttgcagaggtgatcaagaaataaattggtccttggtttagatatagagagacaaatggatggaaaaactttttggccctcttccttaggatcagaagagcttcaaccagcactactacttgaggacctatgcagtgtttgtccatgagcatggaatgactcatactggcctcagagttagggactcactttaaaggaaaggggatgcagtagtgggcacatgactaagaaatccaccgatcctctcatatactgcaccaccagaagctgctggattagcagagcaaaggtcacagaacgttttcctgaatcggattctgggttaaagctgccagtaggaagaattcacatgagatttcaaaggtggaagagaaggagaaggtgtttttttcttgcaacagtttggctggggagctgagatcttcactgagggcttcctttggctccgggttcccgtggacaggcagccgatgtcatcagtggtggcttctctgtgatcactataccaccaggtctcctaaagtggccttcttgacctttgcctccccagctctttcaatggttatgtgaaactctaattatgtacattaaatatctttcagctcataatacatagagtcatttccctccccacatatggagtaattctgaatgacataaaggcttaagcacgaagg

SEQ ID NO: 3075 - DNA, 1001 bp, Homo sapiens
ctggagttgctaaagctggagctggagaagtagtgatgaggagggattattgatctcagtgcccactggacattatggcgacatctgccactcaaggtacaactatggtattttgtgcagtgctcagttttctcagcattgttagattcaagtaatttcctcctgattgattaatgagagtcttagttttgatctgtgccagcacatctgagtcttcattgctgtctctgtctcattattgacgcaagtagcccatgttgcagtgtctgtcttggagccacattcttttttaccacaatgacaatttgacaagcccagtgaattatacattaatttgcctccttcaatgggattcctttctcatcgtggaagagtggagtgagactcagagactctatatccgtttctctttctgcttcaattcatcaatgtgccattttcaatcaagggaactctaatggcccaggaagacattttgatttgattctgtagatatccatggacaaagaggaagggaatcctctctaattatgggttcattcttcagcctatttaagaatttctatagcctcctcaaggtgattcagagttggggagtctccttgctctccatgctctcatttctcgctattgacgtctgtgaaaatgcttatctcattcatttagtttggaattgccagtgtcagcatcttagatctcaatatccatgactcacaccaaaatttgaagtttagattttcagtctttttatgtgatagagaacagttttcactcccagcagtcaaacctagacaataagtttattgttccgttttacatctgttctgtctttccctgagtgatgaaatttatagatagtattcatcttaatctggaaggtgcctttccaaacacttcacaaataacaaatgtaaatcaaacacagagttttggagaatattcaaaagactattatatgcattattttgggtaacatttatatataccattttcattttgat

SEQ ID NO: 3076 - DNA, 7246 bp, Homo sapiens
tttacctattttttttccattcttttcttcccccacagttcatccatgagctcggatttcccacattacaacttcaggatgcctaatattggattccagaatctgcctctcaacatatatattgtggtttttggtactgctatatttgtcttcatccttagtttactcttctgttgctacttgattaggctaagacatcaagcacacaaagaattttatgcctacaaacaggttatattaaaagagaaagtaaaagaattgaatttacatgagctctgtgcagtgtgcctagaagacttcaagcctcgagatgagttggggatttgcccatgtaagcacgccttccacagaaagtgccttattaagtggctggaggttcgtaaagtgtgtcccctgtgcaacatgccagttctacagctggcccagttgcacagtaagcaggaccgtggaccccctcaggggccccttcctggggcagagaacattgtatagcttaccgcaaggatcagactgttgctggacacgacgtctgtgtggagccaggaggaacacatgtggtgtctgtatggctgctctctacctaggacaccagctgccacttcttttgcctcatgaagaactcttgggccagccaaactgggaacctaggtgtctgggtcttgtgacaaccaaagcactttgacactaccccctgccgagagaagaggagtggatgagcctgcgggtttgcctcaagaaacttcatgagggtctcttactaactccattacactctctctcctggagcctcatctccatgtcaagcaggagggtaaagaagggaactaagagcaggtctttcaagccacacccccacctgcggatggatgggtttctctgtaggccatgcaggcctttgtcgcagcaaaccttcccagcagcccttgagccaagtaaaaccagcacaaccagccaccagtggttggtgaggcagtgcccacaaggctcatgttgtatgcctttgataaggccatcttggctttgagtagcagtgttcctcgtcacccatttccccctcaggattacaacacctgctatcaaatcatctaagctgaaaacatgagatgcgcttggaaaggcctagtcagaagccatttcctcttatcatttccctctcctatgcaccagtaaggcccgtccagagccccagcagggagtgggccctgagtccacactgtccctgagtgatccaggaggctgcccacatccccacatgtgcactgtggttccagtgtagctgctgtgagcccactgccactgcctcagaagggagccactgtgaacctctcgagtggctccaaagagcagtggctttttgagaatggcccatacttctggcccggctggatgaagggaatgccgaccctttggcctctccccctccttccatctcttctctctcttgccctatctctctttctacttcagaaaaaaaaaaaaaaaaaaaaaaaagcctgtcattcactttttaacactttatcccaaataagatccctgtgtaattctgaagctggtgatccacttggaattgtagatagtttcaggaagctcctgcagggctgtccaccgttggtgtgtgcctcagtatttggacttccgaaactgaaagtgaaagtgtctttataggagagaaacgcatgctgctctttggctctttctgtccaacttttctagaaatgactcaaagtccattaagatttgtgaatattgtataaattagctatggaaagtagcaggtcagatggaaaattcttttccacagccctgctctccgcctccctccatcttaggagcgcctgcctcaattcctcgtcaactgctttgctccactccatcccacaggtgtgagtgggggaagtttttcattaggaatacagtctgcgtgacatggagaatggatggagggagctttgctactctgctcttggcatgactccaggatttttttctggaatccaacctctgtcctcttaggagaaggaacctgtccttggttcagatggctgggcatgaggaggaaaatttccattagtgtagaacagtgctggacagaatccggtttggaaaattacaaatccagttggtcaaaataggccatttcctatgtgtgacctattcgtggtatgccaactggactgcttcctaaacaggacgaggaaagtgaggaatatttttatatgaaagccttagcctgtctggcacccatgaaaaaaactatttatgcactcctactttcaccgtctttttgcattctctatttgtagcacaacagagttgaatgccacaaaacaccccgtttatagtgagctgttttcagtgaccaatatcagaaggaggcttgcttctggactagcctcactaattgccagcagccaccattttccatggaatggccttgggacagatgtcacctctgttatggggctctaataggaaagagaatgttttttcccttcctatgatcaatactgcaaattattgctgctcacagcttttataggattctcccaactgaaagttgcaggctttttctgtccctgtgcatcagtactaacaaaagacagcctcaccaagtctgtatatttgaacagaggcaagttaattcatccccccgtgtcagagccacaggcatgttgagggggttgatacgtagcactggaccagggcgcaaagcccagatagttccagccatgagaggagagcacaagaatgctctgcactctgcactcagcaccaccttgggtctgctttgcccagatgagggaccactaacaaccttctcagcacatgtgaatgtggactggttttaaaatgcattcattctgctaggattgggctggaagctggaacagtgagagtactttttctgctcctagtcatctccctttctcagcgtgacatcctcctgcagcaagcctagtatcactagcagtagttcctgcgactcttagcaacacaacccgaatatttgctccctgcatctgggtcctccaccaggatgggcctgcgcatctgcattgctgtacagacaaacaggccttttaatttacatcctcctttaattctcattaaaatcgcagggtttttgtttgaaagacagtcctttttttatttattttgaaaaaggaatgagttagggacccctttataactctcttggctcagactcgaaccccatggtaaagtcaccctttccgcatctatcttcaggagttgctgggacttgttactgtgtagctgcgtggggattctggtctgctcttggaccactggctggtatcctttgtgtgtttcttaagcagctcaaagatagaatgttgctggtctgctatgggttagtggagcataactcagccccaactggactccacgggtggctgaaccattagtagttgctaggggtacaactgaattcaactgccttcagaaacagggaacaaaaccagcctgacttgattcctggttgggtcagtatcagacactaggaagttgacatctgctgcttttctttgccacgtgtgatttggttaggcctgtccctggcagataaggtccttgaagcctatgcttgcctagccagggaaggcaggacagaaatggccaaataggggcaggtggcccctgggaaggtctgagctgagggatacaggggacctcccaccattgccggataccctgttcttgacaagaagatccttttccccagtgccaagccccttggatccatcagagaaatagcctcgggccttgtcctttttcacaaccccacttcaaaatcatgtcatctccctggcctgatcccgctctaagctactttgaacaactaggaattatttttctcagaggctttttgggcattatgaaatacatcctgatacatccagggcagtatacccagagctccaggcagagagtgatggaatcacctcttgtcactcactagccttaggcccttctgcaggttagcctctcagtctcttccttagcttccttagctaccacccagggattgtagtaacgtccctggcacctcttgtgggggttagctggtgcccagagcctggtaggcagcaggcctggtgtcatgggggctgctgataccacataacatcatctgggttacatgggctcctctgccatcatgattgataggaacagaacctcagccaaaaagcttcctgagctgtaggggctttccctgaggcccaggttcacctggcccctttcttccttggtcatctctgcctttgcccacagtgaactctgacttggttgttcagtgctgaatatttctttcttaatgttttgaataggtaatccattcatgtggttcacaaatcataaagtagttaaaagcctttcttgagttcctgatgcctagcaagctccgctcctcactccatgaatacctactattggtttgttccttgggtatccttccagagatcatttatgcatgtacacacatgtgtatgtgtgtctatataatttttctccttttctactcatgtgataccagacaagtgtattcaaggaacgctcctactaatgtgggaagagccatcccagaaatcagaatacaaaatgtgaacccagaattgggggatgtttttgcaatcacactcctgttgagtaagacatattttcattttattgcaacatactgaaattttagttttctgtacaaatcagaatctgcagtccctcccttaccccaaatgcccagctaatccaagagcacaaccagatttttctgattgactttctatctgcgacaggatgctcaagatcaggctctgtagctgacagcagtggcacaggcctctcccagctctgagcagcctctgcaggtgcctggacagctgctggcccctcccctaccttggccagttccaagtgaggaccagtggtgatgtgtggctgcaactgttgtggtcacttaggcaagctcttgtgtctttgatgcaggagtttgagcagcagcaactgaaggcttctattttgtggggcagacatcttagctactgagcaagtgcacagtgagtctcatgtggatatgcctgaatgtccagcgtcagttcatggagctactccctttccctcccaacttttcgttgttgttgagacagggtcttgttacccagactggagtgcagtggcaccattgtagctcactgcagcctcaacttcctggactcaagtgatcctcccgcctcagtctgtagctgcgtctacaggtgcacaccagcacacctggctaattttcgtaattatttttttgtagagacaggtctcaactcactatgttgcccaggctggcctcctcactctgtgcacacactttgaaaagaaaatgcttctggtcgggcgcgatggctcacgcctgtaatcccaacatcccagcactttgggaggccgaggcaggcggatcaccttaggtcaagagttcaagaccagcctgaccaatatggtgaaaccccctctactaaaaatacaaaaatttgccgggtgtggtgacgcatgcctgtaatcccagccactcaggaggctgggacaggagaattgattgaacccgggagacagaagttgcagtgagccaagatccccactgcactccagcctgggcaacagagcgagactccgtctcaaaaaaacacacaagaaaagaaaatgcttcctacagaattttccctttatgccttgttttccatttgacaacagaaattaccccaacaattttttttttttttttttttttttttttttttgagacggagtctcgctctgtcacccaggctggaatgcagtggcacgatcttggcccactgcaagctccgcctcccaggttcacgccattctcccgcctcgggagctgggacaacaggtgcccgccaccacgctcggctaattttttgtatttttagtacagacggagtttcaccgtgttagccaggatggtctcgatctcctgacctcgtgatgcacctgccttgacctcccaaagtgctgggattacaggcgtgagccactgcgcccggccaataatttttttagtttaagttcatttttgtccccgctgatgaaagttagagctgcttcctccaggcagccctgggagtaggggcacagacttgtgcctcgcttcccagcagctgcccagtgcctctgtccacacccacctccctggtgtacttgccccctacagcagcagcccagatcctcccctggattaaaattgcaactggtgccctaacccaaaacttgagaaaaaattctctatcacatccactcttctggcatttgtagaatctctggccctgggtgtgtcttttcctgtagctgttacagatttcttaagcagatttcttaagcagatggacatgtccagattcatgcctaaatatccagttgataactggaaaatgctggttcacggttctttagtaaagattaataagggatccccatgtgctggggagtgtgcttccatttgagtggggatatcagaagaaaaagaggggcttgtgtagtaaaccttactttgccaattcagctgtagagcccaaattgttacaagatgcaaagatgtactccactttttgaccaagcatcagcacctttggcttaccatccagtccttacttctgtgactgtaagggccccaccagtgtcagcagacttgtttgtgctttgggggaactctcttctcagctccctttgccagtcccaagcctggtggatctgcatctcacgcccactgcacaccgttcctctccatctgcccttccctcccaggcccccggtcgggggagcaggtgtggcaagtgttaggaactcccttctggtgacagctggtcttcctagagtgttgctggtaactatcgcctcttggtcttctgacatcattgccaggaacggggcactttttcgtcttgtagtttggccctcgggtttcctcactaggtattgtgtaactccctcaaaaaaaggtttatgaaatgctgaacctcaggtttcatagacgtctttgtacactaaaaattctgcagcagaatatttttaaacattcgcagttttttgtaagctatatttttgtatatttaattgctattttaaaattttaatgcattttgctaatcactcctcaaaaataaaacatgcatgtaattgactcaaacgtgtaaataaaagcaaattttgaaaaata

SEQ ID NO: 3077 - DNA, 16004 bp, Homo sapiens
gagaaatactctcacaaggacaggatgtttctgagccaagttgaagcaaaagaaactttttccagcatgtcaggaacgaagctgacgttccattaagaaaaaaaaaaaaaaaaaaagaagtgctagaggaaggagtaagaggtgaaaaggcaccagaattcagacggagctttaaattccagacagggccagcgttgggagcacgtaggaggcgcccctcggaaaggagccggagacccagctgacttcgcacttgagctccagccccgtggacatttcctgttctgcctctggaaattcaagctgaaagttacaaaacatccttttccctggaaccaagtgcttggttgggagaccatgccctccccttccttcctcggaactcctccctgatcgccccgtggcttccccaggagagatgcgaaatcagcggtagcaggtggcgcagaagggagaggggagcgaccctggggaccgactctggggaccctcgccgaagagatatcattgtgatggtcccattctgaagccagctgatttgttaccaggcaaagcactcagagaagacaacatagtgggccgcgatgaggacacaaaaattgtggaagggcccagcgtggggacatttagggcatggaagtcatttgactcaagggttggatcctagaggtcaagaattgggaggccctaagaaatgacctagctcagccacctcctttaccaggtggggaaaattagtcctgatgtgggaatttccttatccgccgctggtcagtgacaaggcccggactaaaacagaagtcttggcactcaatctaaggacttctcctccgtgcctccctatcacgccttcccaccaactggcctcctccccagcatctgtgagaattctttgtaggaattctacccccaatagtttcatttactgaaaggcagtgggaatgtactcgatgtcaagtctgtgatgcagcatgaaagaagaaacaacactggggacagtggcttcgctcagtgccactcacagtgccagttctcgatgagatcaggagactgggctggaacagaaatctacatccagcttccttcatggagaaaatcttgctgtggaggccaggcaggggagcagcagtgcttagtgaggtaactggcttaccttctgccacaggctccttatctcagcactggccagtgtgatggtccctggctggagaacaccaggaacagcattgcctcactgctgcttgagcaaacccacctcccaaatagggcatggtgatagaagaatatgcagaaaagacaacagtccctctgtccagatcccatctagacaatagagctcagattgggagccattcttttttttttttttgagatggagtttcgttcttgttgcccaggctggagtgcaatggtgcgatctcggctcaccgcaacctctgcctcctgggttcaagcgattctcctgcctcagcctccaaagtagctgggattacaagcatgtgcctccatgcctggctaattttgtatttttagtagagatggggtttctccatgttggtcagcctcgtctcaaacttctgacctcaggtgatctgcccgcctcagcctcccaaagtgctgggattataggcatgagtcactgcgcccggcctgggaaccattctttaagggaggtaatgatattctagagatcttcctgtagttcctgactcacagagcacaatttttgtgaagattagaagaggctaggtgtggtggctcacacctttaatcccaacactttgggaggctgaggcaggaggagcccttgacgctaggagttcaagaccagcctgggcaatatagtgagacacccccatctctccaaaacattaaaaaaaaaaattagtcgggcgtggtggcaagtgcctgtagtcccagctacttggtaggctcaggcaggaggatctcttgagcctgggagttcgaggctacagtggagcctcggcttcccaaagtgctggaattataggtgtgagccaccatgcctggctacataaattatttggaattccatcatggacatttgtctcttctcttcatttatttatttgtttaatcactaacttatatttgtaggggcttgtggatttcttttaatactttgagttgtaatcaaatactgatttattaatcttgttgctcaaattgttccagcttcgcccattgagcgctctctcatttggcttctgtgtccctttgctagaccccattattgtgggtcttggtgttgtatttgtgttttgagcactttttttttttttaaccttctggttctacaagatactccaggctcatcttatatgttccctgaccaagtcctagaatcagccatttcttcaagtatccctggttcctttcgttggtgcatggtgttgaaaaccaaaatcttggtgctagatgtgcttgttgatactggggtgccattggttctaggccctctcagctgatagggcaaggaggtatatgtgtgtgtgctgacttcttttttttgagactgagctcacactctgtcgcccaagctggagtgcagtggcacaatctcggctcactgcaacctccgcctcccaggttcaagcgattctcctgcctcagcctcctgagtagctgggattacaggcacctgccaacatgcccggctaattttcgtatttttagtagagatggggtttccccatgttgaccaggctggtctccaactcctgacctcgtgatctgcctgccttatgctcctgaagtgcatgggccactgcacccagcccatgtgtgctgacttctatgtgtaaccatctgtatctatattaagctaaacatgaattcatactgatgtctataactctaattcattgtcatatgggtcactgtagacctccccttgcttacctgtaactttccactacaacctgaaacctggctcccaccatctgccattcatccactcaattgttcaactgcaatgtacacatatagtggtattagagtggttaacgtggatccccatgagaagcaactttatcaaccagatgtcagtgcttacatacagtttcttttgcctttcgtcttaacggactccactcattcctaaagttacttaggtcaacagtttttccctacaccattttcggtgcagttgttttacacatttgtaatacagttagattgatttgtcacagtcggcatttcatctgcatttcctctgactgcctaaatgatttttctttgatttgcatacgtaaaggttcactttctgtgttgtaaagttctatgtgttttgacaaatgcatagtgtcctgtttccaccattacagtatcatataaaacagtttcacaccctaaaaatcccctgtggttcacctattaagacttactgaggagtaacacctaggggaggagaaggacagaaagcaggactggataatagagccttcaggctgtgatgcaggaaaaacaaagtttctgcctgccccatggggagcaccatagcaaagcttggcccttagagagtaccctgttgggcagcagtggccaggactttatcctactgccttgctcagccattgtttggggctgccagagaagactgatttcagctcaagagaagagacagacccagaaggcactaacagctggaggttctcagctaaccacattccttgaagctgggttgctaagtcctttcttggcgagagatctgagtgctgtaactctgggtctgccagaaatatctctgaggattccaagcaggggttggctgaccactggtcaggaatcttgagctgaggattcctccatcacgtgggatttgggaccagatgatcccattggctgccttcagcctgcttgaatccaggtgatccagccattccattccacacattcagcccactttgctcaagcctctgcttcccttcttgcattaattatcttatgctctgctgcatcctagaggtaggctcagaacacctccttttccccagggaccattcctggagggccagagaagccagaagacagagtctagggttgcccgcacctttttgatcccaaatgtggctgtctgcacctttttgatcccaaatgctcaagaaagtggttacagtatccatagcaatatagatcaaggagttgaatgcacataaaaagcataaaaagtttgtgatgatgggcaaaaaaatggaaacattctaagctaagacttcaaaaactaaatctttgtctgaaatgtctcctccctgtggaatgtgcaaaaagcaaaacagcactccctactgatctatccatatactatatctggcaggtaccattcttttattttcttccatcttaactctcattctcatggtgctcctggatttccatttgcaggcacagagtcattttagtgcaattctgatctttctccgcaggaagatggaaaactttcagacctcttggagaaagcatggctctgatgttgtgctctatctgtgcttattcttccttgtatttaacttgcttaaggttaaaagcctgttgtgttttgttgtaccttggcagctctctctggctcgcgagtatcctaaagtcactatatggcctctaaggacagtcttgacttctaagccaaaagaaccttttattttactttgtctgtctttagagatttcctttgaatgtttgcttctgttctgcagcattttcaggctctgtagaccttgattgttttgctcagccagggcatttaaaaaaatactcatgctgctattttttttttttttttgagacggagtctccctctgttgtccaggttggagtgcagtggcatgatctctgctcactacaacctccacctcctgggttcaagcagttctcctgcctcagcctcccaagtagctaggattacaggcacccgccaccatgcctggctgattttttttgtatttgtagtagagatggggtttcaccatgttggccaggctggtctcaaactcctgacctcgggtgatatgcctgcctctgcctcacaaagtgctgggattacaggcaggagccgccgcgcctggcccatgctgttatttttacacagtgaaccatgaatactgattttaattccaaaggctcacaaattaaagagcttccttgaaccctggccctcaggattctttcagtctcctggtttttctgtctgctttgtcatttctcagtggaatgactaaagccagaacctgctgggttagtgaatggaaataaagtattggtggatgtactcttcctgccctgcccgtccaagactagactgtggggttggaatccatgtttcaatacccaaacactgcaccagctcacgactacaaaattagatgagacccaaaaaaatacaaagagtcaatattccaagaagatacttgcggttactgggtccaagatgtttgaattataggtagactctatctctgccagggactgaaatacggccagggcataaaaaatagcctgtttaaaaaaaaatcaataaaaatctcagaaagagcacactgtccctggaccattatatacaaaaagaaatgacaagtaaatggaacaaaacaaaagaagtttataaacacaaatgcttttattcctctctctgaaaatacagactgacactgtacacttggcagctgtttccacagcagggaagcagggtcacaggtctgaagcatgagttctcttctggaaaccacctactgattataggtgacagttgcatcaccttgaaatggaggaacaaagacttttttttgccagaatttggcattgctagcacaaagtgttagaaaacggtgacacacagagtggctggtagaactgcagaggaatttctgaaagtgagccttaggcaaaaggttggaaacttgtgctggaaacttaccttatgattaagcatgtgactcccacctgacttaattctcttccagtcccaagggttccaaggccagagagaggtcctggtcttgattgctggcatgtttactcttccaagtacactgagatcaaatgcaaagacaaaccatcaaaggtaattcttttctttgacattgaatatacctgggatggattttaaagtaaaaatttttatttcctagtgaaaaataacagatatgtaatctttgtatttggattaagtgtgaatgaaggaaataatgatcgaggaaagaacaaagaactgggtggtggtgatgcaagctgagtcctggttctggctttgctactaactataacttgggcaagtctgtacttctgctgcatagaatatatttacttatttctttttttgcttgtttgttttgattttatttcgagacagagtttcactctgtcacccgggctggagggcagtggcacgatctcggctcactgcaactttcgtctcccaggttcaagcaattcccctgcctcagcctcccgagtagctggggctacaggtgagcaccaccgcaactggctaatttttgtatttttactagagacagggtctcaccatgttggccaggccggtctcgaactcctgacctcaagagattcacctgtcttgacctcccaaagtgctgggattataggcgtgagccactgcacccagccaacttacttctttacttgtgtaaatgaaagaaggtagaactacatggcctctgagggcctttccagctctgttctgtgagtcagtttcttattttttatttttcattgtttaggcagtgccaaaacaataatgtcaggtgggttagggtacagatttgcaagacgttcatcctgaggctggtagcaggccccaaaaaactcttacctcatccatcatttttgcaaagatgaattcagagtaagacagacatcaaggtaggcattcagtatatatttgttgaatgaatgaatgaatgaatgaatgaatgaataactcaggcagccttgaggaggaagagaaaggaaacattctgccagaagaaatacaagaggaaatgtatttgggacaggggatggatttgcttgatgataatggttggggggcagttttatagacattttcagctgcagctgaactttaggcctgggcagtgttagggttagggctagtttacagagcactccttatctatagagtagggtgaaatgattgctggcaaggctgccaagaaatacagttcttccaggtacaggtggcttaactacaagataatggtactctttttctcctcaatttaataatgagtattaattaggatttgatctggctgagtgtcatagaaactcaaaataatagtgactaaatgatatatatgtttatttttctctcccataaaagaaatctgggccaggcttaatggctcatgcctgtagtctcagctatttgggaggatgaggcaggaggatcacttgagcccaggagttggaggttgcagtgagctatgattacaccactgcactctagcctgggcaacagagtgataccctgttaaaacaaaacagaacaaaaaagaattctgggtgggcaagatagggcaggttcagagcctccatggtttcagggattcaggctcctttaacctcagcacatggcttgtacttcaagattaattatggctgcttgacgactggtccgaaggtagtgagttatgtcaattgattgtccacagtcagttacagatcagactccttattctactctatcccccttctcactaatgcactcgacaggtcttgaaaaatagtatgtggctgcttgaattcagcgatcccatcagtatcacagccagcagggaaaagaaaagaccaataaagggctcacctccgcactccccattcatgacacttcctggaagttgaacttgacacttctattttcttttttcctttttttgtatttttagtagagacggggattcaccatcttggccaggctggtttcgaactcctgacctcaggtgatccacccgtctcagcctcccaaagtgctgggattacaggcaggagccaccgcaccgagcctgacacttctatttacatcccattgactagaacctagttacttggccaaacttaggtgtcatggagactgggaaatgcagcttttcttcataatagctgtgtgcctagctatcagggttgggttttgtttatttgtttgtttgtttgttttacttagagagaaagggagaagtgatactaggaaatagtagcttctgccactttgagagatgacagacttattccaaccacatgatgatgcccccattgctcaattcctttggcctggatcacttaaaattgcccatcagggtccataggaactattttcggtattctttgattttaaaagtagttcaagtccacacaggacagctgtgatgagtagtcggccgggggtgggggcgggtaataaaactgaatatgaccataagaataatatatgggcttctgcttctgggtattatagataattctgggtattatgaccattcctgcagaaaataactctaaaatctggacatgatatacaaagtgactgcctaaaggagctgaagagaggacataagtggatcgcctctgctgttgcatgttggcttggagaacagaagatgaggagccaaataagcaagtccttcagccccaggcttctagcacggggctgcatgtaggctatgcattctggggagtgaggagatcatgaatgctgaaaataaatgaaggaatccagaaaagcaagagtcaaagaaggcatctgcaggccaaatctctgatcaacccctgacccacatacacacaaaatacactcaaagcagctcagctaaagacaaagatctgcactcagagtagagctgcctccccagaaacagagctcgcagttcaggcccagcaagaaaattacctgcaaaacaaaggaaaaacaacactcatcagagaaaaagaacagaatctggaatcttcacaacctagcattcatcatatccaagattgaaacccaaattatgggacatatttaaaaaccaggaaaatggaacgtagtcttaagagaaaagtcaatcaaatctgacctggagatgaataatatattgaaacttaaaaggcaagggttttaatttttgttttcttgttttttttctgtttgtttgtttgtttttgtttttgttttttgagatggaatcttgctctgtcgcccaggctggagtgcagtggcgcaatcttggctcactgcagcctctgcctcctgggttcaaggaattctcctgtctcagccttccgagtagctgggactacaggcgcacgccaccacacccagctaatttttgtgtttttagtagagacagggtttcaccatattggtcaggctggtcttaaactcctgacctcaggtgatccacctgcctcggcctcccaaagtgctggcattacaggcatgagccaccgcacccagccttgttttctggggttttgttgagatgaggtctcactctgtcacacaggctggagtgtagtggtgcgatcccagctcactgcagctttaaactcctgggctcaagcaatccttttgcctcagctagcatgctcagttaatttttaaatattttttgtagacatggggtcttgctatgttgcctaggctggtcttaaactcctggcttcaagcaatccttccaccttggcctcccaaagtggtaggattataggtgtaagctctcctgcccagccggcaagggcttgaaagtgttatgttattttatagttttaggaggttttgtagctctctatgatgaagtttaaaaattaagaaaaaaagcttgtttttgattaatcgaaatctcagcacagaaatgggacatttcatcagagaaatagatacaatgaagaagagccaaatggaaagcccccttttttggttgctctttttctgctttcaaggtttatattagcttgacttagatgtgccttggagtggacttcgttatgtcccttctgcttagtgtttgtctaatatcttgaatctgcaaatctctgactttcattacagctgggaagtgtttggttattatttctttaaatattttttctacttgagtttcttctctccctctgagatttcaattacatgtatgtttgtttgatatcatctaacaagtctctgagattttgttcattatgttctaagtctttttccactctgttactcattttgagtaattttgattgatctgtcttaaaatttactctttcctttaacatgtccacttggctgttaactccatctggtgaattttctacttaagaaattatacttttcagctgtagaatttacatgaagaagtacattatcaactgtaaatgggccatgaaaagttaaggttgaattttgtaatttataaatcaactattaaacagtgcagaatagctgtaaagcatcaggaaaattaaaatagaatatatcttaaaatattaagtaatttttaaaggcgggaaataagaaatgaagaaacaaatgtcagaggagacaaatagaaaacaaaataaaacaaaaatgatagactcatacccaaccatttcaaaaattacattgaacatttatgagctaaacactccaattaaaagacagagattaataattgtttttaaatggatacaaaaacaattataacatctcaccaaagaagatacacagatgccaaaaaatttgaaaagctgtttaatagtatatgttattaggtaattacaaattaaaacaacaatgagataccactacacatctactagaatagccaaaattcaaaatgctaacaacaccaaatgctggtaaggatgtggaacaacagaaactgtcattcattgttgatgggaatgcaaaatggtttggccactttgaaagacagttttgacagtttcttgcaaaacgaaacatacttttaccatatgattcaacaatcttactcctgggtatttacccaaatgagctgaaaacttatgtccacacaaaaccctgcacatggatgtttatagcaactttattcataattgccaaaagctggaagcaatcaagatgtccttcagtaggcaaatggataaaccgtgatatatccagacaatggaatattattcagtgttaaaaagaaatgagctgtcaagccatgaagacatggaggaatgttaaatgcatattactaactgaaaaaagccaatttgaaagggctgtgtactggatgggtcaaactatacgacattctggaaaaggcaaaaccatggagacaaaaagatcagtagttgccaagggttgggcagaggcaaggatgaatagatgaaacatagaagatttttaaaggagtgtaactattctatatgatactgtcatggtggctatatgtacataaatacattagacatttgtcaaaactcatagaatgtataataccaagagcaaactctaatgtaaactacggactttggataataatgatacatcagtgtaggttcattgattgtagcaaatgcaccactctggtatgggatgttgatagtggggaggccatatgtgtaggggtagggggtgtgtgggaactgtctgtactttcatctcaatttagctgtgaatctaaaactgctctaaaaaaataaaatccattttttaaaaacctaaatataaactatgtgcaaagacatactttcaatataaagacagaaggaaaccaaatatagatggatagaaaaagatatatcatgtaaatagtaagcacaagaaagctggagtggctacattagtatcaaataaaaatagatttctaaaaaaaagtatcataaaagataaagaagggcactttagaagaagaaaaggaataattgatcaagatgacataaaatttacaaatttatttgtgcctaataatagtctcaaattacataaggcaaaaactgatagaatgaaaggaagaaataggcaattataattggaaattttaatgtctctcagaagttgatagagtaaccaacaaaaaatcagcagacagaaaacctgaacaacattatcagtcactttgacctaattaatatttttagaacatttcactcagcaatagcaaaatgcacattcttttcaagtgcacatggaatgcttaccaagatagaccacattctggaccataaaaaagttttaataaatattaaaaaggttgaaatcaaatagtttgttctctgaccacaatgaaattaaattggaaaccaaaaacaataagataactaggaaaaccccaagcatttggaaactaagcaacacacttctaaatatttattgggctaaagactaaatcacaagagagattgaaaatattttgccctgatgataatataaatacacatttcaaaatttgtgcaatgtagctaacatagcactttgagggaaatttacagttttgaaagcctatacgaagtggggaaagttcttaaatcaatgatcttaattttcactgttaaaaaatagaaaaaaaagagtaaattgaactcaaagcaagcagaggaagaaaataataaagataatgacagacatcaatgaattagagaacgaaaaaaagagataaaaaaatcattaaaagcaaaaagcagtcctttgaaaaaactaataaaattgataaatctcaagactgactggcaaagaaaaaaaaatgaacaatatcaagaatgagagaagggacattattactttggatattaaaagaataacaattctctattgttatgaacaactttatgacattaaatgtgtcacagatgaaatgaacacattctgggaaatacataaattataaatctaatcaaagatgaaatagaaagcttgaacagccctgtatcaattaaagatattgaatttgtaattaaaaacttactgagagaattctgggtttagatgcttcattgatgaattctgacaaacatttatgaaaaaataataccaatcctacaaaaactgtttaagaaaataaaggaggaggcatgattttatgatgcagtattattctaattctacagccagatgaagacatcttaagaaaaaaactacagtccaatatccctcatgaatataaatgcaaaaatcctcaacaaaatattagcaagccaaatccagcagcataaaaaaggttatacactatgatcaaggggcaatgcaaagtttttttttgtttgttttgttttttgggttttttttgagatggagtctcagtctgtcgcccaggctggagtgcagtggtgtgatctcagctcactgtaacctctgcctcccaggttcaagcgattctcctgcctcagcctcctgagtagctgggattacaggcacgcacaaccacgcctggctaatttttgtatttttagtagagacagggtttcaccatgttggtcaagctggtctcgaacgcctgacctcatgatccacccacctcagtctcccatagtgctgggattacaggtgtaagccaccgcgcctggccaatgcaaagttgttttaacagctgacagttaatcaatgtaattcaacaaattaatagaataaagacaaaaacacagacacagtggtgcaatgtagctaacatagtacttagagggaaatttatcattttgaaagcctataagaagggggtaaaaggtcttttagtcctagccactcaggagactgaggcaggaggtttgttggagaccaggagttcaaggctatagtgcactatcattgcacctgtgaatagccactgcattccagcctgggcaacatagcaagatcctgtctcttaaagaaaaaaaggaagaaggtgaaaacaatatgatcagttcaataggtgcagcaatagcatttgtcaaaattcaactcctttttatcattaaaaaatctttcagcaaattaagaataaattaaaacttcctcaacctgattaagggcatctacaaaatctgtcagctaacatcctactacaatgtgaaaaatcaatgctttctacctaagacgaggtagagggcaaggatgttggctctcatcatttttatttaacttaaattgtataggagtgcctagtcagtgcaacaaagcaagggaaaaataaggcatacatgctagaaagaaataagtaaaattgtccttatctacaagtgacattgtatagaaaaccctaagaaacccacaataaaagctattagaggtacaaggttgcaggataaaatatacaaaaatcaattcaaggttgcaggataaaatatacaaaaatcaattctgtctcacatactagcaactaacatttagaaagttaagttataagacactttgtttacaatagcataaaatacttagcaaaagacatgtatgacctgtaggctgaaaacaataaaacatgacaggaagatctgcataaatgaacagctataccgtgttcatggattcaaagtctcaatattgttaagctggcaatcctttttgaattattcaataaattcaatgcaattcccacgaaaatcgtaactttttttttgaaaaaaatttgcaagagtattttaaattttatatgggaagtcaaaggacctagtatagccacatcgttttgaaagaggagaacaatattggaacacttcagctacctgatttcaagaacaatatgtggctctgaaggaatgaaccaattttattctttgatctataaattggcatttaaataatttccaaatgaggagagatgggtagctctgagataagcatgtgacttcccaaggtggccaatttgaagggtaattctcctttgggatgattgctaagggaaaaaaaaaatccatgttgaacataaggtttgtaatcaagacaactggatttaaatattggatgcaccattcagctctctaaaactgagtatcttcatcttaaaatgggatgtgcagtgtaaggattaaggcagtaaagtatagaggctaagccgtgtgctatagcactggagctatcttacccaggtttgaatctagcttggccattttctagctatgtggccttgggtatgtttaaccttactttgcttcatcttgctcatttgtacaagcactgctcgttttattgcatttcactttattgcacttcacatatattgcatttcttacaaattgaaagtttttggcaaccttgtgtgggataagtctattggtgccatttttctaacagcatgtactcacttcatgtctctgtgtcagcattttttagcaataaagtattttttaaatcaaggaatgtacattttttggacataatgctattgcacacttaacagactatcatatagtgtaaacataacttttatatgcaccgagaaaccaaaaattttgtgtgattcgctatattgcaatattcactttattgcagtggtgtgcaatggaacctgcaatatttctgaggtatgcctgtaaacgagaatactaaaagtgcctagccatagggttgtggtgaacagtaaatgagttaataaatctaaagcacttagaacagaatctgagcacataaaaagtgctctataagtattacccactgttatttttttcctggtgctatgaggcccgaatgtggttactttcgttaaccaccaagcgtagttcctagtatccaacaaatgttagtgcccatccctctgcagagcataagtagcattctgggggtagcgtttgacactgaaggatgtatttcgcaatcttataggcaatcttgagtttcaacagcttaaattttctttccttgctatttttccaatgtttaaagaataccttcttggccaggcactgtggctcatgcctgtaatcccagcacctgacaggctgaggcaggcagattgcctgagctcaggagttcacaaccagcctgggaaacacagtgagaccccgtctctactaaaatacaaaaaaattagccagatgtggtggcgtgtgcctgtagtcgcagctactcgggaggctgagggagg

SEQ ID NO: 3078 - DNA, 634 bp, Homo sapiens
tgactgagactttaaatataaaataaaaagctgtaacattgggaggccacagctacagtgacttggaacaaacacagctgagactaaccctgggagctgagactttgcttttccctgtacactctgagaagctaccatctgatcagaagagatatcactgttgcagtgaataaagtcagcatctaatcttcctgttttcacagcagcaccatatggcagtgacagcaccttctgcaagaagagaaactctaaaccaattacaacaatatcatttctgtgttgaaccataagtcattggaaacccactgcaaccatgcttccataatagcagctggaatctccaattctacagagaaaaggaatgttgaagtaacatacatgtagctttgaggaggaggcacgtgcattcaagctcatggagaggattgacagccacagacaggcactcataagaactgaatgtaaatcatcaaagagaatatactcaggaggcactgtctaccatagagggaaggaagatgagatgggtcattggtgtcttcccacaacttcatacatctgctgacaattgccaaatttggagtcatgtgaaaagagacgggctgagtaagaaagatcagaggatatctttgac

SEQ ID NO: 3079 - DNA, 1410 bp, Homo sapiens
aaggaaatgagaactccgtggtgtctcggacaggtcatctagtggctgttggataaaactcagatggagaactcttttttttttttgagatggagtctcgctttgttgcccaggctggagtgcagtggtgcgatcttggcttattgcaacctctggatgccccacaagagtgtgtagactgctgcaggcctaaggactggcctagccatcgcagccactgccaacaccagcacatactgcttgggggccagaggtttgtcctgtcactgctaccgccatcatccacatcatgcccaatgaccaggtaaaagagcccgctgacccacctggcccactgctgctgctactggcatctgagcaaatcacctggaggcccaagaattggcctacctggacccatttatagtagtggcagcatacgtctaaggataggcatgcttggcccatggagaggcccacctggggactccatttccaggaaactttaccatagcctccactaacaactgaaccataagtgactgaggaaatcatagacaccactgatgctgttaatagccaaaagaaaaataaatcatggagaatatactactgcatgtatccagaatcaaagccaaaatgtcctacccaaggaacacatcttcaggaaaaagatcttccctaccaaaacaaattcaaaaaatttgaaaaagtgactgttataccagataggcagatatcaacttaaggacctgagatacataaaaaaagtaaggaaatatgacacctttaaagaaatatgatagttctccagtaacaaattccaatcaaaaagaaatttatgaaatcctaggccaggggctgtggctcatgcctaaaattccagcactttgggaggctgaggcaggcagattgcttgagctcaagagttcaagactagcctgggcaacatggtgaagccttgtctctacaaaaaattagcagcatgtggtggtgcacacctgtggttccagttacttgaaaggctgagacaggagtattgcttgagactgggaggcagaggtttctgttagccaagatcatgccactgcacttcagcctgggaagtagagcaagccctctgtctcaaagaagaaaaaaaaaaaaaaacttatggaatcctggaaaaagaattcaaactaatgatattaaagaagccgagtgaaatacaagataattctgaaaaacagtacaaagaaatcagaaaaacagttcaggatatgaatgagaaatttaccaaggagacatcaaaaaaataaccaaacagaaattctggaactaaggaattcattaaataaaatacaaaatacattagaaaccttgaacaatccattagattaagcagaagaaagaatttcagaacctgaagataggtcttttgtaataacccag

SEQ ID NO: 3080 - DNA, 2270 bp, Homo sapiens
cttagctgtagttttatgaagtttctgtacttgtttttatgaagtttatatatgtagttttatgaagtttatgtattgatatgctaattatatttgttattatttgaacttacagtttttatttattcaatgcctggatacacatgcagtataagagagcggatgctgtattctagctgcaagagccgtctgctagaaattgtagaaagacaactacaaatggatgtaattagaaagatcgagatagacaatggggatgagttgactgcagacttcctttatgaagaagtacatcccaagcagcatgcacacaagcaaagttttgcaaaaccaaaaggtcctgcaggaaaaagaggaattcgaagactaattaggggcccagcggaaactgaagctactactgattaaagtcatcacattaaacattgtaatactagttttttaaaagtccagcttttagtacaggagaactgaaatcattccatgttgatataaagtagggaaaaaaattgtactttttggaaaatagcacttttcacttctgtgtgtttttaaaattaatgttatagaagactcatgatttctatttttgagttaaagctagaaaagggttcaacataatgtttaattttgtcacactgttttcatagcgttgattccacacttcaaatacttcttaaaattttatacagttgggccagttctagaaagtctgatgtctcaaagggtaaacttactactttcttgtgggacagaaagaccttaaaatattcatattacttaatgaatatgttaaggaccaggctagagtattttctaagctggaaacttagtgtgccttggaaaaggccgcaagttgcttactccgagtagctgtgctagctctgtcagactgtaggatcatgtctgcaacttttagaaatagtgctttatattgcagcagtcttttatatttgacttttttttaatagcattaaaattgcagatcagctcactctgaaactttaagggtaccagatattttctatactgcaggatttctgatgacattgaaagactttaaacagccttagtaaattatctttctaatgctctgtgaggccaaacatttatgttcagattgaaatttaaattaatatcattcaaaaggaaacaaaaaatgttgagttttaaaaatcaggattgacttttttctccaaaaccatacatttatgggcaaattgtgttctttatcacttccgagcaaatactcagatttaaaattactttaaagtcctggtacttaacaggctaacgtagataaacaccttaataatctcagttaatactgtatttcaaaacacatttaactgttttctaatgctttgcattatcagttacaacctagagagattttgagcctcatatttctttgatacttgaaatagagggagctagaacacttaatgtttaatctgttaaacctgctgcaagagccataactttgaggcattttctaaatgaactgtggggatccaggatttgtaatttcttgatctaaactttatgctgcataaatcacttatcggaaatgcacatttcatagtgtgaagcactcatttctaaaccttattatctaaggtaatatatgcacctttcagaaatttgtgttcgagtaagtaaagcatattagaataattgtgggttgacagatttttaaaatagaatttagagtatttggggttttgtttgtttacaaataatcagactataatatttaaacatgcaaaataactgacaataatgttgcacttgtttactaaagatataagttgttccatgggtgtacacgtagacagacacacatacacccaaattattgcattaagaatcctggagcagaccatagctgaagctgttattttcagtcaggaagactacctgtcatgaaggtataaaataatttagaagtgaatgtttttctgtaccatctatgtgcaattatactctaaattccactacactacattaaagtaaatggacattccagaatatagatgtgattatagtcttaaactaattattattaaaccaatgattgctgaaaatcagtgatgcatttgttatagagtataactcatcgtttacagtatgttttagttggcagtatcatacctagatggtgaataacatattcccagtaaatttatatagcagtgaagaattacatgccttctggtggacattttataagtgcattttatatcacaataaaaattttttctctttaa

SEQ ID NO: 3081 - DNA, 11568 bp, Homo sapiens
gtagtgtgggtatcaggagaatgaggcaagccaagctgtgaggagtctgtgggtcatggctttggcagcgtggaacctgggacatagagtcccccttgatacggctgttcagcagaccaactttgttgtaaatatttagataaaaatgggctttagagcagccacatctgaagacccacaaggctgaatgttacacagggggagcaccattatttaatctgaacatctggaatccatcatgtgtagtgaaggacaagatgtatcctcatttttaagccaactccatgataaaattgatggatgggaccaatgtgtacagcaatcagaatctgattgaagataaactcatcctatttggatcagagcattagaagaaagaaagaactgacacttctcaaccttctctagttgaagacttctctttgctataactacttgaagagttcagcagaaaaattttactgaagaatccctgatcctcctttaagtagctgtagagaatattcactaagtgtaatgggacacgtctctctcatgcccacttcttttctcttatccctgcaagaaaatgaagttttgttggagtcagaggtttattttagtttattttaatcagaaacgtgtatgaaatccaaagcacatgatcttcatttttaataacgtaaaccatccccatgtttatgtgctttctctggtcctcaacctttttttttctttttaattttaagaacatctgtccccactgcaacttcactttcatcaggaaatctaattacagagatagaaaagagtatagtaggtgaagcaaaagacagcagctccacctcttaatactgaatacttagatgactgccagatgaatagctggatccttttgtggctaactaactcacctggtgtagagaaagacagttgatagatcaaaaaagtatacagataacagagagcaagtgatatggatatgaaagacattagggagcatacaaatgcagtttggccaggatttatttctagttatggactgatgaggagacatggggaaaaattgtcaaattaaaaaaaatctttttggcaaatttaaactttgcctctatcctttttctcttaatctgctacccagatatgcacttcaaataggaatgtgggcctactggggcatgaaatagttgagagctattcaacaatgaggagaatgagagaaatctatttagaaggacattttagaatttaagccagttgaaccttaatagtcacagataatttaacatgacccctaaaccattaggggggtttttactacaaggacttggctctgtattaacaatgtcatccttcttagaaattgataactatagaagttatcctatgtggagtaagataagaatgactgctcttcatgtttacaagagattagagtggataagaaccaggtgaaacaggaatcccaagggatctccttccttctcagagtcatagccattccagggaatctgcacattttctggctttcccatttctatcagatggttacttaggaacaaatgaaaatcagcaaaagtgccatgataattatcacaaattcgtatgaaataatgaggcagttgaatgcattttttctgtcttatctctgtttgtcaatgagctaaacagtgtgttcaggtccctctgaatacttggaggagcaagattctttagccttgtctcactgattcccaaagtttatctaagtctttccagaggaggacctctattgtcaacacttgatagccaaacccttcctttgtttttttccttctatacactacttgttaatcaacttgcacaaaaccaatttctggttcaactttgtcctgagctgctaactggctatgactttattttacaggtgcagtaactttgttagctgttattttgaggagctccagccatgggctcatttgatagatttaattgccaacatcttgaacaaaccccttgattttaaaattttaatttagcatgtttaacatgaaagaggattgccgaataagtgtcccatttgatttactctataagtaatacagctgtttgtctttatttgaaaaataaaggtagacacttagaaatgaaagatgaaagcttggaatgtgacctgtaagtccagaaatcacagaccagaaagcaagaaaggaacatgaacagcacatgtcaagtatccaggaatttctaagtataatgcagaacttggggcatgagaaataatctctctctctctgtgcgtgtgtgtgtgtgtgttttctttatctgagcatgtttttttatatactgccttttctggtaacttcattaggtctgtataattatagtttgcttcaaccttagtctgcatcagtattcattattatctatttggtgcattgtagcagcataaatataactaaattactagggtcaaaccataatgggagctgttgtgatggtaattagagcagaaatatagtccttttttggtaaaacttgcagaattgtagcatgaggtgtgttcttatagggtacaattaaagccaggttgtgggttcaaggtggtaaaatgatggataatgaaggtacaccattaatcacagttccaaaagatgctctgtatcaattcttttctctctgaaaggtagctcagaggttgatgctaagacaaaaaccaacagagggcttagagatgaaaagggaaaaaagaaactgcgtataaatagtactagagtaagttaaaaagaactatcttataatgtgcttaaaattatggaaagtttctgaattctagcctgaaatttaagaacagttctaagtaattccttaaatttgttaagtcttttcaatctttgggttttcagataagacaaccaaaggactgactgcagtaaatagagcttttgaaggcattatcattctattaacaataaagctgagaggatagatttgttttatgattttcacatgatattacttgtcggtgacctgagctgaatttgaactggcattcttgaaaagaaagattccctttacaaatcctttaacctctaatgcagtcattttaattcacaacaggctagaaccttgcataattgttctcagctcaatacaatctttaacagcttttgatttacatattgggcagctgttttgaataagaagttgtccatcatggatccttttgtcatctgtccaaggaatgtatttataaatggttccaattagagtaatgaaggtttcatgtgaaaacaatgatcaatagccaaccttaaaaacaatataagtcaaagacagatgtaaactgtgaccaggcataacaaagtcaagttatctatggggaatgtataccatcgctcctggaaaacaaatagaaattttcaagtctttgactattggacagatgttgattccatgacacagaagcatttagattctgtgttaaataaatcattgacccacatatgactgagactatgcagattaatgagaacaaccgtggccagggaaaaggcagctcagtgaagccagctagatcagatcctcactgtgattatggactgcaccccatcagccttcaggaacagatgtctgttgctataagaaggagccacgttgatagtgaagtttctgtacaaacacgtttcagactatgtcagacacatctggtcaagggctttgtaatagctttatttatttcttgcctgaactggaacgtcagaagcatgcactccacattaagccaagagttccctttgttccacacggctgccacagctggaaccttttgttggatgacacagccagatcttctgtagagaccattatattctttggcgtatttcagtgagtttgcatcttttaatccacctcagcaagcagtggggagttcataagggccatgcacagagccttctcttaaaactgtacaggaacaccagctgggattgcaaaattgatagcatcaaggtggcctgctaccaagttggccttagtgagatgtgctctctgccatagccctgtttgcttagatcatttaggaaaaaaacatcaaaacagaagtaacttctcattcttgtgtgttgaggttgctcataggttactctctccagccaaaaagaaaaaaagccaaagaaattttgtcatagactataagatctgtgtatgatgaacagtttcatgagggttactatagaaacatctagcctacaaaagtagaagggaccagttaaaatgaagttctgcctagatttctaatataactaaagctgtttttttccctctccccctctcttctgtctctctctttttttctctctttaaccacatcaattgacagcccaatttccacatataaaataggagtcataagttaaaagaaggtgggggctgaaaaacaaaagtagatattcagaaatgtgcacctagaaaagtctttcagacacattgagttgattttgtttggcctgattatcagaagttcagtgccgtttttagttttcgggaacacagtctcaaacatgagagtagctctactccagccccggggcacccgccctcactttgcctttgccacatccttcctaccaactggcccccaactcagaataaaagctggtctagcctttccaattggcaagccaatgacattcacctgcatttctcttgctagtgatcctcttaactaatgcttaagctccaatttcttgccatagtgcttatcacagattgtactcctaagactgacctccagatttatctcctgaagcatccccatcaagagtgtctgatgggggccagacgcagtggctcatgcctgtaatcccagcactttgagaggccaaggcaggcagatcacgaggtcaggagatctagaccaccatcctggccaacatgatgaaactccatctctactaaaaatacaaaaattagctgggcatcatggtgcatgcctgtaattccagctactcgggaggctgaggcaggagaatcgcttgaaccaggaggttggaggttgcagtgacctgagatcacgccactgcactccagcctggcaacacaatgagacttcatctcaacaacaacaacaaaaaaaatagtgtctgatgggaagaaattctcctccagggtctactccatcccgaagacatttctgaaatgattgagaaagccctcaagcataacttgtcattgatgttgctagggcattctattaggaagcagatgcagaaagagctgtatgtagttaggggcatgcacatgtgtctttgctcaatatagggggttgtatacagttgttctccccacacagcatacaggaagtttaaaattaagctatactttacttacatggataaaagtcttgatttttagttttaactaagtatttgctgttttctgttcaaaaagaatgctgggggttcatgtcagtgacagagtgaaaagctagagcagtagcatcaagatataaaccaaggctcattgtctctcttttcatatatattactttttaataaatctatgtttttctaattacagaagtagtataagctctttaaaaatttagcaaaataatagatgagcacagaacagagaaagttaaagaaatgaattttatgcaagtaaacattattattttcttatattttcttcccatctttatatatatataatttttagcaaaaatagtaacacactacatatgctatttgtaacatgctcttatacttacaagtaaagcaaaaaaatatataatatgtcagtttagtatacgtaaatcatatgtaaatgaaatgccataataaaaatacatcacacataatttaaatataatatgtacatgaataagttaagttataatatgtacatgaataagttaatatgtacatgaatatataagaacacatctaagtaacactttttttacaaaaaattttttatagctacacaacattacactatgtgtatcataaatatttttacaatttttctgtttaacttttaagccatttccaaatttttactattaagaaatagaaagtacaatttagactaaatgttttaaaaatattcatgattagttatttgagattaaatactagaagttgaaattttgacaacttttaggacaattatagaacttttaatgattgttgtccaaattcagcaaggcttctaatagaatatacctacaggatatcaaggaggtacaagaaaagatacaaattttttagaggcaatactaaagtatactgtctagggatgcactgtttgagtgctaaaaccataaagaaatgcaaggaagtggttaatataaaagttagcagagcaggccaggcgcagtggctcacgcctataatcccaacattttgggaggccgaggtggacggatcacttgaggtcaggagttcgagaccagcctggccaacatgctgaaaccccgattctactaaaaatacaaaaaattagctgggcttggtagcacatgcctgtagtcccacctactttggaggctgaggcaggagaataacttgaacctgggaggcagaggttgcagtgagccaagattgtgccactgcactccagcctgggagacagagtgagaccatctctaaaaaatcaaaagttagcagagaaatgagtatttgaggatgggacacatggagaagacttctgaggtgaagggcaatgttctatctttttaccgaggtgaggaatgcaaggctattcaccttctaacaatttgttaatttatttgtttgggtggcttttttacattttattttataatgcaaaatctaaaagtaaaaatctagatttgattccaattcagctactgggtataattaattacaagagtaaattctgacaatcctgtgaacctcagtttttttttcaagtgtcaaattagactatgcatctttgcatgtctgcatctaaattgattatgttatgatattctattattttaaggcaagtcactcagggacaggggatcccacaagactgtgaataccaggaggtatcattcattaattggcaccattaattggatcattgggggccatgttaaaggctgcctatcacagaaatatcacaggttttggagtcaagtattcgtgatttttatatcctgttccactatttcctagctattttaccttaagcagacaaaataatcttgttgtgtctcagttttctcatttataaaattgggataatatttacctctttggaacgaatcctaccaaatatatctcatttctcttttttaacagaagtagcagtctatgtctagagctagtgtatttttatttcaacaaagtattcggtgataaattccttgacatccttgaggtcaagatgaaaaatggaagatttgggattgtccaagggaacagggccctcaagaaagaaggcttctgatgctattgcaaaacaatatattcctgtctgtttcaaattcaacaaatttataaccttcttgaataaaagcattaagtaatgaaagtattaagtttatgcctgacacaaaactagaagaatagctaatcctttggaggacacattcaagattcaaaatcatattaacagatatgaatgatgtgctcagctaagtaagacattaactaataaagacaaagttacagtactctgtttaaggtcaatgatacatttacaaaaatacagaattgagaaggccttctgtcatggctcagatttgtaagatagtttagcatttccacaatttatctttacctttattagcttggaattgacaatgctaggatctcaggttagtactttttgtatccaaaatccatgttctgcctatatctactatagctattccctctgtctgccttctatgctattcaaacatgtcacctcatatctctaaatatgctttcagttacaaaagccaccaaccaaataaggccatttaaacttaaattaattaaaattaaattaaaaatttagtccttcagacatgctaggcagatctcaaataatcaacagcaaaatgtggctagtggctactatattattggatggtacagaaacagaacatcatcattgtagacagttctagacagcagtgatatagagcagggcttttcaatgggccagttctaccctacagggggcattttttggaatctagtggggtactgtcagttttcacaataatttcataagaaaataatacataataaaaattgttctactttctcataattttttattatcttgtaaaatatttaaacagacaaaagtcctatttggagttatctgagtctagaactgaactgttaaatatacaatgcaaatagttttaatatatactatcttttattggaatgttcctatcatgtgaattcaggtactctgtgacttggcttagtctgttcagtgtttagaaaaatcacatcatgaacagaaacaccacttatggtgtttgagtagcaaataaaagtctacttgtatctctcattgaacacagccaagaactctgaggagcatacatggaattgagaactttgaaggataattagtagcaggcagattagaaaagaatactagaatttaaaatgccaccaaactagagatgaatttatcatttttcccttctaatcttcctactgcttagccatacaagagcaaagtaaactcaaagaaaggaggaaataataaagaaaataacaaaattagtaaaattgaaaactaacaaacaatccaaaaacagaaaaaaaaaatcaaaccaaagagttgtctgtttgaaaaaaaaaataagatggctaaatttctaagaaaaatgacagaaacagagggggaagatataaattaccaataccaagaataaaagagaaaatacattacaaatacccacaggctttaaaaagatgaagaactactgcaaacaactctgtatacgtacatttgaaactcagatgaaatggaccaattcctcaaaatcactaatgttcaaaactcattcaaactgaaatagatagcctattaagccctaaactgttaaggaattgtaatctattgtttaaaatccccacaagtaagtctccaggtccaatagtgtcactggcaaatcctacaaacattttggaaaaaatgacaccaattctattccaggaaacagaagaggaaaaacacttctcagtattagccagcattactgcaacaccaaaagcagacaaagacaatttaagaaaagaaacctacataccaatatctcttatgaagatagaaaaaaaaaacccaacaaaatattagaaaatccaaacccatcaacatataagtgaacaatgatagtaaaggaataatgaaccacagccaaatggtatttgttccagaaatgcaatgaggtccaatattcaaaactctatcagtgggctgggcacagtggctcatgcctgtaatcccagcactttgggaggtcaaggcaggtggatcacctgaggtcaggagtccaagagcagtctggacaacatggtgaaacccatctctactaaaaatacaaaaattagctgggtgtggtggcaggtgcctgtaatctcagctacttaggaggctgaggcaggagaattgcttgaatccgggaggcagaggatgcagtgagcagagattgcaccattgaactccagcctgggtgacagagtgagactccatctaaaaaaaaaaaaacaaaaaacacacaattctcacgatgtagccaaccacattaacaataaaaacaagaatgatctctttaacccttatgccactgcataagggttttcttcactatgctatctatacctgatttattctttaaaaaacacaattcagaaatcattccctcttcactgtgtctgcttccaccctgacactaagtaggacaggttctctaactctttctaataactaaaaccattggttaaaaatccagataaatctccactacaggatgttttctatgaaattgcaattatccttttaattgtctattttctgccttaggcaaaagatttttattttttttctttaggacactcatttctaaattggagttcagtggtgtgatcatagctcactacagcctctacctcccaggagcaagggatcctcttgcctcagcctcctaagtagctgggatcacaagcacatgccaccacacctggctaattttattttttgtagaaacagagccttgctttattgcccagactggtcttgacttgaagaaagaagaaagtaagccaagcatggcagcacatgcctataatcccagcattttgggaggctgaggcaggaaaattgcttgaggccaggaattcaagaccagcctgggcaacaaagcgaggccctgttgctaaaaaaataaagtaatagcttggtgtagtggcatgtaccttatggtcccagctacttgggagcctgaggcaagaggattgcttgagcctgggagattgaggctgtgatcatgatcacaccactgcactccagcatgggtgacaaagcaagaccctgcctcacacacacacaaaaaaagtatggcaaaggtactttactccagaaaaatgagaaaaggggtgctcacaaaattaagtaattgttctacagaaagcgattcctccagtaaaaataacatcagccttcatttttctttaggatttgggttataggattggtaattcagcgtgaagttcacggatgcctcttcaagaaacagaagcttcactcaatctggctttcaaaatggtgagaaaagaagtggactcacataattgaagaggcttgagttctggaagcttagaagtccatgactggggtcccagcatgcttggattcaggtggccttcagacacttcttccacaaggaaattgggcagcttcctgaaatgaacaacccgtaaagccatgggaattatggatcagctcccagaccttccgcttcatgactgcaagcctttgtgaaagtttctgacctctttatgcttcaggaatcttagcaatgaaacaaggataatggcacttgctgtgacgatcatgcttccaacagttcaaaaagccaagggaagatcagaagcttatcttccagccaactggggtgggttggtgggggttggtggaatttgacagaagcttgtaatcagccacattggaggatgaggggaaggcctgtcatctgttttgaaacgtgttacgacaagatgttacatttctggaaacctgggtgcagaaaaagatgcacttttctgagagtttgtgcggattgagtgaatctgcttcatttcagcccgaagttgctggagggtccttcgtcaggagacagtatatatagacttgccagaagtgcaataattattcagtctctttctcagtattaagccaatgtacaaaataattacacatctgcttctatagtatgcacagatgttgctgttgttgtcattgatttgttcatttgtttttgttcatcttccatgaatctattcacagccgggaagccaactccactgttggtggacattaaaacctaaacaaaacaaaaattccttagaagacagttaa

SEQ ID NO: 3082 - DNA, 3615 bp, Homo sapiens
caaggactgtgtaaaaggtaatacaatgactaagtactcaacaaaaaaacagagaggagcaggtagtttatgactaactttaccagatggcttccttaagcacagtcataaataataagtgaatgtcacataaaaagaatcacaggaagagaatggatggacagcttctttaccatatgccttttgcaagatccctgatggatttaaattctgttggttttttagagaagttgttcatacctcaatcctgtgccgttcttagattacactgatcagtctcttctctgctcataaacaccccacatgcccatgtttgttaactaaagatgtaatttacttctgtttttagcttggtacatttttttttttttttctgaacgtgtgtctctacaactccctttcacttatcattgttctgctttcagttgagtcactcagtcatcgctaaggactcattagctggttaatgagaagcactgtatggagagaaaactgtgcgcctgccaactgcctgccgaaggacctgggctttaattttcttgccatttcaatcccaatctttctttaggagactgatgataaggttcggagtggactctttgtttgatggctttctaatatggagacagttccaagagagccaggattaaattggccaacttcatgcacatgtgtgacccaacccaaattacagtccaggtggctggtggtgaaagccaactcattaacctacagtgacacctgttcatctgacacacctttcctgagctcaaaaggtctatttcttttgaaatatttatggctctgaaactaaaggtcattccattcttgtctttaacttcacatgatggttaaaacagacacttaaaataataaaatcacctttaaaggcagagaagaaacatacaaagaagtgtcctttctgtcaggacagaaagaaaataaaatgtgcatatagcatcctgaaagaaaaatcttaacccaattttaagtgggagttttattcaaatatccaaatgacagtttctatggcacatcttcaatttgttcatagtaaccaaattgaacatattgccttattctgttatgtgtatgtatgtcctcttggctgccaaactctggagagctcaaaacaagtgtgcaagcaaaactgaaagaggttaatatcacaagagaacctgccacttataaaggtcttctctgtgttgattctcagagacatgttaatggtcaatttaataaaaataatttagtaattttttgcctgacactttagatttaattttttaattaaaataacatataataaacagacaaagattttgtcattttagataaagttagtaactttggctttggttttccttctggttcctcagtgcttttttgcagtgtttacctatctgtggtctcatgtctttcccattaattcattgaaattgctgtcatcatgtttgttattaaattcaagtgacatttctcagttcttaacctatttgacctcttatttatccagccaaaaaatatataccaaatagctactaagtgccaggcactgcatttagatgataggaataaatgctgaagtagacatataaagtccctacagttgtggcatttacagtggaataggagagcttaatattaaacagttacataaacaattattcaattacaatatgattaatgatacaaagaacaaatatagcgtgcaataagagcatataaatgaaaaatataatttagttggatatgtcagggaaatgtccctgagaaaaagacagctaaccttaatattaaaacttatttactcaaaaataagtgtgcgaaactgtatagttaacttatcttcaattcagtcaatctaaaacatcaactaaataatgtattcacagatataccacacaatgacagttagtgttcgtaatgataatcttggatgagaaaagagcctacagggtcttttagatcatcacagttaaattatacttggctaatatagtttgaatatttagtacaatttcatgttcaaaacttctgaaacacttttattcacatgtagaccatataatacttatattatagtagaccatcctatttcacaatcaaattatacaacagtatactaaattatcatatcagttttttgtttctttaatagttgctaatatatgtgtatagttgtgaacatacctgtatatgtgtatgtgatatgtatatatatcaactgtatagttaaaacaccacatgtatagaagagaccatctgactagtatttaagcttagccatgagaatggaatttggaagatgaagaatgtgacctggaggaaagaagaaaatgattacagaggggcatttgagagtgagaggatagagaagagagaaagaggttgaggaaagaagatatcagagtcccctcactgccctccccattaacacactcaaggctaagctagtgaggggagagtatctttgggatactggacaaaatatggaattccaagaaccaggaagcttttgtcttattctaaaaggatataacttgcaggctgtctccagatcaattgagtggtagatccatattacaaataaacatgatagcagagtgtgattaggcagaagaaggtgcatctcagcacctccttctgtgtaatgtggaaatgagcagctattgtagtgggaatgagcaactccacagtaaaggcattaggctgtgccatctgggcagtggatgacagagatatcagtgtgtggctggggtctgaagcctgttcagggtcaagatgagcctaagtcatccagaaaggctgatgaaatcagcaaaagtcagccagacaaagggcactgtcaaggccatcatatggctctaagcatcccttttcccacctcctcaagagcaccaagaaagacaccaacatccattgccaatttccttctccttgccagtagggaggctgaaaaaaaacagatactctctttctattaatatatcttccttatagagtaggatggatatttggctaagtattgatcaataagataaagtggaatttgctgggtggtgggcgggggtcctttgtgtaataattttgtgtcttgataaagtaggaatatggctgggaccatccctgactctcttttttccttgaatgtgaacacatgagtgaagcatacatccattgtccatggggcaagaaacatgaggatgaaaagccaatatgttaaggacatgaagtgaaaagcgggaagagcttcttattcatgttatcactgagcagttctgccggaggcctctccagattgtgatgcactgggagcaagccaccatgaacatatcctcaggtctccagtcttctgccatcgcatgaaaaatggagcttgtcaaacacagagcagagctgaactttctgaattccacaggacagttcagagtgcttggaatgacacccacctgcaatttaaacaaaaaagaaggatgagtaagtgaggagctaaaaattgcatgtttccctaaattagatttatttgtaagctttaagtaagtgcaaacatatttcgaattatctgttatgaattgtggttttgttattaaatagacattttgtttaattctt

SEQ ID NO: 3083 - DNA, 11480 bp, Homo sapiens
tcgtggggaaaaggcagggagggggtggtgtccccagccggtttggggggtgcgttgcccggagacggaaagtttgggagcccgagcaggctcggctgcagcctcggggagggggtccagcgggtggcggccctggggatggggaaggagcaggagctgctggaggcggcccgcaccgggcacctcccggcggtggagaagctgctgtccgggaagcggctctcctcaggctttgggggcggcggcggcggtggctctgggggcggcggcggcggcagcggcggcggcggcggcggcctcggctcttccagccaccccctctccagtctgctcagtcttgctctgtcacccaagctggattggagtggcatgagctcggctcactgcaaccttcgcttctcaggttcaagtgattcttctgcctccgcctcctgagtagctgggattacaggtgtgtgccaccacgctcagctaatttttgtatttttaatagacacagggtttcgccatgttggccaggctggtcttgaactactagcctcaagtgatctgcctgccttagcctcccaaagttctgggattataggcgggagccactgtgcccggtcaacgtctgattttctattggtgatgacataatgaggttattggagtcatcacatgatgaatctggctggcattaggtttcctcattaccaggaactgggccttgtgagattttgacacttaccacatcatgctcaccactcttcctctgatccagcctggtggagtctgtgcattgacttttgtcctcaatggggccagccgcctgattcttgctttttcaggttgccctgcagccatgatcaaacttcaatgcaaagtccagcccatactgtagtatttgaagtcagtaactgagtagctcagaggtattgctactgacagtattgtaggtgagtgtgtatgtgtgtatttgggatgagtgggatggtttcacttcttgagcacttaatactttgtctgtgccaagggctttacatacatttatttgctcagtttaccttcacaacatgcctgcaagataattattgttatttccattttacagatgaagaagcaaaagttaagagagagcttaactgactgctttttgtcattgttttgcttgtgaataacattgttttcacctctttgattggtctttggtttcatgtggccgtcagagtttgagtagagcaaaatcttctctccctctttcattgatttttattttagccttcagtttgatgtgtaactacctgaacgaaatccttaagtttgagttaagccttaagtctgttcttgttgtaggattttggcttggttaaggtctgtctggatcactggggtctggcaagtatccatttctcagttttatcctctggtctctgtgcttgaactctgaagggaagaggacatggctagacagaaaaaacagtacgcaggaaacattgtctccaggaacttttctctcttagagtgcatactggctctggggaagggcctgagtgagcagtgcccctcggggatcttctgcctaatcccacctcaaccaccatctagccgtatgatcttgggaatattttttactcttcctgtagctcagttttcttaccattaaaaaatgggtggcagggggcagtgtttttagcgtttcctggcagaggtccaaggaaaggtgcatcagtgtgtcttaaaacatctgcagagttagactggggaaaggagcgactgcttactgtcctcttactgtgtgccaggaactgtgcaaggccttttacatgcctggtgcgaaaggtcaagaagagaaagaggtctgtcttctcccttcatccatgggagtgtgtgagtgggaggttgctctctctgctcgtgaaactttcatcagcaaatactaattagtgcttaattactatatgttgtgcataccactgtagcagataacttaggaacacaaaacttgacaactcccttaagaaattggcttggttatctgtgagttttcactatcaatgactgaataaataagtggggcagaacagacaggtctttcttacagaagaattccaattataaatgtaggaataatgaggggaatagaaaatcaccattagcataccatagtaataattgctgcaggcaagatctaccagtgaagaatgaaattgggtgaaagctgaaggagaaacaatatttatatggcttcaaagtatcttccccagaatatttattaattcctatggcagcttcaaccgatgtccacttgttctttggtagtcctctctctaggagatggaatttaattctcttccctttttgagtgtgggctagacttagaaactggcgtccaaataatagaatatggagagagaacagtggtaactttatagtgggaaaatctggtagccactgcctttaccgagtaatgaaggttaacatcaccagtgataagtcatgctgatgtcacatatccccagatgtgatgtgatgaaaaggacactttgcctcttgtgttccttccccaaatccataacctcagtctaatcatgagaaaacagaaacacaaattgaagaacattctacaaaatactgagtagtactctttaaaattgtcaaggctgagaaagacaagcaaagactgaggaactgtcacagagactcaagagccaagaccattcagtgcagtgtagggtcctggaacaagggacatgaatgtaaaaactagggaagtatcaacaaagtctgtagtttagttaagagtattgtaccagtgttaatttcttaagttttgatcaatgatttcttaagttttgatcaatgtacagtcatccctgggtacatgtggggtattggttcgaggacccccatctataacaaaatccttgtatactcaagtcctgaggtcagctgtgagaaacccaagtatgtgaaaagtcagacctctacacacacaggttttgaatcccacaaacgctatattttttatctgcgtttggttggaaaaaatctgcatgtaagtggacccaagcagttccaacctgcattgtttaagtatcagctttactatgattctgtaaaacgttgacataaggggaagctgggtgaaagggatacggggctctgtgctatctttgcaacttttctgtaagcctaatattatttcaaaataaaaagtaaacaagcaaagggcctatttgatagaggctctgaagtcaagctgcctggtttcatatcttgcctctgccacctaccagttgggaggtatagatagctttctgaattgctttgccttagttccttcatctataataatagaacttctcatataaagttgtgtaatgattaaatgaggtaatgcatgtgaagtacttagaatagtggcaagccaggcatggtggctcacacctgtaatcccagcactttgggaggctgagttgggaggattgcttgagtgcagaagtacaagactcacctgggcaacacagcaagaccctattgtaaaaggaaaaaaaagaacagtggctggaatgtagtaatgacggctgctaatattaatatttatacagaggaagtccagcctccttttagttactcagccattgagccagggatgtaaatagtgctggaggagtttggaggaagaggctatggtaatggagtagggtggtctggagacccctctcctagactacttgtacccctaggaagtggggccctacctttcaagaaagccaaagattcagatagctgatagaagattggtgtggaggagggcagggaacagctagaggcagaggtagagaagcttaaaataagaaagacctgtttgcccagcagtgagtaagcggctatccagcaggagtcagcggaggtgaggttggtaaggttggctagtgctggatcgtcatgggattggatgctggcttgatagagtctaagaccttgtgtctaggccactttatctctaagtgctttatttctaagcctgagagagagacaattcaaacaataaaaaagttgtttcagtttcaacaggattgtggttgtactttgtttgttggttgaaaaaatatgttgtgacagaatgattatgaactcggtaactctctgaaataaacttgtgttttattaaatatagtagcttctctgtaccttaggggcatcataatatattattctgtgacatttattctgcctactgctggtgcttggtgtacgaatgcatttgctgaccctttacaataacaacatggccccaggacagagtcaccgttttaagtatgcagacatgctttttgacttccaagcctcatcttttgggttgtcttctgtcacaggggagtgtgtttcttttattagtaaagaaaaaaaaaagaaaaattattgtaccactagaaatatggctaaaaattattgaagtataatttacatacagttaagcacttggatattaaatgtacagaccaatgtattcttacctacatacacatctgttatcatcatgaagataacattccagtgccccagaagtctcctttgtgtcacctgctagccaaaaatgccgtccttgaggttatcactgttctgaccttgatcaccataaatttttgcctggggacatgtttctttttctccaccgtacacccatgttcatgcagaacagtggagtgggagcagggcagggtctgtatgtgccaaatactacactagacacattcccagacttaaataaattctcccgtaaaacacagacctgggcttatataacttgtctaaactcaatcccatgtcattgatgccaaagtcagtgttttttccattgcgccatgctctatgtcttcaactgacatttgccataatcattatcattatcattaatgaaaagtcatctgacacttgccagtagtttatatgatcaaagaacatcagttaacacccagttctcatttctaagtgcgtttaaatggtcaagagcttttaacataactctcttgggaagcagaatgaattaagttaatttagaaccaaaagataatggcaatttcttcatttaatgagtgccttgtttgtgcaagatcacgtgctggccaacggagttatagagagaaaagaagtctcaatcccagctttgtgatcttctgatgggggagatagagaatagtgtgatgagtgctatgaaacagagggatgctggagcatcagagaggaaacaaggggcagggctggggaaatgttcctccccgaagggatgaggtctgggtggagtattagaactaaaaggagttgtacagacaaagaaggggaaaagcgagagttattttaagctggagtgtgtgtacagtgtggtggctcagtgtgtgcgaagaatgggtgtctggaagcattgtgcattgagacgactgcaggtaactgcctggtatgtaggagggagaggggttctgtggagtagaaagagattagctggggtagtaacagaggtgagatgcccatgtaaaggagttggattttacattgacagtagttatggatttgcaatttaggaagatcacttcagatttttggaagatggatcaaaggagttgagattaactaggagtgcaaaatgattagggcctgaaggaaggcagtaccagtgagtatgaagaggaagctaaatttgaaatattcaggaggaatgaacaggacttggtgactgttgatttgcagttgagtgggtgatctctcctatgactttgcatctaaataggatattacaggcgggtcacagtggctcgtgccctgtaatcccagcactttgagaggctgaggcgagaggattgctcgagctcaggagtttaaggccatcctaggcaacacagggagaccctgtctctacaaaaaatttaaaaattagccagatgtgatggtccctgcagtcccagctactcaggagactgaggtgggaggatcacttgagcctcggaggtggaggctgcagtgagctgtgatcacactactactacactccagcctgggcaacatagccagactctgcctcataaaagaatgaatgggctgggtgtggtggctcatgtctgtaattccagcactttgggaagctgaggtgggcagatcacctgaggtcaggagttcgagaccagcctggccaacatggtgaaacctcgtctctactaaaaatacaaaaaattacccaggcgtggtggtgggtgcctttagtccagctatgcaggtggctgaaacaggagaatcacttgaattcaggaggcagaggttgcagtgagccgagattgcaccactgcactccagcctgggtgacagagtgaaactccatctcaaaaaaaaaaaaaaagaaagaaagaaaaagaaaaaagaatgaatgaatgaatgaataggatattacaacataaaatgggagagtggggttttgtggaaggactggagttttgtaagggataactgaaatgaaacacttttttccctctctagtagaagggtagtattcattttagaacagctccattacttattttggtgtgcacaggagtttgtagatggagacctacagtggtatggtaactatttttttaagcaggcagataagtcaaacttttggtttatcttttgtttatcatggtgaaagctaagtctccaaatggttgtttttgtttccacagcaaagacctgtgaacctctgaactgagtgggaattagtggtatgaaagaagaaaagacaggcccttcctactcctttcagggtttatgtagttatttatttaccgacatgtgtgcagaaagccaaatcggtactttttgtgaaatggaatatagtttagattcaaaggattttatcaagcttaaagctaaccctgtttttgctttggcctgtgttctgctgtaataatctccttccttgtgcacaggataacagtgggggggatccttaaactggcaggggtattatttagccacccaggccttcttcaatcacactgagagtcctggttcttggctatgagaatgtctcctcatgaggctcaaggactatgtgcataggattgaaaacttctagaaaaggcaaaacaaattctccaggctttgtgattggcattgtctggagtcctcaccctgaacggtcattaagaaacccaaattataccctttatgctgaaaggaagcttttctcttcagctagccaaaatttagtcgtctgcttatgccaactcccgatttcctgttactataaatccttgacagtttagaatgaagaatggtggtgtgtagggcagagaatccttgttcaaatgaatagcagagcaatggcagtataccccttgggtcatatataataaaactacaggataggtttcttgcccttgaaatctcattgtaatagtgctgtgagccaccaagagtttccgccattctagttttcaggttgtgttcaggaaccattaatactttcgcaataacacaagttcttgttcatccagggatgtttatttcagcgttaaattgtaagtaaacaagcatgctacaatttatgaaagctgagtatgtgacctctgttcagtgtcaggatgaaatcaaacgctcataatctgacaccttgaatgatttgcgtgatcattgttgtactgcatgattattaggtaaacagtttatgtaagtaactataattagttataatttttacatggccaaatcaaatgttcacagtttcttgtttatttatttgttggttctccagcatctgtaattagcatcactgtcagcatttttcattgatacctgtgtagactgtgtcctcatcacttgctggttaccttatgttaaaaaaccaagtctaggttttctccctagcagtcctttagaagggacgggtggtcctcggctctattctctctcactatccaacctcaacctcagtagggtcttcagggagtaggagctccagaccctgggaccgtgtggcctgcccagaggttcaacagcacactgttgggatgagagagaggccccttcacctctgagaaggaatgaacaacagattttattttagagtactgtatagattgaaataactgaacatttctcacctaacagatagtaaggatttcaatagacatttatttgcagaattagttttctaccacaaagtcgattggggttagaaaaaggggtgcactagtagggattctttgatactgtggttagatggtcattgaaaagaaaatgatacattttggatggattgaaaagcgaaattgattttggatgacatttttgactggcttttgtgtatttgtgtggcatgcagcagtgaatggctgtgtttggtggttagatgcagaacatttcttgtggttctgctggctgtgtgtgtattgcctgttttgattgtggttaacctgactcaccatttggttccttaaggttgagtttcctttcctgtcctttatgaacatcgtcaccttgttcaaaagggaactttatcctttcttttcaaacgtttactgagtttctgttctgtgttaggccctgtgttaggagccaggtacagaaagatgatcaaatatcttgactttaaataatacctttcacatttacctctttaatctcaggtagccctaacaaccctgtaaaattgaaaaaggttgttcatgtaccccccaatataaataactagtcacagagaaatgaacagacttcaggttacacattgtaatagtgactgagctgaagccttagtgttttgaccccacccctacccattcactagttaggagagtctaaataaagtagggttgtttgtttgtttgtgacagggttttgctgtgttgcctaggttggagtacagtggcatgatcatagccctctgcagccttgacttcccaggctcaagcaatcctctggcctcagcatcctgagtagctaggaccacaggcatgtgccactatgcccagctaattattttagtttttgtagagacaacagggtttcaaacgcatgagctcaagtgattctcccgccttggcctctcaaagtgctaagattacaggcatgagttaccatgcctggcctaaacaaaatagtttgttgttgttgttgttgttgttgttgttgtttttgagacagagttttgctctgttgcccaggctggagtacagtggtacaatcttggctcataacctccgcctccctggtttaagtgtttctcatgcctcagcctcccaagaactgggactataggcgtgcaccaccacacccagctaatttttgtatttttagtagagatggggtttcaccatgttggccacactggaagtgatctgcccacctcagcttcacaaagtgctgggattacaggtgtaagtcactgtgcccagccaataaagtaattttttcttttgagatggagtctcgctctgttgcccaggctggagtgcagtggcgtgatcttggctcactgcaagctccgcctctcaggctcatgtcattctcccgcctcagcctcccgagtagctgggactacaggtgcctgccaccacgcccagctaattttgtttttgtatttttagtagagactgggtttcaacatgttagccaggatggtctcgatctcctgacctcgtgatctgcccgccttggcctcccaaagtgctgggattacaggtgtgagccaccttacccagccaatagtttttgaatctaaaattgatcaatcaggaagcatgacatctacccaaagaaatttatgtagacatttaaaaaattcatacaaatgattcttacactgggctattttatttttaaaaaatcattaaaaacattagaatttaaacaatattaattaaggactcattgtttgcccaataaaaataatcgtcacttcgtaaatcaccctaatgaacgatttagtcatcataatttgatttagtgttttcaggacgacattgttcagtgtatttttttattggtttggaaggtagtgagtaagatatttctaagggcaaaaaggaaacagttttgaaaattcttagctaatactgagttggccaggatgggtgaaacagagttaaaggaatgtgttggccccttttcttgtgcacctagaaatcctccagggcccagtaaccattttaggtttattttattaaaaaacaggcctttgggcttcctgtgttattgattcttcagtttctgcagaacttagaaggaaaatttaccccaagtaaagtgagaagagcattaacattgtaccatggatgcctaaaatggtatttattagacacaggcctgttcaaaggctctgagtgtgggagcaggggcagcagtaaagttgtctcttcctggtggtcttataagagcttctgggagcagcagtcagagggcagagctgacctgctgtgcttaagagaacgtggactttgaggccttgccaaactgaggtgattgttccaccttgggcaaattatttaatgtatctgatttctttcagctataaaatggggttatattttattctaaaatggaattttgcctatcgtatatatagaagaccattctgtttgaagtaggaagtattagctagctcatcacttatattcatttccagggtcatttgaagtctatctacctgacgagaatataaatcccatcagggctaaggccatgtctgtttgtttttctcactatgtctccttgcccctaggtcagtgccatgggcttggtaggtactcagatatctggcaagtgaaggagtccccgtaattagtactgcagctgtcgggaaaaagtgtagacttgccgcctataagcacaggtctgtatttgtcaacatcttagagctttaggcctatgtaggttttttgttgttgttttgttttttaagagacagggtcttgctctgacacctaggctagtgagcctcctgccccaacctcccgagtagctaggactacaggtgagtaccaccgcactcgactaatttttaaattttttctagagatggggtcttactgtgctgcccaggctggtcttaaactcctgggcttaagcagtcctcctgcatcagcctcccaaagggcagggattacaggcatgctgtatctttgtttttttttcttttggttagcaagtaacagtttgggtttttatattcccaagatgtctagaggatttctttcttctacttcagcttgattgatgaaaatgtcataatgaagtgaaagaaaaggcttgctgtacttccattttgaggtggaccatcatgtttttgaagccttgttctctgagccactctattttgtttggggttcactcctagtttaaggcagagctggtactctttgttcccatcttctcagagaaagtatttggtttcaggtcagagctgttttccttttagccacctaaaagcctctgaagaatttggaggtaaagaggcttcatgtctg

SEQ ID NO: 3084 - DNA, 24945 bp, Homo sapiens
gtaattttttggctttttaataataaggccattctagctggtatgagatgggtatctcattgtggttttgatttgcattctcgggtgattagtatacatgaatttgcttctgcctttgccacccctgagacagcaagaccaacaaccccttctcttcctcttcagcctactcagtgtgaagatgattgctgccctcagctgtgcctggagcacagggcacctccagttcggcctctccagaagtaaacttgtcttctgcctatcttgtgtttgttgggaggaggtgacctgggactctactactattgatgaagaatccgaaaaagtcttctattagccctgtgccacaccctacctatgagaaatcagtgtttactgcagagaacacagaagccagcaagcagcagggaagggaggcgaaccaatgcagcagcccaccgggaccgaggaggacacacgcagagcaagtcacaggaagcgcagctgaaaacaaatggacgcttatcccaaatgcacaggacacttaccaagaactgatggtccgtcaaagtaaagctcaacagctttggctggcaggacagtcaaacttttggacgacagaaagtaacagtgggaaatgggacaacatctgccagcaacgcgagaggccaagaccatggctgctacaggaggggtcagcgtcacagtacacgcatggcggcggttgcacatgcatgcctggggaatgtgagtgttcagacatgccaggagtccagcctcaccaggaaacaggcacacggggacagaggcgcaaacactgaaaactctcgctgaatccactcggctgagcggtggtcacgagagcacggccctgcgctccccacaaaactgcacctgggccccagggcgagacaggcgtggaaggtgcaggggtgtgtgtgggggcaggggctcctggctcagagccgtatccaggaaccccccttcaggctggagccctgccctgagccccctgtggagagactgtggagagccccctgtggagagggtgactgtgggagagcagcatcaggcctagtctcggctgtgaagtaccccccacctccacgcaggatcccggggattctgtcaaggtgggggccgcctgctcagcccaggctccctgaacgtgtggctagctgagtttgcggaagaaaccaggagagtgccaacaccaggcttgcaagcaagaggctccctgactgcctgatcctggagcgcaccccatcctccctgtgttccctgggcctcagctgttccccagtgaccttggagacaccctgccccaccctggctccacaggagccctgcccatcaccgcctcagctctgagtctcccctggggacacaaccttcctcctggtgcagaggcgcaggatgctgcccctaaggcccatcttcctctgcagcatgttttgatgtcagctcattcacaggaaagaaacaatcacatctcagtgcccagaatggggaccaataggagaggtcactgggaataaagcccacacgcaccccagggtccatgggctccccagaaatgcaggtggcctccgccagagccaacaagcctaagttgctgatcagcccctccctgcttccctgtgtggaagaggaaacagaggcccagactagtagggctctgccgtggtggccggctgcgtccccagacctctggtcccagggctggctgggagtgcccctccctgtgctcacttcctgctctcctgggaaatggctcagggatggggcgtgtggggacagatgctggcatagctcacaaaatgcttgcacaagggacactccatggcaggtccctgcaggagagcaaagtcacaacattcagagattccctgcactctgaggcccgcagagcctggccgaccaagcgaggctgggaggatgttgcctgctggtcagggcagccctctgatcagggcggccgagtgaggctgggaggatggtgcccgctggtcagggcagctgagcgtggctgggaggatggtgcctgctggtcagggcagccctctggtcagggtggccaagcgaggcagggagggaggtacccaccggtcagggcagccgaacaaagctggaaagatggtgcctgctggtcagggcggctgaatgaggctgggaggatggtgtctgctggtcagggcagctcaggaggtgctgcccaggaggtgctgtccaggcagagcctagggctggtgtgggtgtgccatgctcctgagaagtttctgggttgtggctttaatgttctcctgcagtgagaacgctgacacttggccaaagggtcctcacctctcccctagtacacttctgagatgccaggaaggttctgaacatcagattgattcctgggactcccctccagggtggccttactggagtcaggagcccctgccccactaggatggctctgcagtggcctgaggacagtgagcactgactggtcactggtgcaaagttgcccactgtgatggttttgaccgttgatgggaaccaagtgaaagccctgcagctatttctaggcatttcagagggtgcttccctgcatgtactctgctgcagaccatcctccctgggccaggagcccgctacacagtaggagattctttttcttctcttttgagcacttttattctctttttcttaatctctgctcctcctttgaactgagaaatgtgcaaatcttttttgttagttttgaggttgcttcttatgcatatttcatctggaactttcccctttgggggtgatctgttctatcagcctgcccgctgctagagaggccgaggtggtccggccagccgtgcgctgctgctggtgtctctgtgggcatgacctggtgagatatcattctgcatctgggggtccatcctatcagccctgtgttctagattccccagtgactgacatttagccagtctcctctgtcactctccagtgacatgtacacactgttggcacgaactgcagatgtcacgttctgtggctgagagcctcagtgtgcatctgtagtaggaggatgtcagtgaggactgtcctgtcgctgctgagctggcaccgactgtgcctggtctacactccaggtctgccaaacgacccagcaaggtccttcacaactcttctgatccaggatcacacatcacttgtgctttgatgcctgcttctgaacaattttacctcctgagatgtccatttttgggagtgtgagccctcctctcctggtgacagctggctgaggccgtccagcctcaggacacacagggaacggctgcataaggagatctggggcagggggcccaccaggatgttctgccctgtggggggcaacaccggctgtggtctgccggcggcatccagggacagtctgtctaggtgaggctgaggccgcccccactcgctccctcacccccatgctgacagcagtgagctgaccacagactgggggagccccacagggagactggcctccccagcacatgccccgcagtgccagacgcggtcatcacagaggcaggtacacgacaccacggacgtgccacgtacccgccatcgggaccaaggaccactgagaaaccatgaaggccatgcagcgactgtggtggcaggaccgtcaggaggccataggtgccacggctcccctctggtggttcacctgcccacctgtagctggggtggcccctccagtgcgctccccagagcagaacaccccccaggcaacacgtctgatgaaggccaacagcgtcagtcctctggtgtttggtgacatcaaagctgtgccgaaaggccttccctcactgctaacacttgaagggcttctgtccggtgtggaccctctgatggcgaatgtggtctgtcttatgcttaaagatccacctccattaactgcactcttagggtttcttcctctgaaaaggaatgaacacgggaaccccctcaaaggcatttttaaatgaagcgtggaaggcatcaaagatgtgctcttcttcaggactcaggcttctccatcattctctgttccttggaagcgtgagggctaaggagctgctgacttctctctcttggccccacttcaagaaaggcttgcttcccacacacctctccacgctcccagtgcgggactgacactctgcaccgggaggccaagggccaccatcgtcttgctgattatatgtcaagttctgtgtgaaatgagagaccatggggattcattattgctggagttgacgctttgagattttatggaacaatgtagactcatgcccagtaacagatctggagaggagaaacaggctaaaagccaatatgtttcacaagagcaactgaaaccaatatttcaaatgaaggtaatacctataaagaaacataccagggatgactttatatttcccaaatcatgcagactgccttattgacttcctatttggataccttccaaggtaagtaggtgattgttttgtttgttcttttctagaactgactcgtacacaggtactgtaagaatcctgggaagtggaaagagattccaatctcacctcatcagggagcatcgaatgctctcttaagctcaataggaagaagtgaggctactttcagatttctctatcccaatggcttcaattgtactaaggtaaaaactatttgacagagtgtaatttttctgcagttgtgacatgaacagtccagtttgtgtcaaaagaatacttccctcaatgagaatgtggttttgattagagatatttctagtattaaacataacataatagctaacatttaatgagctcttactatttgacatggaactaagtgttttccaaggattattattattataatgaatcctcacaaatattatgacattggattttcaatagcctcatctaatagacactcaactaaggtaagggacagagctgggatttaaacctggggcatgctctgttttttctggtgctgtgtctcaagttacagaggcttgaggtcttttctaagtaatacctatagctccttgtctcccagaagagacctattatttagggaatccttaaagcttttgtcttgcctgcttgcgactacttctattgcttgcagcatattcctcagcaacttcatggttttctgggcagagtgttggaaattatgtggtaggatggatttaagagttgaagggttgtttactgatatgatttggctctgtgtccccatccaaatctcatcttgaattgtaatccccaggtgttgagggagggaccagctgggaggtgattggatcatgggggtggtttcccccacactgttctcgtgatagtgagtgagttctcaagagatctcatggttttataagggggtgggggcggctcttcccctttcacttactcactccctcttgccatcttgtgaagaaggtgtctgcttccccttcgccttccactatgattgtaagtttcctgtaagaggcctccccagccatgcagaactgtgagtcaattaaacctccttcctttataaattacccagtctcagacggtattctacagcagtgtgaaaatgggctaatactgttaccaaggtctattctagttctgcacgtcttcaacccacctgccgctcatagcgtagatttgggttgtgataagcagtactttagtgctggcagttagcctcatttcagggtgatgcctctcacctgtcactttgatggttaacatttagtaggtggagttgataaagcatgttccagaataaagtgtgttgacatgttaacttctatagaaggtcacaatgagaaaagagacatctctgcttatgacctttgtttggtcagaagctcaatgccatcctcctgccatgtattgttggctgcccagagtacctttccctccacctggttgaacaatgactcactaggcagcatgacacttaagtagcaaaactccattaagctttcagttttattttaaagacttctcaatcaaaattaatctaatcatctaaaagactgaaggaaacttaagaattatatttaaagaactattttgatattatattactggtatgtctataaaatacacaatactgcactgttcattttcaaagtgccctgggatctgtccccaaaatggctctgcttccattgctgtataacactgataacctgattaattattagtggtaataataatactaataattaacatttatcaaatatctcctgtgtgtcaggcactgagccaactgtttcatgggtattgtgtccattatgtcactcaaccttctaacaacctgattaaatactaatattatcctcatttttaaaaataaaatttctttttaaaagaagaataaactatcaaagcactatacacatatgctgaacagtaaagaacttacagtgaaaagcaccctttcatgctgcttctctctaccctaagttctaccccctctacccagaagaaacccttttaattatttctaattctttgggtatttatcttcaaaactctagatatatgctaatactcctgcttaatgaatttacttgactctctctcgtattattccatttatatgaaatgtccagaatatgcaaattcatagagacagaaagcagattcctggttgccagggtgctgggatgtgggggaatgaagagtgactgcctgtctactcaatgggtatgaggttccttttaggggagatgaaaatgctctaaaattagataatggcaatggttatacaacatcgtgaatgcactaaaagctactgaactgtagtatttaaaatggctaaaatagtgaattttatgtgatatcaatttttcttcaataaaacatgagacgtctctctggttagaaagtcacctacattactgttttacatatcaatgtttcatatttatatttttatttttaattctttttatcccttttttatttatttttaatctgatttttatccgcaaagcaacaaataaatgtcactattatttttaaatttaatgtatgtgtttataacaaaaacataattgtacatattttggggtacaacgtgatgtttcaatgcatgtatacgtagtataataatcaaatcagaatgattattatacccatcactataaacatttatcatttctttgagatgacaacattcaaaatcttctcactaccttgaaatatacactgcattatttgctatagtcaccctactgtgtaatagaacaccaaaacttatttctcctgtctaactgtaactttgtaccaattgaccaacctctcctggtattccttcctgcttttcctcctcaaccactggtaaccattattctctctctctctatgaaatcaacttttttagattccacatgtgagatcacatgatgtttgtctttctgtgtctggcttatttcactaacacaattacctccaggttcattcatgatgccacggatgacaggatttcattctattttatggttgaatattatttctttttagagttcaggaaatcgaggtaaaaaaggccaactttccaagatcacataaatagtaaaccttgcatttgatcctatgtagtctaactccacagaccacacgcgtaaccactattcaacacttccctccaagatgacaattttggtggctggaattatgtatgtgaaaaggcaattagacctttgaataatctttcagttgtctatagacagaaaattcctctcatacatgtgaacttttgctttaaaaatgctattgcattataacaccatgatcacccaaattatcattagacattatatgccttactacgcatgcaaataggagtctactaacgattgaagaaattctattagggatttacaaaagtagaaccaatccagtttggtgcatgaagggttacaacagcttctttctaatgtatctttaaaaatgtgattttggaattaagcagctaccagttactgttacatttatgcatgacccttgactactaatagtatgagccaactgtattctattagtgatcttagcagcaaagcaaggatgtataattgattattggtgttgatttatatgtctaataagcagctggaagtaaagcatctctgttcagtttccaaaaatgatagaaatggcctgtttttatcattgctaagaaacagtgggagagaagagattcacccttccctcccagagccagtgaatcagtgctaggaaatgatgtcaaatatcatcaaaggcccgaagtatttaagcaaggaggagaaaatggtgtctcagaaggagaatgtttttctcaaaaggtcccagtacctttgttttgatactgagactgttttgttctctgtttcaatatttttgtttaacattcagtaattcaagcaaacatttattgagccttaattagactcctacagtgaaaccactgagctaggcttggtgggaacaacaaagggtaataaagacatagctactcttgagaaatttatgtcggattggcaggcgagatgtacatacaacatggaactcccaggattctttgattcatgatagaatttaaccaaggtctgcactctaatgcagatgataagtgctaagagactctataaacagtttttcttttgccataatcatataacatagtttctctcttgtttttccccacgttacacaaaatacctcccctcagcacatccttttccaaacacaaatactccttttgaaatgagtttttggaatttcttcttaatagcatggacatgggtggtgtttgggtccacttttactagcttttggaacttcactgagttatttaacttcattaaatctcagctttcttatttgtaaaatgaagaaaataatattagttacctcataccgtttttatattgattagaagatatagtgtaaagcacttagcacattgcctaatatgtgatacttagtgatagcttttattattactacattaaataaattgctaaaaattaaaaaatagattacttctaactcccaaactcagcatctgatatcatttttgtgtgttccagtccttgatcatatatggaaattactaatttctccattaactcaaaactttgatcttgccaatggcaaggttttatctaatgtacttcctcagccctgtgtgcacagtgggaatttaataattatttgttgacaaaataagtcttcttgtgactctgtcttcagttactcatagctctctcctgactttctcagataaacttcctgaggggttgcttgcacctttgaactcccagacagttcataaactactgagattggcctttggcacccatcactctccaaagcagcacttatttaagtcattgtcccttccttgcccctaattctgaaggacaattccattccaatccttactttcttattgaccttggaggcacttggagtgctgtcaactcctccccctcctcctggaaatacattctttgggttttcctgtcatgtctctatcctctagttttaccttctccacttttacagccaaagtgactgttatgagttaaattcgttcctccaaaatttgtatgttgaagttctaagtcccagtaactcagaatgtgactgattacagataaggtgttttttttttaataagataattttgaggtaatttggctagaacaaagtcattagggtgaaccctaatcccctgtgactggtgtctaataagaagaggagattaggacacagacacagggagaagatgactatccccagtgaaggagagaggtgctgcttttcttggtactcatggctcctgtctgaaacactcttgccctccctcctccccttggctcccccacatctcctcttggctaactctgtggatccttcaggtctcagtttggaggtgcttggaggactctcctgagctctgctgtgttctcctaattccctgtatttacttctatctggcgcttactgcacggctataattgcctggctaattatttgtatttccttcctgggccataaactccttgaaggcagggaaaacattcccttcacttacatccctagagacggacaaggtacctgatgtacagtagggtctcaagatttgttggatgaatcaatgagattttattgcttagcagaagaaaaaattattttcctaatggtggttgtggtttaataacacaaagacttggttaagaatacaaatattaaagttactttaattctgtagatctgcctgattttgaaaattgtccattacagaaggaatttattcttggtgcataaatgtgccacttcatctacttctcttgaagataaaattcttagcctctgacccttttgttctgtgaagtacccactgctgcaagaaaaattcaaaacagatagcatatacatgtggaagataattttattatctttaattatattttatacctctgtttttcacctatgtaaaacccaattagaaaagaatcagatataaatgtgttattttggaagcaatcaactcaccttctgaagctacataaataagaaagcattagagaaatgggtccaaaaagagtttggttttcatgtggtaaacttgttattcttagtatcttgaggaaccggcaaacaacactgctgacttagaacatgttttttttttttttttgctggtgaaaagagagtgggtgactttgtgcttaagacaactctagaagtgtccttttgtggatgccagttctgcaaaactatttgggactctggatatgtaactctttcgaaacctggggattagaagtttggcactgcatacctttcagaggagaagaaggctctgctttcggtataactgcacggctctaaagaatggcaatgagcaaagaatgagaaataatttaatccactattgattaacatgtttgttgttaaaagctaattttctgtaacagcagagatgcagcccagggtttctggagacttttaaaaatacctccaggcacagtcaatgtttaaattttctaaagcatcccacacactgaagatatttgtaagcatccaactaaagacaatcaaaattagaacttagcaaaaatgtacagatcactggtatatattaaattttaattagaaaaatagagactcctacaagtaaatttcattgtattagaggttgtctcacattttttgaagtaataatacaatcagggaaaacaaatcttttcagtttgaaattaacaacaaaagccaaagaaccaacctctaaaagctctttaaaaaactctaattaaaaaaaaattcatctctttggccatgctcgactgatggtacctataaaaactgaggcactctttggtgtatgcgcgttctcagagcagaattagatcaaggctcgatgcgaaagcacgctgtagttactattatcaaatgcggaatctcattttagctactataaaaggcccctggtattaaaacactgcgtttatagatgatggatgaaaaatgtatttttcaaaccatggcctttgtggtagaacatgacttgcttactatggaaatatctccagctgcctagaaatgttgcctagcaaccctggaaacagagaaaacctaatatctctgagttgcttgtgggtaaagggattattaaaaatatcaattagaaaaaaaggactgcaaagtttgttattgggcatgacaacaactgctacttccgagtttgacagcgtctctgtgccctctttctcatggaatttcagatgtttcttatgtgtttcccatgaattccctagtttctaagtctcaacagtgcagcaaagagggtgacttgtagaggtcatgtctgtgctgtcaggactcagccctgttcccccagccctctgctggaagccgttctttgccttggtgagcagcagtcagccagccacgtcggctttgatagctgtcagcttccttcagacccagcaatttccgggtgactgggaatgatttttagttgctgctgtcctgactgttctgttcattggccaaggctggggggcagcttgctctggaagagcaccctgaagacacccgccttctgatcagatgccctggctctgcccataggctcccctgaagggctggcacaaagcttggaaagcttcttacgtctacaccaggcagacctgcgttctgtgttgtaagcaaagtaagatggcagactaggttcaggcccgactctcttcaaagtccctgctattctttttctcacaggattaaaaaattttttagttgggcaaatgcattctgtgtcttagtcagtttgggctgctgtaccaaataccataaattggatggctcataaaccatagaaatttctcacagttttggaggctgggaatttcaagatcaaggtggtggcagattcggtgtttgtcttctggtccatagagggtcactttcctctaaaacctccttatggtggcaggggtgaatgagttcctttggcctcgtttatataggcactaatcctcctcctgagggcagagcctcccaaaggcctcagcttctagtacctcctgatactatcaccctgtgggttaggatttcaacatgaatttttggggaaaacaaacattcagaatatagcaatgggttcttgattcatgtgacagaaagcgaatcattctgaattaacttgaataaatgagtggtattcaagctgaaactgataatagctttaagtgtgaacatagtttcctggtcaatcttgaaaagccaatctccaccagaattgtaactactcttaagaactttaatagcagtagtaaccagctcgtgcttcaaatttctacagtgttacagtctatagaatatttggacatttgcattctcatttgatctaactgcttgctggcaagggttactgttagctccattttatagcagtagaagttgatgtccaaagaggtaagatgacctgtgacagcaaaggtagagagattccaaacttctgaagcttgggccaagtcaacgtcttttctgtggtttcaaccccagtcagtacatgatctttttgatggatgcagaaccaactgagatattttctccactagcccattagcaggtgctgctaatggttccaatccagggctttgatcttgaacttctcagcctccaataggggtagtgttagctccattttctagaagtagaagctgatattcaaagaggtaagatgactttttcaacatcattagtaaatatgtcagttcttgaactagggtcttctgatttccaggccaatatgattgttagtaagcaattaagatgaggttcacctatcatagaaagtagagacttgagcagtgtaaagatccacaaatttgaggcatggacctcctttgtatggtaaagctagatacaatctacttgacttgccccagtgaccccatacatttcatggaatgtgcatgtgcaggtatgccatagtgaccacctctcagtcatagcataactcctgggaactgaagcctgcttgctctaaacccaccaattagaactccttgaggagcatctgtttgggcaattccctgaaccatatgaaagacagaggtaccataagtccctctctttctctcttgctccctacccaactgattgagtgtgcatgtcctgaaagctcccgtttcccattggccctacaagatgtgctgccctcttccatctgggatttgtaaataagaaactgcttctgttattttgtttgctgtgctgcctcctctttgtctcatctgatcaatacacctgaacctaacttctttcctggagaaaagttaggctctgtcctagagagtggctatccacaggtcagacaagagtcccacaggggtgtctgccagaataaagattttcctgtgcaagagacacctggtcatgggttgaacatttgggcattaggctatccatgagaataaagaagtaccctgtgaaagcacactgtaaatatccatgaccatctaccctggagccctgtgagtgcagcattggaatttgtaccactttccagagagagacctcaagaccaaattagaggaaaatataacaattgtatactggaaatttgttgagagagtagatttttaaatgcgttcacgcacacacatacaggggcaattatgtgaggtgatggatatgttaatttgcttcactgtggtaaccattttactatatataagtatgtcaaaacatcatgttgtatacctgaaatatatggtaaaataaagacatgtttaaaagaaatgatagaaattcactgtgagaatgaaaactacaggccaatctctcatgagcatttgtgctagttatttactcatctttctcagcttcacatctgcccaattatgctatattttatgctactgaggcttgaagtctgcaaactacatttcccagcttccattgccagctggcttacttttcaattatgctaatgggaatctaaagttcctgtttgaagatcagaagtgaaccgagagaagtttcctgcttttgacactaataatgtggcggttgttgtttgttgctatgacaacaaaggtagagacgttctgaagtcccgacgcttggaccaagtcaacatcttttctgtggttccaaccctagtcaccacaggaactttttgatgaatgcagaaccaactgagatagtttctccagcagcacagtagcaggtgctgctaaagggctcaatgcaggggctttagcagcttctaatctttaggtgtcagtctttcttcctcctttctcctacagcacccctccttctttttcttctttagcccttccaaaatatgtgcaaccaatttcctatattaaaatccccttattacaaaaatgttgtgattcagatagttgtatgatctgatttgtccaaagtcacacagcaaggaagtttcagaaccagatttgaaaccaggcaagagtgactatcatgcagggctcaaaaaaattattgtgtttatttagagtatacaacatgataataggggatactatatatagtaaaatggttaccatagtgaaacaaattaagatatccatcatctcacaaagttaccctttttatacacctgttaggatggctattactaaaaagtcaaaagataaatgttgttgaggctgtggagaaaagggaacaggggaacagttgtacgttgttgatgggaatgtagcttggtgcaaccattatagaaaacagtatggagatttctaaagaaattaaaaacaaaagtaccatatgacccagcaatcaccctctggccatatacttgacaggaataagatcaccaccctgtaaagatatatgctctcacatgttcttgtagggctctcgcctcagtagttcgctgcctccaggacatggctgtgaggggacacatgtggctgaccgtttggaatagagtccctcattttaagggtttagatgagctcaattttttttagtaattagggtggattatgtattaatttacttggattcaactatataacatcaagacctggaccatattacatttcttctcttgttcaatacttctcttacctaaagtgggtcccttcctcccccccatatctatatgtatatctatatacctatatctagctatatttctccactgatatgcaagaccttgacatagagccatacatagaggataaagagattatattttatccctttctagtcacctgtgctaggagccttctgttagcctgctcatcagctttggctcactcagtcatggactcattatagtctcaggaaacgctcagcccaaataacttttactagatcgtcatagcccaggatttataacactgtggtcaaaggacgctggcattattatcatctgaagatctttttatctttcagacttctgagtatacgcctcaacctagtgagccctaaccttatggaacatgaaaccctgcaatctgctttcttatcaaactgcccagggaactccagagcaaactgaagtttgagaatcacggaggggcatctcataccttttcaaaaaattaattgcatgcatgtgcaggtgtcctcccttctccatttcaaatcttccctcttttctactccatggtacctggaggagaaaccttaaagacgtttctcactttttctccatttatctcttgctttttgctactaccagtgcttgctgctttcctccttctcatgggaagaaccacagttgtgcagggaagagctatttgctccttgaatgtttgaaaagtttacatggcacttatgtatctttcaacttggtaattgtccaatatggtcaccgaagaggcactgtgcatactttacgcgctgctgaatttcaattccatagacatcatcagtcattcctccttctgggctgaatgtatgtctgtcagtgagagtcaccagaccctgaatgggaacattcactgaagaaggtgttcctgtcggcgttggtagaatgagagaatgagtacaggcctgcagcactttgagcctccatcaaacgggcctctcaatctctacccactcatttcattttttttttgccttattttacaccccaactgccataggcactacccttacccattcatgaatcaatgctttcttgcaagcttcctctaactcttctgacatccatggtaactgggccacagctagcacagtgccacaaagaggtcagctcatgcgagcccttgggagggcttgactttatccttaaaatctttgtgtgtggctgtttacatagaaactgacagaggtcgagagaaagaagtaggcaaattatggtgtgcagggccttgctcctctgccaccatttgagttcaatcactttatactttatctctgatttcacttaaaatcctcacatgccttatagggttgagatggctgttcacaaatacctggcataagcctttttccctctgctcaaccacacaaacagcatttcctggagtgcgcttttgcggttcctctagagtctcctggtggatggaggtggagtgaggaatggtactgaggttaacttcggtcaaattgcatattctcttcctcttggaatatcccagtaaagagtcatttaggataaaaatatggttaatttagcccaattcaaaattattccatcacaaaacactaacatagggtttatggaacataatcctgtagaattccctgggggattttgtcatgtaactgcagactatccctaatctttgcttgtattctttcctccttggatacaccactgggccttggtacctctattagagcaaagatagaaaaaaaagattaattgggctttgcttagaaaggactaacaagctttttcaattgccttctaaaatgagtattctttccttacctcaccctgatattgtaggttatttcttatcttgtatgaactacttttcctaaccatcacttctcctgtgttctaaaacattctctctactccaaccacctgctgcttcgtgtgctatttgctttctcacttctgtgaccttctttattcattttcccatgcttagactgccccctcttcccctctgtctctttcatgaaacctttcttggctgacatctccccttctctctgctcaattaaccaaagaattcattcaacatatgccaattatgtgaaggactgggttgggctctcaagatacagtaatactgaaggcagacctgggctctgttactatggaaatgggattctctagcttctgaaccccacctcactttacttgcattacccttagagtaagtgcttttactcattacctctttttataattttatttttgaaacattttcaaatgtacagaaaagttaaatgtataaatgtctcaaatatatccttaccccagagactccattttagtctcctttataacaatggggtatgatctaggacagaaccttacacccagctgtaatgtggctcaaactgcaaacctgaagcaattctttagtctttttactttccatgaccttgaagagttatgaagattaaaggccaatttgggtctgtttgatgtttccttatgttaagacccagaatttttggccagaatttcacagaagtgatgctgtgttcttacttcatcctctctgatggcagttgtttgtctacttgtctcattgctggagaagttaacactgatcccctagttaagatgatgtctgacatttttttttctgctgcaaacctatctatcttttcctttgtaataatgggtattttgtggaaagtcacttggagactgtgtaaaatctactcatcccaattttatctaccagttttagcctccattgatgtttcttgcctgagttaattgttagcataacagtttgccaaatgccattattagttgccattcagtagtatgtaaagatgtatgtatgtgtatatgtacatatgtattgatataagtgtgtacttagagacttacatcgatgagttataatccattacaatgattatttattttgatgttcaagttgtcccagatttgaccagtgacagcttcctaaacctgatgtaccaagatgtgcacaagcacgtcttctttccttgccccaaccaccctggagttggccatttgtctaagatgtcctgtttttgtcttttaagatggagaagtggcattcaaaagtcgagatctgtgtgcttggtgtgctttattgctattgagatgttgctgcccctaggtcctctcagtggtcagagcaaggaaatctatgcaagtatatacatacctgcatacacacctacataatatatacatatctgcacacatatatgtatcatacacatgtgtatatacacattttcatctctctatatctctgtatctatctttctaggtatacactgaaaatcatgagttcatccagataaactttaattccaatctaatgctgcaggggttgtttctccttcccccttctcatatttgtacctcatgttctctgacagtgaaaagcctggttatcattattcgtgatatttttacttatttactcaattctccagtaagtaatctcctgaccttgctggggtgctgccctgctctcaccccttccttgtgtggtcccgccctactctcaccccttccttgtgtgatcctggctgttcacactgggatgacttcctgccagggatagggaagggaaggcagccccatcacctgtgtgtgtgatgtgtgtgtgtgtgtaaaaacataagacttaaaaaatcataatttgacaagttataaaatgcctctcccacctctttttttaatgcttctctatgtattgaaaaataaactcgttactttcctttaaaataaaccaaatgaaccagtaaagatgatgattttatttgagcaaacctattttatcaactttcgagtttaccttcttggcttaacaccaaaggacttacagtcatttacacacattttgttcctaccccaggactccaagctccttgaggacagaggctggcttctgtttgttcttgagtcaatgggacaccttgcaccagtgtctgaagtggaatgtgtgtccaatttgttatattgattatattcctcctatcagaactgaccagctgttttgcagaattgattgaacttactcattattccaacatttcatgcaagtagcttcaacccacagaaatatctcacctgcaatgtattaagaagcttgtgggaaaagtggaggtcacaagtttattcactagaaaatcttttacaaactgaataatatccttaaaaaggaaataggaagaaaaaatggtacgaacaaaacaaaggaggcattatggagatgcttgttttataaaattaatggagatgttgacttttcctaacacatgaaatactgtgcagcaaatagattctgtttgaaatggaaatagtcaattgattggtaagggagatacgtacaaaatgtttacattgaaagtcataaaatgcaacaatagacaattgtaaaaagtgttgtaagcttagtgatagacttgttttaggtatggcttgagaatatacgtttcacattgttgggattctgtctggtgtgtagcggtcttcactgggctttgagtacatgtttatattacatgcaagttacaagggcttcaaggccctgctacaggatttcccctctcccagtagatctcatgactttgtctgtaaatcagtcattctcattgccatatgccctcttcttaacatgaattcagaacgaatcttccttgaagtctttctccattaccactggctatttttgcccctctgctggtctaataaaatagtttttggaccaatttaatttataatctatttcagatagattaaaaaaagatgactgacatctgtcacatcagtcaaggttaaaaatgcaatttctggttcattaaacctaacagaaaaggtcaatctttaataattgtataatctaataagctatgttctcagaagacttctggtagacttgcttgtgccaaaatgtgcacatttgagaacatatgacctcattatgcttttaaaatacacacacacatacacacatacacgcacacacaaatcaatttgagatttactttaagagatccacttagaaataataattttggtctaattaaggcatgaattaattttcttctttttactggcattagccagagtgcctagaattgaagatggaggccaatctgggctgtaggtttataaaagatgtatttatttcatggttttgatgattatgagagtaagcaacacattccaaatcctgcttacaggaataggctttcacagaaaattatatggataaagtgtctctccaaaatatagcactgcttcgcattctttcctaattgagctttctctgattactaaggcaagtcacatcttataataaacagtgggggccattatccatagaaggggagaagtaaggctgtttgtcctcagttatttatttattttttgggcagagctagctgaggttttattttgaacacacacacacacacacacacacacacacacacacacacacacacacacagagcaattgaattgttttgtagctggaggcatgggcaaggggtgtccccaggcagtaaactcccccgtgagtgggctgagggctagggctgagcctcaggtgggtctcctgttctctgtgctcccctgcacagcggcctccctcttaggctctggggcagccgcaggaagggtatgctgggaggggctgctgcagctgttcacttgggcaggatgtcagacaactcggacaccagcttctcattgcgggtcttgatcttcttcacaaccacgaccctggtggagctggtgcagctgaaggagctacagcccgcgacagaaccaaaactggagcccaggccgtagctgaggccgggagttgtgaggtccccctaggccgagctcagcccacctgcatagccgctggtggtcttcatgtggatactcatgttctgcatcccaaactccagccggttctcctcgccctctagcaggtttctgtaggtggcaatctcgatgtccagagccagcttgatgtgcatcagctcctggtactcacgcagctgacgctccaagtcctgcttggcttgctatagggtaccctccagctcggacagcttggtgttggcatctttaacggccagctccccagctgctcggcaactgtgatggcggtctccagggaagccctctggcctttgaggccctcaatctcagcctagagccggctgatgttctggttcatctgggagatctgcttttgtgtgccgcagttcatccccgtgcttcccagccagcttctgcagcttctcatacttgatctggtacatgccctcagcctcagtcctgctgcgcttggctagctcctcgtactaagccttgacctcagcgatggctgtccatgtccggggaacagctgttgtccatggacagcaccacagacgtgtcccagacctgggactgcagctcccagatctcttcatacagctgcctgaggaagttgatctcatcagtcagaccttccaggcgagactccagctctaacttgttcaggtaagcttcatccacatccttcttataaggacaaattcattctccacctctgtacgcttattgatctcatcctcgtacttgttcttgaagtcttctaccagcccctgcatgttgccaagctctgcctccagcttcagcttctcctggcccagagtctccagctaccgcctaaggtttttgatatagctctggaacattttgtccacgttgctccaagccatcttctgctgctgcaggaggctccagttggactccagcatcttgttctgctgctccaggaaccgtaccttgtcgatgaaggaggcaaacttgttgttgagtatcttgttccgctccttctcctgggtgcacgtggcctgaatgttggggtccacttcaggttaagggggctcagtaggctctggttgactgtgaaggcggtgatgcttcctatgctgctggccccaccatagcctccacccaggccaccctggaagctgctgctgccgcccacttgggagaagcttgaggagctgatgagggcactgggcccactcgtgtagaagtggctgctgaaggcccctgggagagaggtgacacctggtaggacttctgggtcaccctgatggacatggtggaggcaggagtggaggcaggtgggctgaaccaggcagagattccagaaggggtggagaagctgcttcttggtccagttatttcttttagtggtcctaacttccctcctggttcctaacatgctgggatacacagcctgggctggtgagcatttaaagttccttatctggattagggtgctaaaaatatgtgtctactccagtgtccagtgattatacattagaaatatggtgaacagcaatattaatttagttgggaaaagcatgttccttcagagtaaaaaaaaaaaaatgcagattgggaatcttggctcagctacttcctaggcgagtttgtgttgattgattgattgattgattgattgaatctgcctactagggaataggcaagttttttttacttctttgagtcacaggttcttgtcaatcaattgagggcaatactaccatgtagaatagttgtgatcacatgagataatgtctacaaagtgcttcacatggtgtctgatatggagtaagcattcagaaatgatagaaattattataattacataatacatttgtggaagaggaagaattccaaattttattatctacacatatcccattctccaaatgagactgcagaatttctaagtcaaaggacaatacagattattacagtggaaaaaaagaagctcatataccaaaatacaggatgttagctgggcacagtggtatgcaccatagtcctagctacttgggaggctgaggcaggaggatcacttgagcccaggagttggagactagggtgttatgactgcatctgtgtatagccactgccctccagcctgggcaacataggaagacccatctctaaaatcatacatacatacatatgtacataaaaaggaaaaaaaaccctaagaagttaatggtatcaattaatcttcttaagagaggaccagaaatgtagaaggatgcaggctaataggtggttttaggatatttactgcctgtctctcccacttactctagatggccagtagagctgctcttccctttcaattttagtatccctcttctgggccttcctcgaatcttccataggggattcttttggattatcattttatggtttaattgaccttcattattaggaaacaaaacaattctgaacagaggccatcggtgtgctatgcagagcatcatgttttcacaatcaatttactcatttgctttaaaattcttcgtagtttgagttctgagatatctaacaggatgaagtttgttagagaatgaaatgaacagaatgacattttataacagaagtggcatttcataacagaatgaaaacaaccaaaatgatcttttcaacaagcttcctctaattgcctttagagaatgtgccttcctctgcttacttgaataactaaataaaggacaaaacatttgtaattttaatattaagaatatactcagagttggtaattttgtcaaactgacacctgataatttcaaaaaatggtcagagcatatccttacggtttaaaactttttttaaaaagtctgttgaatagaaatcttaaacacagtaaatgataatgttaaaaacaaataagctattggaaaaggctatgaatcaatgtaatctacctaaggtcatatctgttagtaggcctgctgggggctcaggaggtatttagaatgcacccaattggtctcagaaggccagatgtctcctatgtcctgtgagtctccaagttctcctttaaaccacacatctagctactcagaatggggtgtgctttgcagacatcacacaaaggtgtaattggccaaaaagtacattgttgtccctctccctcgtcattccattgtccttgtattaccttctcttctttaaggaaaaaatacacataattgtggtcaatactgtactcattcacatagtagaagtatatagtactcagacagagaatatatgatatatgtcctggagttgtaaagggaggaggaaaatcagagaaatgtggtgtcctggaatccaagaggagaaagcattttgagaagacagtagtcaataatgtcgactagaacagacaggccttggaaactaagggttaagaaaaagctactggatttggtgaggtcatcggtcagccttgacagatttcagaagaaaagtagtttgggaagcctg
